United States Patent Application Publication US 2021/0260178 A1 - sequence listing, part 14

SEQ ID NO: 23251 - RNA, 1745 nt, Artificial Sequence
  mRNA product Design a-1 (hSL-A100) comprising derived and/or modified sequence from LASV(LASV003-NIG-2008;Clade II)__AIT17580__GPCmut2 (opt1)
aggagagucccgcagucggcguccagcggcucugcuuguucgugugugugucguugcaggccuuauucaagcuuaccaugggccagaucaucaccuucuuccaggaggugccccacgucaucgaggaggugaugaacaucgugcugaucgcccucagccugcuggccauccucaaggggaucuacaacgucgcgaccugcggccuguucgggcugguguccuuccuccugcugugcggccgcagcugcuccacgaccuacaaggggguguacgagcuccagacccuggagcuggacauggccagccucaacaugugcaugccgcuguccugcacgaagaacaacagccaccacuacaucauggucggcaacgagaccggccuggagcucacccugaccaacacguccaucaucaaccacaaguucugcaaccugagcgacgcccacaagaagaaccucuacgaccacgcccugauguccaucaucagcaccuuccaccuguccauccccaacuucaaccaguacgaggccaugagcugcgacuucaacgggggcaagaucuccgugcaguacaaccucagccacaccuacgcgguggacgccgccaaccacugcgggaccaucgccaacggcguccugcagacguucaugcggauggcguggggcggguccuacaucgcccuggacagcggcaagggguccugggacugcaucaugaccagcuaccaguaccucaucauccagaacaccaccugggaggaccacugccaguucucccgccccagccccaucggcuaccuggggcugcucagccagcggacgcgcgacaucuacaucucccggcgccgccggggcaccuucaccuggacccucagcgacuccgagagcaacgagacgccgggcggguacugccugacccgguggaugcugaucgaggccgagcucaagugcuucggcaacaccgccguggccaagugcaacgagaagcacgacgaggaguucugcgacaugcugcgccuguucgacuucugcaagcaggcgauccggcgccucaaggcccccgcccagauguccauccagcugaucaacaaggccgugaacgcccugaucaacgaccagcucaucaugaagaaccaccuccgggacaucauggggauccccuacugcaacuacagcaaguacugguaccugaaccacaccgucacgggccgcaccucccugccccggugcuggcuggugagcaacggguccuaccugaacgagacccacuucagcgacgacaucgagcagcaggcggacaacaugaucaccgagcuccugcagaaggaguacauggaccgccagggcaagacgccccugggccucguggaccuguucgucuucuccaccagcuucuaccugaucuccaucuuccugcaccucgugaagaucccgacccaccggcacgugaucgggaagcccugccccaagccccaccgccugaaccacaugggcaucugcagcugcgggcuguacaagcacccgggcguccccgugaaguggaagcggugaggacuagucccuguucccagagcccacuuuuuuuucuuuuuuugaaauaaaauagccugucuuucagaucucaaaggcucuuuucagagccaccaaaaaaaaaaaaaaaaaaaaaaaaaaaaaaaaaaaaaaaaaaaaaaaaaaaaaaaaaaaaaaaaaaaaaaaaaaaaaaaaaaaaaaaaaaaaaaaaaaaaa

SEQ ID NO: 23252 - RNA, 1745 nt, Artificial Sequence
  mRNA product Design a-1 (hSL-A100) comprising derived and/or modified sequence from LASV(LASV035-NIG-2009;Clade II)__AIT17588__GPCmut2 (opt1)
aggagagucccgcagucggcguccagcggcucugcuuguucgugugugugucguugcaggccuuauucaagcuuaccaugggccagaucaucaccuucuuccaggaggugccccacgucaucgaggaggugaugaacaucgugcugaucgcccucagccugcuggccauccucaaggggaucuacaacgucgcgaccugcggccuguucgggcugguguccuuccuccugcugugcggccgcagcugcuccacgaccuacaaggggguguacgagcuccagacccuggagcuggacauggccagccucaacaugugcaugccgcuguccugcacgaagaacaacagccaccacuacaucauggucggcaacgagaccggccuggagcucacccugaccaacacguccaucaucaaccacaaguucugcaaccugagcgacgcccacaagaagaaccucuacgaccacgcccugauguccaucaucagcaccuuccaccuguccauccccaacuucaaccaguacgaggccaugagcugcgacuucaacgggggcaagaucuccgugcaguacaaccucagccacgcguacgccguggacgccgccaaccacugcgggaccaucgcgaacggcguccugcagaccuucaugcggauggccuggggcggguccuacaucgcccuggacagcggcaagggguccugggacugcaucaugacgagcuaccaguaccucaucauccagaacaccaccugggaggaccacugccaguucucccgccccagccccaucggcuaccuggggcugcucagccagcggacccgcgacaucuacaucucccggcgccgccggggcacguucaccuggacccucagcgacuccgagggcaacgagacccccgggggcuacugccugacgcgguggaugcugaucgaggccgagcucaagugcuucgggaacaccgccguggcgaagugcaacgagaagcacgacgaggaguucugcgacaugcugcgccuguucgacuucugcaagcaggccauccggcgccucaaggcccccgcccagaugagcauccagcugaucaacaaggccgugaacgcgcugaucaacgaccagcucaucaugaagaaccaccuccgggacaucaugggcauccccuacugcaacuacuccaaguacugguaccugaaccacaccgucaccgggaagacgagccugccccgcugcuggcugguguccaacggcagcuaccugaacgagacccacuucuccgacgacaucgagcagcaggccgacaacaugaucaccgagcuccugcagaaggaguacaucgaccggcagggcaagaccccgcuggggcucguggaccuguucgucuucagcacguccuucuaccugaucagcaucuuccugcaccucgugaagaucccgacccaccgccacgugaucggcaagcccugccccaagccccaccggcugaaccacauggggaucugcuccugcggccuguacaagcacccggggguccccgugaaguggaagcgcugaggacuagucccuguucccagagcccacuuuuuuuucuuuuuuugaaauaaaauagccugucuuucagaucucaaaggcucuuuucagagccaccaaaaaaaaaaaaaaaaaaaaaaaaaaaaaaaaaaaaaaaaaaaaaaaaaaaaaaaaaaaaaaaaaaaaaaaaaaaaaaaaaaaaaaaaaaaaaaaaaaaaa

SEQ ID NO: 23253 - RNA, 1745 nt, Artificial Sequence
  mRNA product Design a-1 (hSL-A100) comprising derived and/or modified sequence from LASV(LASV1000-NIG-2009;Clade II)__AIT17782__GPCmut2 (opt1)
aggagagucccgcagucggcguccagcggcucugcuuguucgugugugugucguugcaggccuuauucaagcuuaccaugggccagaucaucaccuucuuccaggaggugccccacgucaucgaggaggugaugaacaucgugcugaucgcccucagccugcuggccauccucaaggggaucuacaacgucgcgaccugcggccuguucgggcugguguccuuccuccugcugugcggccgcagcugcuccacgaccuacaaggggguguacgagcuccagacccuggagcuggacauggccagccucaacaugugcaugccgcuguccugcacgaagaacaacagccaccacuacaucauggucggcaacgagaccggccuggagcucacccugaccaacacguccaucaucaaccacaaguucugcaaccugagcgacgcccacaagaagaaccucuacgaccacgcccugauguccaucaucagcaccuuccaccuguccauccccaacuucaaccaguacgaggccaugagcugcgacuucaacgggggcaagaucuccgugcaguacaaccucagccacaccuacgcgguggacgccgccaaccacugcgggaccaucgccaacggcguccugcagacguucaugcggauggcguggggcggguccuacaucgcccuggacagcggcaagggguccugggacugcaucaugaccagcuaccaguaccucaucauccagaacaccaccugggaggaccacugccaguucucccgccccagccccaucggcuaccuggggcugcucagccagcggacgcgcgacaucuacaucucccggcgccgccggggcaccuucaccuggacccucagcgacuccgagggcaacgagacgcccgggggcuacugccugacccgguggaugcugaucgaggccgagcucaagugcuucgggaacaccgccguggccaagugcaacgagaagcacgacgaggaguucugcgacaugcugcgccuguucgacuucugcaagcaggcgaucaagcggcucaagacccccgcccagaugagcauccagcugaucaacaaggccgugaacgcccugaucaacgaccagcucaucaugaagaaccaccuccgcgacaucaugggcauccccuacugcaacuacuccaaguacugguaccugaaccacacggucaccgggaagaccagccugccccggugcuggcugguguccaacggcagcuaccugaacgagacccacuucuccgacgacaucgagcagcaggccgacaacaugaucacggagcuccugcagaaggaguacaucgaccgccagggcaagaccccgcuggggcucguggaccuguucgucuucagcaccuccuucuaccugaucagcaucuuccugcaccucgugaagaucccgacccaccggcacguggucggcaagcccugccccaagccccaccgccugaaccacauggggaucugcuccugcggccuguacaagcacccgggggugcccgugaaguggaagcggugaggacuagucccuguucccagagcccacuuuuuuuucuuuuuuugaaauaaaauagccugucuuucagaucucaaaggcucuuuucagagccaccaaaaaaaaaaaaaaaaaaaaaaaaaaaaaaaaaaaaaaaaaaaaaaaaaaaaaaaaaaaaaaaaaaaaaaaaaaaaaaaaaaaaaaaaaaaaaaaaaaaaa

SEQ ID NO: 23254 - RNA, 1745 nt, Artificial Sequence
  mRNA product Design a-1 (hSL-A100) comprising derived and/or modified sequence from LASV(LASV221-NIG-2010;Clade II)__AIT17624__GPCmut2 (opt1)
aggagagucccgcagucggcguccagcggcucugcuuguucgugugugugucguugcaggccuuauucaagcuuaccaugggccagaucaucaccuucuuccaggaggugccccacgucaucgaggaggugaugaacaucgugcugaucgcccucagccugcuggccauccucaaggggaucuacaacgucgcgaccugcggccuguucgggcugguguccuuccuccugcugugcggccgcagcugcuccacgaccuacaaggggguguacgagcuccagacccuggagcuggacauggccagccucaacaugugcaugccgcuguccugcacgaagaacaacagccaccacuacaucauggucggcaacgagaccggccuggagcucacccugaccaacacguccaucaucaaccacaaguucugcaaccugagcgacgcccacaagaagaaccucuacgaccacgcccugauguccaucaucagcaccuuccaccuguccauccccaacuucaaccaguacgaggccaugagcugcgacuucaacgggggcaagaucuccgugcaguacaaccucagccacaccuacgcgaucgacgccgccaaccacugcgggaccaucgccaacggcgugcugcagacguucaugcggauggcguggggcggguccuacaucgcccuggacagcggcaagggguccugggacugcaucaugaccagcuaccaguaccucaucauccagaacaccaccugggaggaccacugccaguucucccgccccagccccaucggcuaccuggggcugcucagccagcggacgcgcgacaucuacaucucccggcgccgccggggcaccuucaccuggacccucagcgacuccgagggcaacgagacgcccgggggcuacugccugacccgguggaugcugaucgaggccgagcucaagugcuucgggaacaccgccgucgccaagugcaacgagaagcacgacgaggaguucugcgacaugcugcgccuguucgacuucugcaagcaggcgauccggcgccucaagacccccgcccagaugagcauccagcugaucaacaaggccgugaacgcccugaucaacgaccagcucaucaugaagaaccaccuccgggacaucaugggcauccccuacugcaacuacuccaaguacugguaccugaaccacacggugaccgggaagaccagccugccccgcugcuggcuggucuccaacggcagcuaccugaacgagacccacuucuccgacgacaucgagcagcaggccgacaacaugaucacggagaugcuccagaaggaguacauggaccggcagggcaagaccccgcuggggcugguggaccucuucguguucagcaccuccuucuaccugaucagcaucuuccugcaccuggucaagaucccgacccaccgccacgugaucggcaagcccugccccaagccccaccggcucaaccacauggggaucugcuccugcggccuguacaagcacccgggggugcccgucaaguggaagcgcugaggacuagucccuguucccagagcccacuuuuuuuucuuuuuuugaaauaaaauagccugucuuucagaucucaaaggcucuuuucagagccaccaaaaaaaaaaaaaaaaaaaaaaaaaaaaaaaaaaaaaaaaaaaaaaaaaaaaaaaaaaaaaaaaaaaaaaaaaaaaaaaaaaaaaaaaaaaaaaaaaaaaa

SEQ ID NO: 23255 - RNA, 1745 nt, Artificial Sequence
  mRNA product Design a-1 (hSL-A100) comprising derived and/or modified sequence from LASV(LASV237-NIG-2010;Clade II)__AIT17638__GPCmut2 (opt1)
aggagagucccgcagucggcguccagcggcucugcuuguucgugugugugucguugcaggccuuauucaagcuuaccaugggccagaucaucaccuucuuccaggaggugccccacgucaucgaggaggugaugaacaucgugcugaucgcccucagccugcuggccauccucaaggggaucuacaacgucgcgaccugcggccuguucgggcugguguccuuccuccugcugugcggccgcagcugcuccacgaccuacaaggggguguacgagcuccagacccuggagcuggacauggccagccucaacaugugcaugccgcuguccugcacgaagaacaacagccaccacuacaucauggucggcaacgagaccggccuggagcucacccugaccaacacguccaucaucaaccacaaguucugcaaccugagcgacgcccacaagaaggaccucuacgaccacgcccugauguccaucaucagcaccuuccaccuguccauccccaacuucaaccaguacgaggccaugagcugcgacuucaacgggggcaagaucuccgugcaguacaaccucagccacaccuacgcgguggacgccgccaaccacugcgggaccaucgccaacggcguccugcagacguucaugcggauggcguggggcggguccuacaucgcccuggacagcggcaagggguccugggacugcaucaugaccagcuaccaguaccucaucauccagaacaccaccugggaggaccacugccaguucucccgccccagccccaucggcuaccuggggcugcucagccagcggacgcgcgacaucuacaucucccggcgccgccggggcaccuucaccuggacccucagcgacuccgagggcaacgagacgcccgggggcuacugccugacccgguggaugcugaucgaggccgagcucaagugcuucgggaacaccgccguggccaagugcaacgagaagcacgacgaggaguucugcgacaugcugcgccuguucgacuucugcaagcaggcgauccggcgccucaagacccccgcccagaugagcauccagcugaucaacaaggccgugaacgcccugaucaacgaccagcucaucaugaagaaccaccuccgggacaucaugggcauccccuacugcaacuacuccaaguacugguaccugaaccacacggucaccgggaagaccagccugccccgcugcuggcugguguccaacggcagcuaccugaacgagacccacuucuccgacgacaucgagcagcaggccgacaacaugaucacggagcuccugcagaaggaguacauggaccggcagggcaagaccccgcuggggcucguggaccuguucgucuucagcaccuccuucuaccugaucagcaucuuccugcaccucaucaagaucccgacccaccgccacaucacgggcaagcccugccccaagccccaccggcugaaccacauggggaucugcuccugcggccuguacaagcacccgggggugcccgugaaguggaagcgcugaggacuagucccuguucccagagcccacuuuuuuuucuuuuuuugaaauaaaauagccugucuuucagaucucaaaggcucuuuucagagccaccaaaaaaaaaaaaaaaaaaaaaaaaaaaaaaaaaaaaaaaaaaaaaaaaaaaaaaaaaaaaaaaaaaaaaaaaaaaaaaaaaaaaaaaaaaaaaaaaaaaaa

SEQ ID NO: 23256 - RNA, 1745 nt, Artificial Sequence
  mRNA product Design a-1 (hSL-A100) comprising derived and/or modified sequence from LASV(LASV253-NIG-2011;Clade II)__AIT17670__GPCmut2 (opt1)
aggagagucccgcagucggcguccagcggcucugcuuguucgugugugugucguugcaggccuuauucaagcuuaccaugggccagaucaucaccuucuuccaggaggugccccacgucaucgaggaggugaugaacaucgugcugaucgcccucagccugcuggccauccucaaggggaucuacaacgucgcgaccugcggccuguucgggcugguguccuuccuccugcugugcggccgcagcugcuccacgaccuacaaggggguguacgagcuccagacccuggagcuggacauggccagccucaacaugugcaugccgcuguccugcacgaagaacaacagccaccacuacaucauggucggcaacgagaccggccuggagcucacccugaccaacacguccaucaucaaccacaaguucugcaaccugagcgacgcccacaagaagaaccucuacgaccacgcccugauguccaucaucagcaccuuccaccuguccauccccaacuucaaccaguacgaggccaugagcugcgacuucaacgggggcaagaucuccgugcaguacaaccucagccacaccuacgcgguggacgccgccaaccacugcgggaccaucgccaacggcguccugcagacguucaugcggauggcguggggcggguccuacaucgcccuggacagcggcaagggguccugggacugcaucaugaccagcuaccaguaccucaucauccagaacaccaccugggaggaccacugccaguucucccgccccagccccaucggcuaccuggggcugcucagccagcggacgcgcgacaucuacaucucccggcgccgccggggcaccuucaccuggacccucagcgacuccgagggcaacgagacgcccgggggcuacugccugacccgguggaugcugaucgaggccgagcucaagugcuucgggaacaccgccguggccaagugcaacgagaagcacgacgaggaguucugcgacaugcugcgccuguucgacuucugcaagcaggcgauccggcgccucaaggcccccgcccagaugagcauccagcugaucaacaaggccgugaacgcccugaucaacgaccagcucaucaugaagaaccaccuccgggacaucaugggcaucccguacugcaacuacuccaaguacugguaccugaaccacaccgucacggggcgcaccagccugccccggugcuggcugguguccaacggcagcuaccugaacgagacccacuucuccgacgacaucgagcagcaggcggacaacaugaucaccgagcuccugcagaaggaguacaucgaccgccagggcaagacgccccuggggcucguggaccuguucgucuucagcaccuccuucuaccugaucagcaucuuccugcaccucgugaagaucccgacccaccggcacaucaucggcaagcccugccccaagccccaccgccugaaccacauggggaucugcuccugcggccuguacaagcacccgggggugcccgucaaguggaagcggugaggacuagucccuguucccagagcccacuuuuuuuucuuuuuuugaaauaaaauagccugucuuucagaucucaaaggcucuuuucagagccaccaaaaaaaaaaaaaaaaaaaaaaaaaaaaaaaaaaaaaaaaaaaaaaaaaaaaaaaaaaaaaaaaaaaaaaaaaaaaaaaaaaaaaaaaaaaaaaaaaaaaa

SEQ ID NO: 23257 - RNA, 1745 nt, Artificial Sequence
  mRNA product Design a-1 (hSL-A100) comprising derived and/or modified sequence from LASV(LASV254-NIG-2011;Clade II)__AIT17674__GPCmut2 (opt1)
aggagagucccgcagucggcguccagcggcucugcuuguucgugugugugucguugcaggccuuauucaagcuuaccaugggccagaucaucaccuucuuccaggaggugccccacgucaucgaggaggugaugaacaucgugcugaucgcccucagccugcuggccauccucaaggggaucuacaacgucgcgaccugcggccuguucgggcugguguccuuccuccugcugugcggccgcagcugcuccacgaccuacaaggggguguacgagcuccagacccuggagcuggacaugaccaaccucaacaugugcaugccgcugagcugcaccaagaacaacucccaccacuacaucauggucggcaacgagaccggccuggagcucacccugacgaacaccagcaucaucaaccacaaguucugcaaccuguccgacgcccacaagaagaaccucuacaaccacgcccugaugagcaucaucuccaccuuccaccugagcauccccaacuucaaccaguacgaggccauguccugcgacuucaacgggggcaagaucagcgugcaguacaaccucucccacagcuacgccguggacgcggccaaccacugcgggaccaucgccaacggcguccugcagacguucaugcggauggccuggggcggguccuacaucgcgcuggacagcggcaaggggaacugggacugcaucaugaccuccuaccaguaccucaucauccagaacaccaccugggaggaccacugccaguucagccgccccucccccaucggcuaccuggggcugcucagccagcggacgcgcgacaucuacaucagccggcgccgccggggcaccuucaccuggacccucuccgacagcgagggcaacgagacgcccgggggcuacugccugacccgguggaugcugaucgaggccgagcucaagugcuucgggaacaccgccguggccaagugcaacgagaagcacgacgaggaguucugcgacaugcugcgccuguucgacuucugcaagcaggccauccggcgccucaagacccccgcgcaggccaacauccagcugaucaacaaggccgugaacgcccugaucaacgaccagcucaucaugaagaaccaccuccgggacaucaugggcauccccuacugcaacuacuccaaguacugguaccugaaccacacggucaccgggaagaccagccugccccgcugcuggcugguguccaacggcagcuaccugaacgagacccacuucuccgacgacaucgagcagcaggccgacaacaugaucacggagcuccugcagaaggaguacauggaccggcagggcaagaccccgcuggggcucguggaccuguucgucuucagcaccuccuucuaccugaucagcaucuuccugcaccucgugaagaucccgacccaccgccacgugaucggcaagcccugccccaagccccaccggcugaaccacauggggaucugcuccugcggccuguacaagcacccggggguccccgugaaguggaagcgcugaggacuagucccuguucccagagcccacuuuuuuuucuuuuuuugaaauaaaauagccugucuuucagaucucaaaggcucuuuucagagccaccaaaaaaaaaaaaaaaaaaaaaaaaaaaaaaaaaaaaaaaaaaaaaaaaaaaaaaaaaaaaaaaaaaaaaaaaaaaaaaaaaaaaaaaaaaaaaaaaaaaaa

SEQ ID NO: 23258 - RNA, 1745 nt, Artificial Sequence
  mRNA product Design a-1 (hSL-A100) comprising derived and/or modified sequence from LASV(Nig08-A19;Clade III)__ADU56618__GPCmut2 (opt1)
aggagagucccgcagucggcguccagcggcucugcuuguucgugugugugucguugcaggccuuauucaagcuuaccaugggccagaucgugaccuucuuccaggaggucccccacgugaucgaggaggugaugaacaucguccugaucgcccucagcauccuggccauccugaaggggcucuacaacaucgcgaccugcggccugaucgggcuggugacguuccuccugcuguccggccgcagcugcuccaugaccuacaaggggguguacgagcuccagacccuggagcugaacaugaacacccucaacaugugcaugccgcugagcugcaccaagaacaacucccaccacuacaucauggucggcaacgagaccggccuggagcucacccugacgaacaccagccugcuccaccacaaguucugcaaccuguccgacgcccacaagaagaaccuguacgaccacacccucaugagcaucaucuccaccuuccaccugagcauccccaacuucaaccaguacgaggccauguccugcgacuucaacgggggcaagaucacggugcaguacaaccugagccacuccuacgccaucgacgccgcgaaccacugcgggaccguggccaacggcguccuccagaccuucaugcggauggccuggggcgggagcuacaucgcccuggacuccggccgcgggaagugggacugcaucaugaccagcuaccaguaccugaucauccagaacacgaccugggaggaccacugccaguucucccggcccagccccaucggcuaccucgggcugcugucccagcgcacccgggacaucuacaucagccgccggcgccggggcaccuucacguggacccugagcgacuccgagggcaacgagacccccgggggcuacugccucacccgcuggaugcugaucgaggcggagcugaagugcuucgggaacacggccguggccaagugcaacgagaagcacgacgaggaguucugcgacaugcuccggcuguucgacuucugcaagcaggccauccgccggcugaaggcccccgcgcagaugagcauccagcucaucaacaaggccgugaacgcccugaucaacgaccagcugaucaugaagaaccaccuccgcgacaucaugggcauccccuacugcaacuacuccaaguacugguaccugaaccacaccagcaccgggcggaccucccugccccgcugcuggcucgucagcaacggcuccuaccugaacgagacgcacuucagcgacgacaucgagcagcaggccgacaacaugaucaccgagaugcugcagaaggaguaccucgaccggcagggcaagaccccgcuggggcugguggaccuguucguguucuccaccagcuucuaccucaucuccaucuuccugcaccuggucaagaucccgacgcaccgccacaucgugggcaagcccugccccaagccccaccggcucaaccacauggggaucugcagcugcggccuguacaagcagccgggggugcccguccgcuggaagcggugaggacuagucccuguucccagagcccacuuuuuuuucuuuuuuugaaauaaaauagccugucuuucagaucucaaaggcucuuuucagagccaccaaaaaaaaaaaaaaaaaaaaaaaaaaaaaaaaaaaaaaaaaaaaaaaaaaaaaaaaaaaaaaaaaaaaaaaaaaaaaaaaaaaaaaaaaaaaaaaaaaaaa

SEQ ID NO: 23259 - RNA, 1748 nt, Artificial Sequence
  mRNA product Design a-1 (hSL-A100) comprising derived and/or modified sequence from LASV(G1180-SLE-2010;Clade IV)__AIT17168__GPCmut2 (opt1)
aggagagucccgcagucggcguccagcggcucugcuuguucgugugugugucguugcaggccuuauucaagcuuaccaugggccagaucgugaccuucuuccaggaggucccccacgugaucgaggaggugaugaacaucguccugaucgcccucagcauccuggccgugcugaaggggcucuacaacuucgcgaccugcggccugguggggcugcucaccuuccugcugcucugcggccgcuccugcaccgccagccgguacaagggggucuacgagcugcagacccuggagcucaacauggagacccugaacaugugcaugccgcuguccugcaccaagaacaacagccaccacuacaucauggugggcaacgagaccggccucgagcugacccugacgaacaccuccaucaucaaccacaaguucugcaaccucagcgacgcccacaagaagaaccuguacgaccacgcccugauguccaucaucagcaccuuccaccucuccauccccaacuucaaccaguacgaggccaugagcugcgacuucaacgggggcaagaucuccgugcaguacaaccugagccacuccuacgcgggggacgccgccaaccacugcggcaccgucgccaacggggugcugcagacguucaugcgcauggcguggggcggcagcuacaucgcccucgacuccgggcacggcagcugggacugcaucaugaccuccuaccaguaccugaucauccagaacaccaccugggaggaccacugccaguucagccggcccucccccaucggguaccugggccuccugagccagcgcacgcgggacaucuacaucagccgccggcgccggggcaccuucaccuggacccuguccgacagcgaggggaaggacacgccgggcggguacugccugacccgcuggaugcucaucgaggccgagcugaagugcuucggcaacaccgccguggccaagugcaacgagaagcacgacgaggaguucugcgacaugcugcggcuguucgacuucugcaagcaggcgauccagcgccugaaggcccccgcccagauguccauccagcugaucaacaaggccgucaacgcccucaucaacgaccagcugaucaugaagaaccaccuccgggacaucauggggauccccuacugcaacuacagcaaguacugguaccucaaccacaccacgaccggcaagaccucccugcccaagugcuggcuggugagcaacggcuccuaccucaacgagacccacuucagcgacgacaucgagcagcaggcggacaacaugaucacggagaugcugcagaaggaguacauggagcgccaggggaagacgccccugggccucguggaccuguucgucuucuccaccagcuucuaccugaucuccaucuuccugcaccucgugaagaucccgacccaccggcacaucgugggcaagagcugccccaagccccaccgccugaaccacauggggaucugcuccugcgggcuguacaagcagcccggcgucccggugaaguggaagcggugaggacuagucccuguucccagagcccacuuuuuuuucuuuuuuugaaauaaaauagccugucuuucagaucucaaaggcucuuuucagagccaccaaaaaaaaaaaaaaaaaaaaaaaaaaaaaaaaaaaaaaaaaaaaaaaaaaaaaaaaaaaaaaaaaaaaaaaaaaaaaaaaaaaaaaaaaaaaaaaaaaaaa

SEQ ID NO: 23260 - RNA, 1748 nt, Artificial Sequence
  mRNA product Design a-1 (hSL-A100) comprising derived and/or modified sequence from LASV(G1442-SLE-2011;Clade IV)__AIT17180__GPCmut2 (opt1)
aggagagucccgcagucggcguccagcggcucugcuuguucgugugugugucguugcaggccuuauucaagcuuaccaugggccagaucgugaccuucuuccaggaggucccccacgugaucgaggaggugaugaacaucguccugaucgcccucagcauccuggccgugcugaaggggcucuacaacguggcgaccugcggccugaucgggcuggucacguuccuccugcugugcggccgcuccugcaccaccacccucuacaaggggguguacgagcugcagacgcuggagcucaacauggagacccugaacaugugcaugccgcugagcugcaccaagaacaacucccaccacuacauccgggugggcaacgagacgggccucgagcugacccugaccaacaccagcaucaucaaccacaaguucugcaaccucuccgacgcccacaagaagaaccuguacgaccacgcccugaugagcaucaucuccacguuccaccucagcauccccaacuucaaccaguacgaggccauguccugcgacuucaacgggggcaagaucagcguccaguacaaccugucccacagcuacgccggggacgcggccaaccacugcggcaccguggccaacggggugcugcagaccuucaugcgcauggccuggggcggcuccuacaucgcgcucgacagcgggcggggcaacugggacugcaucaugaccuccuaccaguaccugaucauccagaacacgaccugggacgaccacugccaguucagccgccccucccccaucggguaccugggccuccugagccagcggacccgcgacgucuacaucucccggcgccgccggggcaccuucacguggacccugagcgacagcgaggggaaggacaccccgggcggguacugccugacccgguggaugcucaucgaggccgagcugaagugcuucggcaacacggccguggccaagugcaacgagaagcacgacgaggaguucugcgacaugcugcgccucuucgacuucugcaagcaggccauccagcggcugaaggcgcccgcccagauguccauccagcugaucaacaaggccgugaacgcccucaucaacgaccagcugaucaugaagaaccaccuccgcgacaucauggggauccccuacugcaacuacagcaaguacugguaccugaacaacaccgccaccggcaagaccucccugcccaagugcuggcugaucagcaacggcuccuaccucaacgagacgcacuucagcgacgacaucgagcaggaggcggacaacaugaucaccgagaugcugcagaaggaguacauggagcggcaggggaagacgccccugggccucgucgaccuguucguguucuccaccagcuucuaccugaucuccaucuuccugcaccucgugaagaucccgacccaccgccacaucgucggcaagagcugccccaagccccaccggcugaaccacauggggaucugcuccugcgggcuguacaagcagcccggcgugccggugcgcuggaagcggugaggacuagucccuguucccagagcccacuuuuuuuucuuuuuuugaaauaaaauagccugucuuucagaucucaaaggcucuuuucagagccaccaaaaaaaaaaaaaaaaaaaaaaaaaaaaaaaaaaaaaaaaaaaaaaaaaaaaaaaaaaaaaaaaaaaaaaaaaaaaaaaaaaaaaaaaaaaaaaaaaaaaa

SEQ ID NO: 23261 - RNA, 1748 nt, Artificial Sequence
  mRNA product Design a-1 (hSL-A100) comprising derived and/or modified sequence from LASV(G3010-SLE-2013;Clade IV)__AIT17344__GPCmut2 (opt1)
aggagagucccgcagucggcguccagcggcucugcuuguucgugugugugucguugcaggccuuauucaagcuuaccaugggccagaucgugaccuucuuccaggaggucccccacgugaucgaggaggugaugaacaucguccugaucgcccucagcauccuggccgugcugaaggggcucuacaacuucgcgaccugcggccugguggggcuggucacguuccuccugcugugcggccgcuccugcaccaccagccucuacaaggggguguacgagcugcagacccuggagcucaacauggagacgcugaacaugugcaugccgcuguccugcaccaagaacaacagccaccacuacaucauggugggcaacgagaccggccucgagcugacgcugaccaacaccuccaucaucaaccacaaguucugcaaccucagcgacgcccacaagaagaaccuguacaaccacgcccugauguccaucaucagcaccuuccaccucuccauccccaacuucaaccaguacgaggccaugagcugcgacuucaacgggggcaagaucuccguccaguacaaccugagccacuccuacgccggggacgcggccagccacugcggcacgguggccaacggggugcugcagaccuucaugcggauggccuggggcggcuccuacaucgcgcucgacagcggguacggcaagugggacugcaucaugaccuccuaccaguaccugaucauccagaacaccacgugggaggaccacugccaguucagccgccccucccccaucggguaccugggccuccugagccagcggacccgcgacaucuacaucagccggcgccgccggggcaccuucaccuggacgcuguccgacagcgaggggaaggacaccccgggcggguacugccugacccgguggaugcucaucgaggccgagcugaagugcuucggcaacaccgccgucgccaagugcaacgagaagcacgacgaggaguucugcgacaugcugcgccucuucgacuucugcaagcaggccauccagcggcugaagacgcccgcgcagauguccauccagcugaucaacaaggccgugaacgcccucaucaacgaccagcugaucaugaagaaccaccuccgcgacaucauggggauccccuacugcaacuacagcaaguacugguaccugaaccacaccaccaccggcaagacgucccugcccaagugcuggcuggugagcaacggcuccuaccucaacgagacccacuucagcgacgacaucgagcagcaggccgacaacaugaucaccgagaugcugcagaaggaguacauggagcggcaggggaagacgccccugggccucgucgaccuguucguguucuccaccagcuucuaccugaucuccaucuuccugcaccucgugaagaucccgacccaccgccacaucgucggcaagagcugccccaagccccaccggcugaaccacauggggaucugcuccugcgggcuguacaagcagcccggcgugccggugcgcuggaagcggugaggacuagucccuguucccagagcccacuuuuuuuucuuuuuuugaaauaaaauagccugucuuucagaucucaaaggcucuuuucagagccaccaaaaaaaaaaaaaaaaaaaaaaaaaaaaaaaaaaaaaaaaaaaaaaaaaaaaaaaaaaaaaaaaaaaaaaaaaaaaaaaaaaaaaaaaaaaaaaaaaaaaa

SEQ ID NO: 23262 - RNA, 1748 nt, Artificial Sequence
  mRNA product Design a-1 (hSL-A100) comprising derived and/or modified sequence from LASV(G502-SLE-2009;Clade IV)__AIT17126__GPCmut2 (opt1)
aggagagucccgcagucggcguccagcggcucugcuuguucgugugugugucguugcaggccuuauucaagcuuaccaugggccagaucgugaccuucuuccaggaggucccccacgugaucgaggaggugaugaacaucguccugaucgcccucagcauccuggccgugcugaaggggcucuacaacuucgcgaccugcggccugguggggcugcucacguuccugcugcucugcggccgcuccugcaccaccgggcuguacaagggcgucuacgagcugcagacccucgagcugaacauggagacgcugaacaugugcaugccgcucagcugcaccaagaacaacucccaccacuacaucauggugggcaacgagaccgggcuggagcugacgcucaccaacaccagcaucaucaaccacaaguucugcaaccuguccgacgcccacaagaagaaccuguacgaccacgcccucaugagcaucaucuccaccuuccaccugagcauccccaacuucaaccaguacgaggccauguccugcgacuucaacggcgggaagaucagcgugcaguacaaccugucccacagcuacgccggcgacgcggccgaccacugcgggacggucgccaacggcgugcuccagaccuucaugcggauggccuggggcggguccuacaucgcgcuggacagcggccgcgggcggugggacugcaucaugaccuccuaccaguaccugaucauccagaacaccacgugggaggaccacugccaguucagccgccccucccccaucggcuaccucggccugcugagccagcggacccgcgacaucuacaucucccggcgccgccgggggaccuucaccuggacgcugagcgacagcgagggcaaggacacccccgggggcuacugccucacccgguggaugcugaucgaggccgagcugaagugcuucgggaacaccgccguggccaagugcaacgagaagcacgacgaggaguucugcgacaugcuccgccuguucgacuucugcaagcaggccauccagcggcugaaggcgcccgcccagauguccauccagcucaucaacaaggccgucaacgcccugaucaacgaccagcuggugaugaagaaccaccuccgcgacaucaugggcauccccuacugcaacuacagccgguacugguaccugaaccacacgaccaccggccgcaccucccugcccaagugcuggcucgugagcaacggguccuaccugaacgagacgcacuucagcgacgacaucgagcagcaggccgacaacaugaucaccgagaugcugcagaaggaguacauggagcggcagggcaagaccccgcucgggcuggucgaccuguucguguucuccaccagcuucuaccugaucuccaucuuccuccaccuggugaagaucccgacgcaccgccacaucgucggcaagagcugccccaagccccaccggcugaaccacauggggaucugcuccugcggccucuacaagcagcccggcgugccggugaaguggaagcgcugaggacuagucccuguucccagagcccacuuuuuuuucuuuuuuugaaauaaaauagccugucuuucagaucucaaaggcucuuuucagagccaccaaaaaaaaaaaaaaaaaaaaaaaaaaaaaaaaaaaaaaaaaaaaaaaaaaaaaaaaaaaaaaaaaaaaaaaaaaaaaaaaaaaaaaaaaaaaaaaaaaaaa

SEQ ID NO: 23263 - RNA, 1748 nt, Artificial Sequence
  mRNA product Design a-1 (hSL-A100) comprising derived and/or modified sequence from LASV(G733-SLE-2010;Clade IV)__AIT17154__GPCmut2 (opt1)
aggagagucccgcagucggcguccagcggcucugcuuguucgugugugugucguugcaggccuuauucaagcuuaccaugggccagaucgugaccuucuuccaggaggucccccacgugaucgaggaggugaugaacaucguccugaucgcccucagcauccuggccgugcugaaggggcucuacaacuucgcgaccugcggcaucguggggcuggucuccuuccugcuccugugcggccgcagcugcacgaccucccuguacaaggggguguacgagcuccagacccuggagcugaacauggagacccucaacaugugcaugccgcugagcugcaccaagaacaacucccaccacuacaucauggugggcaacgagaccggccuggagcucacccugacgaacaccagcaucaucaaccacaaguucugcaaccuguccgacgcccacaagaagaaccucuacgaccacgcccugaugagcaucaucuccaccuuccaccugagcauccccaacuucaaccaguacgaggccauguccugcgacuucaacgggggcaagaucagcguccaguacaaccucucccacagcuacgccggggacgcggccaaccacugcggcaccaucgccaacggggugcugcagacguucaugcggauggccuggggcggcuccuacaucgcgcuggacagcgggcgcgaccggugggacugcaucaugaccuccuaccaguaccucaucauccagaacaccaccugggaggaccacugccaguucagccgccccucccccaucggcuaccuggggcugcucagccagcggacgcgcgacaucuacaucagccggcgccgccggggcaccuucaccuggacccucuccgacagcgagggcaaggacacgcccgggggcuacugccugacccgguggaugcugaucgaggccgagcucaagugcuucgggaacaccgccguggccaagugcaacgagaagcacgacgaggaguucugcgacaugcugcgccuguucgacuucugcaagcaggccauccagcggcucaaggcgcccgcccagauguccauccagcugaucaacaaggccgucaacgcccugaucaacgaccagcucaucaugaagaaccaccuccgcgacaucaugggcauccccuacugcaacuacagcaaguacugguaccugaaccacaccacgaccgggaagaccucccugcccaagugcuggcuggugagcaacggcuccuaccugaacgagacccacuucagcgacgacaucgagcagcaggccgacaacaugaucacggagaugcuccagaaggaguacauggagcggcagggcaagaccccgcuggggcugguggaccucuucgucuucuccaccagcuucuaccugaucuccaucuuccugcaccuggugaagaucccgacccaccgccacguggucggcaagagcugccccaagccccaccggcucaaccacauggggaucugcuccugcggccuguacgggcagcccggcgugccggugaaguggaagcgcugaggacuagucccuguucccagagcccacuuuuuuuucuuuuuuugaaauaaaauagccugucuuucagaucucaaaggcucuuuucagagccaccaaaaaaaaaaaaaaaaaaaaaaaaaaaaaaaaaaaaaaaaaaaaaaaaaaaaaaaaaaaaaaaaaaaaaaaaaaaaaaaaaaaaaaaaaaaaaaaaaaaaa

SEQ ID NO: 23264 - RNA, 1748 nt, Artificial Sequence
  mRNA product Design a-1 (hSL-A100) comprising derived and/or modified sequence from MOPV/LASV reassortant(IGS-1;Clade IV)__AFY05576__GPCmut2 (opt1)
aggagagucccgcagucggcguccagcggcucugcuuguucgugugugugucguugcaggccuuauucaagcuuaccaugggccagaucgugaccuucuuccaggaggucccccacgugaucgaggaggugaugaacaucguccugaucgcccucagcgugcuggccgugcugaaggggcucuacaacuucgcgaccugcggccuggucgggcuggugacguuccuccugcugugcggccgcuccugcaccaccagccucuacaaggggguguacgagcugcagacccuggagcucaacauggagacgcugaacaugugcaugccgcuguccugcaccaagaacaacagccaccacuacaucauggucggcaacgagaccggccucgagcugacgcugaccaacaccuccaucaucaaccacaaguucugcaaccucagcgacgcccacaagaagaaccuguacgaccacgcccugauguccaucaucagcaccuuccaccucuccauccccaacuucaaccaguacgaggccaugagcugcgacuucaacgggggcaagaucuccgugcaguacaaccugagccacuccuacgccggggacgcggccaaccacugcggcacgguggccaacgggguccugcagaccuucaugcggauggccuggggcggcagcuacaucgcgcucgacuccgggcgcggcaacugggacugcaucaugaccagcuaccaguaccugaucauccagaacaccacgugggaggaccacugccaguucucccggcccagccccaucggguaccugggccuccugucccagcgcacccgggacaucuacaucagccgccggcgccggggcaccuucaccuggacgcugagcgacuccgagggggaggacaccccgggcggguacugccugacccgcuggaugcucaucgaggccgagcugaagugcuucggcaacaccgccguggccaagugcaacgagaagcacgacgaggaguucugcgacaugcugcggcuguucgacuucugcaagcaggccauccagcgccugaaggcgcccgcccagaugagcauccagcugaucaacaaggccgugaacgcccucaucaacgaccagcugaucaugaagaaccaccuccgggacaucauggggauccccuacugcaacuacuccaaguacugguaccucaaccacacgaccaccggccgcaccagccugcccaagugcuggcuggucuccaacggcagcuaccucaacgagacgcacuucuccgacgacaucgagcagcaggccgacaacaugaucaccgagaugcugcagaaggaguacauggagcggcaggggaagacgccccugggccucguggaccuguucguguucagcaccuccuucuaccugaucagcaucuuccugcaccucgucaagaucccgacccaccgccacaucguggggaaguccugccccaagccccaccggcugaaccacaugggcaucugcagcugcgggcuguacaagcagcccggcgugccggucaaguggaagcgcugaggacuagucccuguucccagagcccacuuuuuuuucuuuuuuugaaauaaaauagccugucuuucagaucucaaaggcucuuuucagagccaccaaaaaaaaaaaaaaaaaaaaaaaaaaaaaaaaaaaaaaaaaaaaaaaaaaaaaaaaaaaaaaaaaaaaaaaaaaaaaaaaaaaaaaaaaaaaaaaaaaaaa

SEQ ID NO: 23265 - RNA, 1748 nt, Artificial Sequence
  mRNA product Design a-1 (hSL-A100) comprising derived and/or modified sequence from LASV(LM765-SLE-2012;Clade IV)__AIT17814__GPCmut2 (opt1)
aggagagucccgcagucggcguccagcggcucugcuuguucgugugugugucguugcaggccuuauucaagcuuaccaugggccagaucgugaccuucuuccaggaggucccccacgugaucgaggaggugaugaacaucguccugaucgcccucagcauccuggccgugcugaaggggcucuacaacuucgcgaccugcggccugguggggcuggucacguuccuccugcugugcggccgcuccugcaccaccagccucuacaaggggguguacgagcugcagacccuggagcucaacauggagacgcugaacaugugcaugccgcuguccugcaccaagaacaacagccaccacuacaucauggugggcaacgagaccggccucgagcugacgcugaccaacaccuccaucaucgaccacaaguucugcaaccucagcgacgcccaccggaagaaccuguacgaccacgcccugauguccaucaucagcaccuuccaccucuccauccccaacuucaaccaguacgaggccaugagcugcgacuucaacgggggcaagaucuccguccaguacaaccugagccacuccuacgccaaggacgcggccgaccacugcgggacgguggccaacggcgugcugcagaccuucaugcgcauggccuggggcgggagcuacaucgcgcucgacuccggccgggggcgcugggacugcaucaugaccagcuaccaguaccugaucauccagaacaccacgugggaggaccacugccaguucucccggcccagccccaucggcuaccuggggcuccugucccagcgcacccgggacaucuacaucagccgccggcgccggggcaccuucaccuggacgcugagcgacuccgagggcaaggacacccccgggggcuacugccugacccgcuggaugcucaucgaggccgagcugaagugcuucgggaacaccgccgucgccaagugcaacgagaagcacgacgaggaguucugcgacaugcugcggcuguucgacuucugcaagcaggccauccagcgccugaaggcgcccgcccagaugagcauccagcugaucaacaaggccgugaacgcccucaucaacgaccagcugaucaugaagaaccaccuccgggacaucaugggcauccccuacugcaacuacuccaaguacugguaccucaaccacacgaccaccgggaagaccagccugcccaagugcuggcugguguccaacggcagcuaccucaacgagacgcacuucuccgacgacaucgagcagcaggccgacaacaugaucaccgagaugcugcagaaggaguacauggagcgccagggcaagaccccgcuggggcucgucgaccuguucguguucagcaccuccuucuaccugaucagcaucuuccugcaccucgugaagaucccgacgcaccggcacaucgucggcaagcccugccccaagccccaccgccugaaccacauggggaucugcuccugcggccuguacaagcagccgggggugcccgugaaguggaagcggugaggacuagucccuguucccagagcccacuuuuuuuucuuuuuuugaaauaaaauagccugucuuucagaucucaaaggcucuuuucagagccaccaaaaaaaaaaaaaaaaaaaaaaaaaaaaaaaaaaaaaaaaaaaaaaaaaaaaaaaaaaaaaaaaaaaaaaaaaaaaaaaaaaaaaaaaaaaaaaaaaaaaa

SEQ ID NO: 23266 - RNA, 1748 nt, Artificial Sequence
  mRNA product Design a-1 (hSL-A100) comprising derived and/or modified sequence from LASV(LM776-SLE-2012;Clade IV)__AIT17824__GPCmut2 (opt1)
aggagagucccgcagucggcguccagcggcucugcuuguucgugugugugucguugcaggccuuauucaagcuuaccaugggccagaucgugaccuucuuccaggaggucccccacgugaucgaggaggugaugaacaucguccugaucgcccucagcauccuggccgugcugaaggggcucuacaacuucgcgaccugcggccugguggggcuggucacguuccuccugcugugcggccgcuccugcaccaccagcguguacaaggggguguacgagcuccagacccuggagcugaacauggagacgcucaacaugugcaugccgcuguccugcaccaagaacaacagccaccacuacaucauggucggcaacgagaccggccuggagcucacgcugaccaacaccuccaucaucaaccacaaguucugcaaccugagcgacgcccacaagaagaaccucuacgaccacgcccugauguccaucaucagcaccuuccaccuguccauccccaacuucaaccaguacgaggccaugagcugcgacuucaacgggggcaagaucuccgugcaguacaaccucagccacuccuacgccggggacgcggccaaccacugcggcacgguggccaacgggguccugcagaccuucaugcggauggccuggggcggcagcuacaucgcgcuggacuccgggcacggcaagugggacugcaucaugaccagcuaccaguaccucaucauccagaacaccacgugggaggaccacugccaguucucccgccccagccccaucggguaccugggccugcucucccagcggacccgcgacaucuacaucagccggcgccgccggggcaccuucaccuggacgcucagcgacuccgaggggaaggacaccccgggcggguacugccugacccgguggaugcugaucgaggccgagcucaagugcuucggcaacaccgccguggccaagugcaacgagaagcacgacgaggaguucugcgacaugcugcgccuguucgacuucugcaagcaggccauccagcggcucaaggcgcccgcccagaugagcauccagcugaucaacaaggccgugaacgcccugaucaacgaccagcucaucaugaagaaccaccuccgcgacaucauggggauccccuacugcaacuacuccaaguacugguaccugaaccacacgaccaccggcaagaccagccugcccaagugcuggcuggucuccaacggcagcuaccugaacgagacgcacuucuccgacgacaucgagcagcaggccgacaacaugaucaccgagaugcuccagaaggaguacauggagcggcaggggaagacgccccugggccugguggaccucuucguguucagcaccuccuucuaccugaucagcaucuuccugcaccuggucaagaucccgacccaccgccacaucguggggaaguccugccccaagccccaccggcucaaccacaugggcaucugcagcugcgggcuguacaagcagcccggcgugccgguccgcuggaagcggugaggacuagucccuguucccagagcccacuuuuuuuucuuuuuuugaaauaaaauagccugucuuucagaucucaaaggcucuuuucagagccaccaaaaaaaaaaaaaaaaaaaaaaaaaaaaaaaaaaaaaaaaaaaaaaaaaaaaaaaaaaaaaaaaaaaaaaaaaaaaaaaaaaaaaaaaaaaaaaaaaaaaa

SEQ ID NO: 23267 - RNA, 1748 nt, Artificial Sequence
  mRNA product Design a-1 (hSL-A100) comprising derived and/or modified sequence from LASV(Mad39;Clade IV)__ANH09722__GPCmut2 (opt1)
aggagagucccgcagucggcguccagcggcucugcuuguucgugugugugucguugcaggccuuauucaagcuuaccaugggccagaucgugaccuucuuccaggaggucccccacgugaucgaggaggugaugaacaucguccugaucgcccucagcauccuggccgugcugaaggggcucuacaacguggcgaccugcggccugaucgggcuggucacguuccuccugcugugcggccgcuccugcaccaccacccucuacaaggggguguacgagcugcaggcccuggagcucaacauggagacgcugaacaugugcaugccgcugagcugcaccaagaacaacucccaccacuacauccgggugggcaacgagaccggccucgagcugacgcugaccaacaccagccucaucaaccacaaguucugcaaccuguccgacgcccacaagaagaaccuguacgaccacgcccucaugagcaucaucuccaccuuccaccugagcauccccaacuucaaccaguacgaggccauguccugcgacuucaacgacgggaagaucagcguccaguacaaccugucccacacguacgcgggcgacaccgccaaccacugcgggaccguggccaacggcgugcuccagaccuucaugcgcauggccuggggcgggagcuacaucgcgcuggacuccggccgcgggggcugggacugcaucaugacgagcuaccaguaccugaucauccagaacaccaccugggaggaccacugccaguucucccggcccagccccaucggguaccucggccugcugucccagcggacccgcgacaucuacaucagccggcgccgccggggcacguucaccuggacccuguccgacagcgaggggaaggacaccccgggcggguacugccucacgcgguggaugcugaucgaggccgagcugaagugcuucggcaacaccgccgucgccaagugcaacgagaagcacgacgaggaguucugcgacaugcuccgccuguucgacuucugcaagcaggccauccagcggcugaaggcgcccgcccagaugagcauccagcucaucaacaaggccgugaacgcccugaucaacgaccagcugaucaugaagaaccaccuccgcgacaucauggggauccccuacugcaacuacuccaaguacugguaccugaaccacaccgugaccggcaagacgagccugcccaagugcuggcucgucuccaacggcagcuaccugaacgagacccacuucuccgacgacaucgagcagcaggccgacaacaugaucaccgagaugcugcagaaggaguacauggagcggcaggggaagacgccccucggccugguggaccuguucguguucagcaccuccuucuaccugaucagcaucuuccuccaccuggucaagaucccgacccaccgccacgugguggggaagcccugccccaagccccaccggcugaaccacaugggcaucugcuccugcggguucuacaagcagccgggcguccccgugcgcuggaagcggugaggacuagucccuguucccagagcccacuuuuuuuucuuuuuuugaaauaaaauagccugucuuucagaucucaaaggcucuuuucagagccaccaaaaaaaaaaaaaaaaaaaaaaaaaaaaaaaaaaaaaaaaaaaaaaaaaaaaaaaaaaaaaaaaaaaaaaaaaaaaaaaaaaaaaaaaaaaaaaaaaaaaa

SEQ ID NO: 23268 - RNA, 1748 nt, Artificial Sequence
  mRNA product Design a-1 (hSL-A100) comprising derived and/or modified sequence from LASV(Z0947-SLE-2011;Clade IV)__AIT17840__GPCmut2 (opt1)
aggagagucccgcagucggcguccagcggcucugcuuguucgugugugugucguugcaggccuuauucaagcuuaccaugggccagaucgugaccuucuuccaggaggucccccacgugaucgaggaggugaugaacaucguccugaucgcccucagcauccuggccgugcugaaggggcucuacaacuucgcgaccugcggccugguggggcuggucacguuccuccugcugugcggccgcuccugcaccaucagccucuacaaggggguguacgagcugcagacccuggagcucaacauggagacccugaacaugugcaugccgcuguccugcaccaagaacaacagccaccacuacaucauggugggcaacgagaccggccucgagcugacccugacgaacaccuccaucaucaaccacaaguucugcaaccucagcgacgcccacaagaagaaccuguacgaccacgcccugauguccaucaucagcaccuuccaccucuccauccccaacuucaaccaguacgaggccaugagcugcgacuucaacgggggcaagaucuccguccaguacaaccugagccacuccuacgccggggacgcggccaaccacugcggcaccguggccaacggggugcugcagacguucaugcggauggccuggggcggcagcuacaucgcgcucgacuccgggcgcgaccggugggacugcaucaugaccagcuaccaguaccugaucauccagaacaccaccugggaggaccacugccaguucucccgccccagccccaucggcuaccuggggcuccugucccagcggacgcgcgacaucuacaucagccggcgccgccggggcaccuucaccuggacccugagcgacuccgagggcaaggacacgcccgggggcuacugccugacccgguggaugcucaucgaggccgagcugaagugcuucgggaacaccgccgucgccaagugcaacgagaagcacgacgaggaguucugcgacaugcugcgccucuucgacuucugcaagcaggccauccagcggcugaaggcgcccgcccagaugagcauccagcugaucaacaaggccgugaacgcccucaucaacgaccagcugaucaugaagaaccaccuccgcgacaucaugggcauccccuacugcaacuacuccaaguacugguaccugaaccacaccacgaccgggaagaccagccugcccaagugcuggcugguguccaacggcagcuaccucaacgagacccacuucuccgacgacaucgagcagcaggccgacaacaugaucacggagaugcugcagaaggaguacauggagcggcagggcaagaccccgcuggggcucgucgaccuguucguguucagcaccuccuucuaccugaucagcaucuuccugcaccucgugaagaucccgacccaccgccacaucgucggcaagcccugccccaagccccaccggcugaaccacauggggaucugcuccugcggccuguacaagcagccgggggugcccgugaaguggaagcgcugaggacuagucccuguucccagagcccacuuuuuuuucuuuuuuugaaauaaaauagccugucuuucagaucucaaaggcucuuuucagagccaccaaaaaaaaaaaaaaaaaaaaaaaaaaaaaaaaaaaaaaaaaaaaaaaaaaaaaaaaaaaaaaaaaaaaaaaaaaaaaaaaaaaaaaaaaaaaaaaaaaaaa

SEQ ID NO: 23269 - RNA, 1748 nt, Artificial Sequence
  mRNA product Design a-1 (hSL-A100) comprising derived and/or modified sequence from LASV(Josiah;Clade IV)__NP_694870__GPCmut2 (opt1)
aggagagucccgcagucggcguccagcggcucugcuuguucgugugugugucguugcaggccuuauucaagcuuaccaugggccagaucgugaccuucuuccaggaggucccccacgugaucgaggaggugaugaacaucguccugaucgcccucagcgugcuggccgugcugaaggggcucuacaacuucgcgaccugcggccuggucgggcuggugacguuccuccugcugugcggccgcuccugcaccaccagccucuacaaggggguguacgagcugcagacccuggagcucaacauggagacgcugaacaugugcaugccgcuguccugcaccaagaacaacagccaccacuacaucauggucggcaacgagaccggccucgagcugacccugacgaacaccuccaucaucaaccacaaguucugcaaccucagcgacgcccacaagaagaaccuguacgaccacgcccugauguccaucaucagcaccuuccaccucuccauccccaacuucaaccaguacgaggccaugagcugcgacuucaacgggggcaagaucuccgugcaguacaaccugagccacuccuacgccggggacgcggccaaccacugcggcaccguggccaacgggguccugcagacguucaugcggauggccuggggcggcagcuacaucgcgcucgacuccgggcgcggcaacugggacugcaucaugaccagcuaccaguaccugaucauccagaacaccaccugggaggaccacugccaguucucccggcccagccccaucggguaccugggccuccugucccagcgcacgcgggacaucuacaucagccgccggcgccggggcaccuucaccuggacccugagcgacuccgaggggaaggacacgccgggcggguacugccucacccgcuggaugcugaucgaggccgagcugaagugcuucggcaacaccgccguggccaagugcaacgagaagcacgacgaggaguucugcgacaugcuccggcuguucgacuucugcaagcaggccauccagcgccugaaggcgcccgcccagaugagcauccagcucaucaacaaggccgugaacgcccugaucaacgaccagcugaucaugaagaaccaccuccgggacaucauggggauccccuacugcaacuacuccaaguacugguaccugaaccacaccacgaccggccgcaccagccugcccaagugcuggcucgucuccaacggcagcuaccugaacgagacccacuucuccgacgacaucgagcagcaggccgacaacaugaucacggagaugcugcagaaggaguacauggagcggcaggggaagaccccgcucggccugguggaccuguucguguucagcaccuccuucuaccugaucagcaucuuccuccaccuggucaagauccccacccaccgccacaucguggggaaguccugccccaagccccaccggcugaaccacaugggcaucugcagcugcgggcucuacaagcagccgggcgugcccgucaaguggaagcgcugaggacuagucccuguucccagagcccacuuuuuuuucuuuuuuugaaauaaaauagccugucuuucagaucucaaaggcucuuuucagagccaccaaaaaaaaaaaaaaaaaaaaaaaaaaaaaaaaaaaaaaaaaaaaaaaaaaaaaaaaaaaaaaaaaaaaaaaaaaaaaaaaaaaaaaaaaaaaaaaaaaaaa

SEQ ID NO: 23270 - RNA, 1745 nt, Artificial Sequence
  mRNA product Design a-1 (hSL-A100) comprising derived and/or modified sequence from LASV(LP;Clade I)__AAF86701__GPCmut2 (opt1)
aggagagucccgcagucggcguccagcggcucugcuuguucgugugugugucguugcaggccuuauucaagcuuaccaugggccagaucaucaccuucuuccaggaggugccccacgucaucgaggaggugaugaacaucgugcugaucgcccucagccugcuggccauccucaaggggcuguacaacaucgcgaccugcggcaucaucgggcuggucgccuuccucuuccugugcggcaaguccugcagccugacgcucaagggcggguacgagcugcagacccuggagcucaacauggagacccugaacaugugcaugccgcuguccugcaccaagaacagcucccaccacuacauccgcgugggcaacgagacggggcucgagcugacccugaccaacaccagcaucaucaaccacaaguucugcaaccucuccgacgcccacaagaagaaccuguacgaccacgcccugaugagcaucaucuccacguuccaccucagcauccccaacuucaaccaguacgaggccauguccugcgacuucaacggcgggaagaucagcgugcaguacaaccugucccacagcuacgcgggcgacgccgccgagcacugcgggaccgucgccaacggcgugcugcagaccuucaugcggauggcguggggcgggcgcuacaucgcccucgacuccggcaaggggaacugggacugcaucaugaccagcuaccaguaccugaucauccagaacacgaccugggaggaccacugccaguucucccggcccagccccaucggcuaccugggccuccugucccagcgcacccgggacaucuacaucagccgccggcgccgggggaccuucacguggacccugagcgacuccgagggcaacgagacccccgggggcuacugccucacccgcuggaugcugaucgaggccgagcugaagugcuucgggaacacggccguggccaagugcaacgagaagcacgacgaggaguucugcgacaugcuccggcuguucgacuucugcaagcaggcgauccgccggcugaaggccccggcccagaugagcauccagcucaucaacaaggccgucaacgcccugaucaacgaccagcugaucaugaagaaccaccuccgcgacaucaugggcauccccuacugcaacuacuccaaguacugguaccugaaccacaccagcuccggccggaccagccugcccaagugcuggcucaucuccaacgggagcuaccugaacgagacccaguucuccgacgacaucgagcagcaggcggacaacaugaucacggagaugcugcagaaggaguacaucgagcgccagggcaagaccccgcucgggcugguggacaucuucaucuucagcaccuccuucuaccugaucagcaucuuccugcaccucaucaagauccccacccaccggcacaucgugggcaagcccugccccaagccgcaccgccugaaccacaugggggucugcuccugcggccuguacaagcaccccggcgugcccacgaaguggaagcggugaggacuagucccuguucccagagcccacuuuuuuuucuuuuuuugaaauaaaauagccugucuuucagaucucaaaggcucuuuucagagccaccaaaaaaaaaaaaaaaaaaaaaaaaaaaaaaaaaaaaaaaaaaaaaaaaaaaaaaaaaaaaaaaaaaaaaaaaaaaaaaaaaaaaaaaaaaaaaaaaaaaaa

SEQ ID NO: 23271 - RNA, 1745 nt, Artificial Sequence
  mRNA product Design a-1 (hSL-A100) comprising derived and/or modified sequence from LASV(803213;Clade II)__AAF86703__GPCmut2 (opt1)
aggagagucccgcagucggcguccagcggcucugcuuguucgugugugugucguugcaggccuuauucaagcuuaccaugggccagaucaucaccuucuuccaggaggugccccacgucaucgaggaggugaugaacaucgugcugaucgcccucagccugcuggccauccucaaggggaucuacaacgucgcgaccugcggccuguucgggcugaucuccuuccuccugcugugcggccgcagcugcuccgugacguacaaggggguguacgagcuccagacccuggagcugaacauggccaaccucaacaugugcaugccgcugagcugcaccaagaacaacucccaccacuacaucauggucggcaacgagaccggccuggagcucacgcugaccaacaccagcaucaucaaccacaaguucugcaaccuguccgacgcccacaagaagaaccucuacgaccacgcccugaugagcaucaucuccaccuuccaccugagcauccccaacuucaaccaguacgaggccauguccugcgacuucaacgggggcaagaucagcgugcaguacaaccucucccacagcuucgcgguggacgccgccaaccacugcgggacgaucgccaacggcguccugcagaccuucaugcggauggcguggggcggguccuacaucgcccuggacagcggcaaggggaacugggacugcaucaugaccuccuaccaguaccucaucauccagaacaccacgugggaggaccacugccaguucagccgccccucccccaucggcuaccuggggcugcucagccagcggacccgcgacaucuacaucagccggcgccggcgcggcaccuucaccuggacgcuguccgacagcgagggcaacgaggcccccgggggcuacugccugacccgguggaugcucaucgaggccgagcugaagugcuucgggaacaccgccguggcgaagugcaacgagaagcacgacgaggaguucugcgacaugcugcgccucuucgacuucugcaagcaggccaucaagcggcugaagaccccggcccagauguccauccagcugaucaacaaggccgugaacgcccucaucaacgaccagcugaucaugaagaaccaccuccgcgacaucaugggcauccccuacugcaacuacagccgguacugguaccugaaccacacggucaccgggaagaccucccugccccgcugcuggcuggugagcaacggcuccuaccucaacgagacccacuucagcgacgacaucgagcagcaggcggacaacaugaucacggagaugcugcagaaggaguacauggaccggcagggcaagaccccgcuggggcucguggaccuguucgucuucuccaccagcuucuaccugaucuccaucuuccugcaccucgugaagauccccacccaccgccacaucgugggcaagcccugccccaagccgcaccggcugaaccacauggggaucugcagcugcggccuguacaagcaccccgggguccccgugaaguggaagcgcugaggacuagucccuguucccagagcccacuuuuuuuucuuuuuuugaaauaaaauagccugucuuucagaucucaaaggcucuuuucagagccaccaaaaaaaaaaaaaaaaaaaaaaaaaaaaaaaaaaaaaaaaaaaaaaaaaaaaaaaaaaaaaaaaaaaaaaaaaaaaaaaaaaaaaaaaaaaaaaaaaaaaa

SEQ ID NO: 23272 - RNA, 1745 nt, Artificial Sequence
  mRNA product Design a-1 (hSL-A100) comprising derived and/or modified sequence from LASV(GA391;Clade III)__CAA36645__GPCmut2 (opt1)
aggagagucccgcagucggcguccagcggcucugcuuguucgugugugugucguugcaggccuuauucaagcuuaccaugggccagaucgugaccuucuuccaggaggucccccacgugaucgaggaggugaugaacaucguccugaucgcccucagcauccuggccauccugaaggggcucuacaacguggcgaccugcggccugaucgggcuggugacguuccuccugcuguccggccgcagcugcucccucaucuacaaggggaccuacgagcugcagacccuggagcucaacauggagacccugaacaugugcaugccgcugagcugcacgaagaacaacucccaccacuacauccgggucggcaacgagaccggccucgagcugacccugaccaacacgagcauccucaaccacaaguucugcaaccuguccgacgcccacaagcgcaaccuguacgaccacagccucauguccaucaucagcaccuuccaccuguccauccccaacuucaaccaguacgaggccaugagcugcgacuucaacgggggcaagaucaccgugcaguacaaccugucccacagcuucgccguggacgccgcggggcacugcggcacccucgccaacgggguccugcagacguucaugcggauggccuggggcggcuccuacaucgcccuggacagcgggcgcggcaacugggacugcaucaugaccuccuaccaguaccucaucauccagaacaccaccugggacgaccacugccaguucagccggcccucccccaucggguaccugggccugcucagccagcgcacgcgggacaucuacaucagccgccggcgccggggcaccuucaccuggacccuguccgacagcgaggggaacgagacgccgggcggguacugccugacccgcuggaugcucaucgaggcggagcugaagugcuucggcaacaccgccguggccaagugcaacgagaagcacgacgaggaguucugcgacaugcugcggcuguucgacuucugcaagcaggccauccgccggcugaagacccccgcccagauguccauccagcugaucaacaaggcggugaacgcccucaucaacgaccagcugaucaugaagaaccaccuccgcgacaucauggggauccccuacugcaacuacagccgguacugguaccucaaccacacguccaccggcaagaccagccugccccgcugcuggcugaucuccaacggcagcuaccucaacgagaccaaguucuccgacgacaucgagcagcaggccgacaacaugaucacggagaugcugcagaaggaguacaucgaccggcaggggaagaccccgcugggccuggucgaccucuucguguucagcaccuccuucuaccugaucagcaucuuccugcaccucgugaagauccccacccaccgccacaucgucgggaagcccugccccaagccgcaccggcugaaccacaugggcaucugcuccugcgggcuguacaagcagcccggcgugcccgugcgcuggaagcgcugaggacuagucccuguucccagagcccacuuuuuuuucuuuuuuugaaauaaaauagccugucuuucagaucucaaaggcucuuuucagagccaccaaaaaaaaaaaaaaaaaaaaaaaaaaaaaaaaaaaaaaaaaaaaaaaaaaaaaaaaaaaaaaaaaaaaaaaaaaaaaaaaaaaaaaaaaaaaaaaaaaaaa

SEQ ID NO: 23273 - RNA, 1748 nt, Artificial Sequence
  mRNA product Design a-1 (hSL-A100) comprising derived and/or modified sequence from LASV(AV;Clade V)__CCA30314__GPCmut2 (opt1)
aggagagucccgcagucggcguccagcggcucugcuuguucgugugugugucguugcaggccuuauucaagcuuaccaugggccagaucgugaccuucuuccaggaggucccccacgugaucgaggaggugaugaacaucguccugaucgcccucagcauccuggccgugcugaaggggcucuacaacaucgcgaccugcggccugaucgggcugaucacguuccuccugcugugcggccgcuccugcagcuccaaccucuacaaggggguguacgagcugcagagccuggaccucaacauggagacccugaacaugugcaugccgcuguccugcaccaagaacaacagccaccacuacauccgggucggcaacgacaccggccucgagcugacgcugaccaacaccuccauccucaaccacaaguucugcaaccugagcgacgcccacaagaaggaccuguacgaccacgcccucauguccaucaucagcaccuuccaccuguccauccccaacuucaaccaguacgaggccaugagcugcgacuucaacgggggcaagaucuccgugcaguacaaccugagccacuccuacgccaucgacgcggccaaccacugcgggacgguggccaacggcauccuccagaccuucaugcgcauggccuggggcgggagcuacaucgcgcuggacuccggccgggggaacugggacugcaucaugaccagcuaccaguaccugaucauccagaacaccacgugggagaaccacugccaguucucccgccccagccccaucggcuaccucgggcugcugagccagcggacccgcgacaucuacaucucccggcgccggcgcggcaccuucaccuggacgcucagcgacuccgagggcaacgccacccccgggggcuacugccugacccgguggaugcugaucgaggccgagcucaagugcuucgggaacaccgccgucgccaagugcaacgagaagcacgacgaggaguucugcgacaugcugcgccuguucgacuucugcaagcaggcgaucagccggcucaaguccccggcccagaugagcauccagcugaucaacaaggccgugaacgcccugaucaacgaccagcucaucaugaagaaccaccuccgcgacaucaugggcauccccuacugcaacuacuccaaguacugguaccugaaccacacgaucaccgggaagaccagccugcccaagugcuggcugguguccaacggcagcuaccugaacgagacccacuucuccgacgacaucgagcagcaggccgacaacaugaucacggagaugcuccagaaggaguacauggagcggcagggcaagaccccgcuggggcuggucgaccuguucguguucagcaccuccuucuaccucaucagcaucuuccugcgccuggugaagauccccacccaccggcacaucgucggcaagcccugccccaagccgcaccgccucaaccacauggggaucugcuccugcggccuguacaagcagcccggggugcccgugcgguggaagcgcugaggacuagucccuguucccagagcccacuuuuuuuucuuuuuuugaaauaaaauagccugucuuucagaucucaaaggcucuuuucagagccaccaaaaaaaaaaaaaaaaaaaaaaaaaaaaaaaaaaaaaaaaaaaaaaaaaaaaaaaaaaaaaaaaaaaaaaaaaaaaaaaaaaaaaaaaaaaaaaaaaaaaa

SEQ ID NO: 23274 - RNA, 1745 nt, Artificial Sequence
  mRNA product Design a-1 (hSL-A100) comprising derived and/or modified sequence from LASV(Togo/2016/7082;Clade VI)__AMR44577__GPCmut2 (opt1)
aggagagucccgcagucggcguccagcggcucugcuuguucgugugugugucguugcaggccuuauucaagcuuaccaugggccagaucaucaccuucuuccaggaggugccccacgucaucgaggaggugaugaacaucgugcugaucgcccucagccugcuggccauccucaagggggucuacaacguggcgaccugcggcaucaucgggcuggugacguuccuguuccucugcggccgcuccugcagccugaucuacaagggguccuacgagcugcagacccucgagcugaacauggagacccugaacaugugcaugccgcucagcugcaccaagaacuccagccaccacuacauccgggucggcaacgagacgggccuggagcugacccucaccaacaccuccaucaucaaccacaaguucugcaaccugagcgacgcccacaagcgcaaccuguacgaccacgcccucauguccauccugagcacguuccaccuguccauccccaacuucaaccaguacgaggccaugagcugcgacuucaacgggggcaagaucuccgugcaguacaaccucagccacgccuacgcgguggacgccgccgagcacugcgggaccgucgccaacggcgugcugcagaccuucaugcggauggcguggggcggguccuacaucgcccuggacagcggccgcgggaacugggacugcaucaugaccuccuaccaguaccucaucauccagaacacgaccugggaggaccacugccaguucagccggcccucccccaucggcuaccuggggcugcucagccagcgcacccgggacaucuacaucagccgccggcgccggggcaccuucacguggacccuguccgacagcgagggcaacgagacccccgggggcuacugccugacccgcuggaugcucaucgaggccgagcugaagugcuucgggaacacggccguggccaagugcaacgagaagcacgacgaggaguucugcgacaugcugcggcuguucgacuucugcaagcaggcgauccagcgccugaaguccccggcccagaugagcauccagcugaucaacaaggccgucaacgcccucaucaacgaccagcugaucaugaagaaccaccuccgggacaugaugggcauccccuacugcaacuacuccaaguacugguaccucaaccacaccagcuccgggcgcaccagccugcccaagugcuggcugguguccaacggcagcuaccucaacgagacccacuucuccgacgacaucgagcagcaggccgacaacaugaucacggagaugcugcagaaggaguacaucgaccggcagggcaagaccccgcuggggcucguggaccuguucgucuucagcaccuccuucuaccugaucagcaucuuccugcaccucaucaagauccccacccaccgccacaucgugggcaagcccugccccaagccgcaccggcugaaccacauggggaucugcuccugcggccuguacaagcagcccggggugcccacgcgcuggaagcggugaggacuagucccuguucccagagcccacuuuuuuuucuuuuuuugaaauaaaauagccugucuuucagaucucaaaggcucuuuucagagccaccaaaaaaaaaaaaaaaaaaaaaaaaaaaaaaaaaaaaaaaaaaaaaaaaaaaaaaaaaaaaaaaaaaaaaaaaaaaaaaaaaaaaaaaaaaaaaaaaaaaaa

SEQ ID NO: 23275 - RNA, 1745 nt, Artificial Sequence
  mRNA product Design a-1 (hSL-A100) comprising derived and/or modified sequence from LASV(KAK-428;Clade n.d. (VII))__ANH09740__GPCmut2 (opt1)
aggagagucccgcagucggcguccagcggcucugcuuguucgugugugugucguugcaggccuuauucaagcuuaccaugggccagaucgugaccuucuuccaggaggucccccacgugaucgaggaggugaugaacaucguccugaucgcccucagccugcuggccauccucaaggggcuguacaacuucgcgaccugcggcgugaucgggcugaucacguuccuccugcugugcggccgcuccugcagcgccaccuacaaggggcaguacgagcuccagacccuggagcugaacauggagucccucaacaugugcaugccgcugagcugcaccaagaacaacucccaccacuacauccgggccggcaacaacacgggccuggagcucacccugaccaacaccagcaucaucucccacaaguucugcaaccugagcgacgcccacaagaagaaccucuacgaccacacgcugauguccaucaucaccaccuuccaccugagcauccccaacuucaaccaguacgaggccauguccugcgacuucaacgggggcaagaucagcauccaguacaaccucucccacagcuacgcgggggacgccgcccagcacugcggcaccguggccaacgggguccugcagacguucaugcgcauggcguggggcggcuccuaccuggcccucgacagcgggcggcgcggcugggacugcaucaucuccagcuaccaguaccugaucauccagaacaccaccugggacgaccacugccaguucucccggcccagccccaucggguaccugggcuucgugagccagaagacccgcgacaucuacaucucccggcgccggcgcggcacguucaccuggacccucagcgacuccgaggggcacgacaugccgggcggguacugccugacccgguggaugcugaucgaggccgaccucaagugcuucggcaacacggccguggccaagugcaacgagaagcacgacgaggaguucugcgacauguggcgccuguucgacuucugcaagcaggcgauccagcggcugaaggcccccgcccagaugaacauccagcucaucaacaaggccgucaacgcccugaucaacgaccagcugaugaugaagaaccaccuccgcgacaucauggggauccccuacugcaacuacagcaaguucugguaccugaacaacaccaccaccggccggacgucccugccccgcugcuggcucaucagcaacggcuccuaccugaacgagacccacuucagcgacgacaucgagcagcaggcggacaacaugaucaccgagaugcugcagaaggaguacauggaccggcaggggaagaccccgcucggccugguggaccuguucguguucuccacgagcuucuaccucaucaccaucuuccugcaccuggucaagauccccacccaccgccacaucguggggaagcccugccccaagccgcaccggcugaaccacaugggcaucugcuccugcgggcucuacaagcagcccggcgugcccguccgcuggaagcggugaggacuagucccuguucccagagcccacuuuuuuuucuuuuuuugaaauaaaauagccugucuuucagaucucaaaggcucuuuucagagccaccaaaaaaaaaaaaaaaaaaaaaaaaaaaaaaaaaaaaaaaaaaaaaaaaaaaaaaaaaaaaaaaaaaaaaaaaaaaaaaaaaaaaaaaaaaaaaaaaaaaaa

SEQ ID NO: 23276 - RNA, 1745 nt, Artificial Sequence; identical to SEQ ID NO: 23270
  mRNA product Design a-1 (hSL-A100) comprising derived and/or modified sequence from LASV(Pinneo-NIG-1969;Clade I)__AIT17836__GPCmut2 (opt1)

SEQ ID NO: 23277 - RNA, 1745 nt, Artificial Sequence
  mRNA product Design a-1 (hSL-A100) comprising derived and/or modified sequence from LASV(ISTH0009-NIG-2011;Clade II)__AIT17404__GPCmut2 (opt1)
aggagagucccgcagucggcguccagcggcucugcuuguucgugugugugucguugcaggccuuauucaagcuuaccaugggccagaucaucaccuucuuccaggaggugccccacgucaucgaggaggugaugaacaucgugcugaucgcccucagccugcuggccauccucaaggggaucuacaacgucgcgaccugcggccuguucgggcugguguccuuccuccugcugugcggccgcagcugcuccacgaccuacaaggggguguacgagcuccagacccuggagcuggacauggccagccucaacaugugcaugccgcuguccugcaccaagaacaacagccaccacuacaucauggucggcaacgagacgggccuggagcucacccugaccaacaccuccaucaucaaccacaaguucugcaaccugagcgacgcccacaagaagaaccucuacgaccacgcccugauguccaucaucagcacguuccaccuguccauccccaacuucaaccaguacgaggccaugagcugcgacuucaacgggggcaagaucuccgugcaguacaaccucagccacgcguacgccguggacgccgccaaccacugcgggaccaucgcgaacggcguccugcagaccuucaugcggauggccuggggcggguccuacaucgcccuggacagcggcaagggguccugggacugcaucaugaccagcuaccaguaccucaucauccagaacacgaccugggaggaccacugccaguucucccgccccagccccaucggcuaccuggggcugcucagccagcggacccgcgacaucuacaucucccggcgccggcgcggcaccuucacguggacccugagcgacuccgagggcaacgagacccccgggggcuacugccugacccgguggaugcucaucgaggccgagcugaagugcuucgggaacacggccguggcgaagugcaacgagaagcacgacgaggaguucugcgacaugcugcgccucuucgacuucugcaagcaggccauccggcgccugaagaccccggcccagaugagcauccagcugaucaacaaggccgugaacgcccucaucaacgaccagcugaucaugaagaaccaccuccgggacaucaugggcauccccuacugcaacuacuccaaguacugguaccugaaccacaccgucaccgggaagacgagccugccccgcugcuggcugguguccaacggcagcuaccucaacgagacccacuucuccgacgacaucgagcagcaggcggacaacaugaucaccgagcugcugcagaaggaguacauggaccggcagggcaagaccccgcucgggcugguggaccuguucgucuucagcacguccuucuaccugaucagcaucuuccuccaccugaucaagauccccacccaccgccacaucaccggcaagcccugccccaagccgcaccggcugaaccacauggggaucugcuccugcggccucuacaagcaccccggggugcccgugaaguggaagcgcugaggacuagucccuguucccagagcccacuuuuuuuucuuuuuuugaaauaaaauagccugucuuucagaucucaaaggcucuuuucagagccaccaaaaaaaaaaaaaaaaaaaaaaaaaaaaaaaaaaaaaaaaaaaaaaaaaaaaaaaaaaaaaaaaaaaaaaaaaaaaaaaaaaaaaaaaaaaaaaaaaaaaa

SEQ ID NO: 23278 - RNA, 1745 nt, Artificial Sequence
  mRNA product Design a-1 (hSL-A100) comprising derived and/or modified sequence from LASV(ISTH2010-NIG-2012;Clade II)__AIT17482__GPCmut2 (opt1)
aggagagucccgcagucggcguccagcggcucugcuuguucgugugugugucguugcaggccuuauucaagcuuaccaugggccagaucaucaccuucuuccaggaggugccccacgucaucgaggaggugaugaacaucgugcugaucgcccucagccugcuggccauccucaaggggaucuacaacgucgcgaccugcggccuguucgggcugguguccuuccuccugcugugcggccgcagcugcuccacgaccuacaaggggguguacgagcuccagacccuggagcuggacauggccagccucaacaugugcaugccgcuguccugcaccaagaacaacagccaccacuacaucauggucggcaacgagacgggccuggagcucacccugaccaacaccuccaucaucaaccacaaguucugcaaccugagcgacgcccacaagaagaaccucuacgaccacgcccugauguccaucaucagcacguuccaccuguccauccccaacuucaaccaguacgaggccaugagcugcgacuucaacgggggcaagaucuccgugcaguacaaccucagccacgcguacgccguggacgccgccaaccacugcgggaccaucgcgaacggcguccugcagaccuucaugcggauggccuggggcggguccuacaucgcccuggacagcggcaagggguccugggacugcaucaugaccagcuaccaguaccucaucauccagaacaucacgugggaggaccacugccaguucucccgccccagccccaucggcuaccuggggcugcucagccagcggacccgcgacaucuacaucucccggcgccggcgcggcaccuucaccuggacgcugagcgacuccgagggcaacgagacccccgggggcuacugccugacccgguggaugcucaucgaggccgagcugaagugcuucgggaacaccgccguggcgaagugcaacgagaagcacgacgaggaguucugcgacaugcugcgccucuucgacuucugcaagcaggccauccggcgccugaagacgccggcccagaugagcauccagcugaucaacaaggccgugaacgcccucaucaacgaccagcugaucaugaagaaccaccuccgggacaucaugggcauccccuacugcaacuacuccaaguacugguaccugaaccacaccgucaccgggaagaccagccugccccgcugcuggcugguguccaacggcagcuaccucaacgagacgcacuucuccgacgacaucgagcagcaggcggacaacaugaucaccgagcugcugcagaaggaguacaucgaccggcagggcaagaccccgcucgggcugguggaccuguucgucuucagcaccuccuucuaccugaucagcaucuuccuccaccuggugaagauccccacgcaccgccacguggucggcaagcccugccccaagccgcaccggcugaaccacauggggaucugcuccugcggccucuacaagcaccccggggugcccgugaaguggaagcgcugaggacuagucccuguucccagagcccacuuuuuuuucuuuuuuugaaauaaaauagccugucuuucagaucucaaaggcucuuuucagagccaccaaaaaaaaaaaaaaaaaaaaaaaaaaaaaaaaaaaaaaaaaaaaaaaaaaaaaaaaaaaaaaaaaaaaaaaaaaaaaaaaaaaaaaaaaaaaaaaaaaaaa

SEQ ID NO: 23279 - RNA, 1745 nt, Artificial Sequence
  mRNA product Design a-1 (hSL-A100) comprising derived and/or modified sequence from LASV(Lassa virus/H.sapiens-wt/NGA/2015/ISTH_0543;Clade II)__AVO03639__GPCmut2 (opt1)
aggagagucccgcagucggcguccagcggcucugcuuguucgugugugugucguugcaggccuuauucaagcuuaccaugggccagaucaucaccuucuuccaggaggugccccacgucaucgaggaggugaugaacaucgugcugaucgcccucagccugcuggccauccucaaggggaucuacaacgucgcgaccugcggccuguucgggcugguguccuuccuccugcugugcggccgcagcugcuccacgaccuacaaggggguguacgagcuccagacccuggagcuggacauggccaaccucaacaugugcaugccgcugagcugcaccaagaacaacucccaccacuacaucauggucggcaacgagacgggccuggagcucacccugaccaacaccagcaucaucaaccacaaguucugcaaccuguccgacgcccacaagaagaaccucuacgaccacgcccugaugagcaucaucuccacguuccaccugagcauccccaacuucaaccaguacgaggccauguccugcgacuucaacgggggcaagaucagcgugcaguacaaccucucccacaccuacgcgguggacgccgccaaccacugcgggaccaucgccaacggcguccugcagaccuucaugcggauggcguggggcgggagcuacaucgcccuggacuccggcaaggggagcugggacugcaucaugacguccuaccaguaccucgugauccagaacaccaccugggaggaccacugccaguucagccgccccucccccaucggcuaccuggggcugcucagccagcggacccgcgacaucuacaucagccggcgccggcgcggcacguucaccuggacccuguccgacagcgagggcaacgagacccccgggggcuacugccugacgcgguggaugcucaucgaggccgagcugaagugcuucgggaacaccgccguggccaagugcaacgagaagcacgacgaggaguucugcgacaugcugcgccucuucgacuucugcaagcaggcgauccggcgccugaagaccccggcccagauguccauccagcugaucaacaaggccgucaacgcccucaucaacgaccagcugaucaugaagaaccaccuccgggacaucaugggcauccccuacugcaacuacagcaaguacugguaccugaaccacaccgugacggggaagaccucccugccccgcugcuggcuggugagcaacggcuccuaccucaacgagacccacuucagcgacgacaucgagcagcaggccgacaacaugaucaccgagcugcugcagaaggaguacaucgaccggcagggcaagacgccgcucgggcuggucgaccuguucguguucuccaccagcuucuaccugaucuccaucuuccuccaccuggugaagauccccacccaccgccacaucaccggcaagcccugccccaagccgcaccggcugaaccacauggggaucugcagcugcggccucuacaagcaccccgggguccccgugaaguggaagcgcugaggacuagucccuguucccagagcccacuuuuuuuucuuuuuuugaaauaaaauagccugucuuucagaucucaaaggcucuuuucagagccaccaaaaaaaaaaaaaaaaaaaaaaaaaaaaaaaaaaaaaaaaaaaaaaaaaaaaaaaaaaaaaaaaaaaaaaaaaaaaaaaaaaaaaaaaaaaaaaaaaaaaa

SEQ ID NO: 23280 - RNA, 1745 nt, Artificial Sequence
  mRNA product Design a-1 (hSL-A100) comprising derived and/or modified sequence from LASV(Lassa virus/H.sapiens-wt/NGA/2016/ISTH_0009;Clade II)__AVO03571__GPCmut2 (opt1)
aggagagucccgcagucggcguccagcggcucugcuuguucgugugugugucguugcaggccuuauucaagcuuaccaugggccagaucaucaccuucuuccaggaggugccccacgucaucgaggaggugaugaacaucgugcugaucgcccucagccugcuggccauccucaaggggaucuacaacgucgcgaccugcggccugcuggggcucguguccuuccugcugcucugcggccgcagcugcuccacgaccuacaaggggguguacgagcugcagacccuggagcucgacauggccagccugaacaugugcaugccgcuguccugcaccaagaacaacagccaccacuacaucauggucggcaacgagacgggccucgagcugacccugaccaacaccuccaucaucaaccacaaguucugcaaccucagcgacgcccacaagaagaaccuguacgaccacgcccugauguccaucaucagcacguuccaccucuccauccccaacuucaaccaguacgaggccaugagcugcgacuucaacgggggccggaucuccgugcaguacaaccugagccacuccuacgcgguggacgccgccaaccacugcgggaccaucgccaacggcguccugcagaccuucaugcgcauggcguggggcgggagcuacaucgcccucgacuccggcaaggggagcugggacugcaucaugaccuccuaccaguaccugaucauccagaacacgaccugggaggaccacugccaguucagccggcccagccccaucggcuaccuggggcuccugucccagcgcacccgggacaucuacaucagccgccggcgccggggcaccuucacguggacccuguccgacagcgagggcaacgagacccccgggggcuacugccucacccgcuggaugcugaucgaggccgagcugaagugcuucgggaacacggccguggccaagugcaacgagaagcacgacgaggaguucugcgacaugcuccggcuguucgacuucugcaagcaggcgauccgccggcugaagaccccggcccagauguccauccagcucaucaacaaggccgugaacgcccugaucaacgaccagcugaucaugaagaaccaccuccgcgacaucaugggcauccccuacugcaacuacagcaaguacugguaccugaaccacaccgucaccgggaagacgucccugccccggugcuggcucgugagcaacggcuccuaccugaacgagacccacuucagcgacgacaucgagcagcaggccgacaacaugaucaccgagcugcuccagaaggaguacaucgaccgccagggcaagaccccgcuggggcugguggaccuguucgucuucuccacgagcuucuaccucaucuccaucuuccugcaccuggugaagauccccacccaccggcacaucaccggcaagcccugccccaagccgcaccgccucaaccacauggggaucugcagcugcggccuguacaaccaccccggggugcccgucaaguggaagcggugaggacuagucccuguucccagagcccacuuuuuuuucuuuuuuugaaauaaaauagccugucuuucagaucucaaaggcucuuuucagagccaccaaaaaaaaaaaaaaaaaaaaaaaaaaaaaaaaaaaaaaaaaaaaaaaaaaaaaaaaaaaaaaaaaaaaaaaaaaaaaaaaaaaaaaaaaaaaaaaaaaaaa

SEQ ID NO: 23281 - RNA, 1745 nt, Artificial Sequence
  mRNA product Design a-1 (hSL-A100) comprising derived and/or modified sequence from LASV(Lassa virus/H.sapiens-wt/NGA/2016/ISTH_0017;Clade II)__AVO03567__GPCmut2 (opt1)
aggagagucccgcagucggcguccagcggcucugcuuguucgugugugugucguugcaggccuuauucaagcuuaccaugggccagaucaucaccuucuuccaggaggugccccacgucaucgaggaggugaugaacaucgugcugaucgcccucagccugcuggccauccucaaggggaucuacaacgucgcgaccugcggccuguucgggcugguguccuuccuccugcugugcggccgcagcugcuccacgaccuacaaggggguguacgagcuccagacccuggagcuggacauggccagccucaacaugugcaugccgcuguccugcaccaagaacaacagccaccacuacaucauggucggcaacgagacgggccuggagcucacccugaccaacaccuccaucaucaaccacaaguucugcaaccugagcgacgcccacaagaagaaccucuacgaccacgcccugauguccaucaucagcacguuccaccuguccauccccaacuucaaccaguacgaggccaugagcugcgacuucaacgggggcaagaucuccgugcaguacaaccucagccacaccuacgcgaucgacgccgccaaccacugcgggaccaucgccaacggcgugcugcagaccuucaugcggauggcguggggcggguccuacaucgcccuggacagcggcaagggguccugggacugcaucaugacgagcuaccaguaccucaucauccagaacaccaccugggaggaccacugccaguucucccgccccagccccaucggcuaccuggggcugcucagccagcggacccgcgacaucuacaucucccggcgccggcgcggcacguucaccuggacccugagcgacuccgagggcaacgagacccccgggggcuacugccugacgcgguggaugcucaucgaggccgagcugaagugcuucgggaacaccgccgucgccaagugcaacgagaagcacgacgaggaguucugcgacaugcugcgccucuucgacuucugcaagcaggcgauccggcgccugaagaccccggcccagaugagcauccagcugaucaacaaggccgugaacgcccucaucaacgaccagcugaucaugaagaaccaccuccgggacaucaugggcauccccuacugcaacuacuccaaguacugguaccugaaccacaccgugacggggaagaccagccugccccgcugcuggcuggucuccaacggcagcuaccucaacgagacccacuucuccgacgacaucgagcagcaggccgacaacaugaucaccgagcugcugcagaaggaguacauggaccggcagggcaagacgccgcucgggcugguggaccuguucguguucagcaccuccuucuaccugaucagcaucuuccuccaccugguccgcauccccacccaccggcacgugaucggcaagcccugccccaagccgcaccgccugaaccacauggggaucugcuccugcggccucuacaagcaccccggggugcccgucaaguggaagcggugaggacuagucccuguucccagagcccacuuuuuuuucuuuuuuugaaauaaaauagccugucuuucagaucucaaaggcucuuuucagagccaccaaaaaaaaaaaaaaaaaaaaaaaaaaaaaaaaaaaaaaaaaaaaaaaaaaaaaaaaaaaaaaaaaaaaaaaaaaaaaaaaaaaaaaaaaaaaaaaaaaaaa

SEQ ID NO: 23282 - RNA, 1745 nt, Artificial Sequence
  mRNA product Design a-1 (hSL-A100) comprising derived and/or modified sequence from LASV(Lassa virus/H.sapiens-wt/NGA/2018/ISTH_0959;Clade II)__AVV65099__GPCmut2 (opt1)
aggagagucccgcagucggcguccagcggcucugcuuguucgugugugugucguugcaggccuuauucaagcuuaccaugggccagaucaucaccuucuuccaggaggugccccacgucaucgaggaggugaugaacaucgugcugaucgcccucagccugcuggccauccucaaggggaucuacaacgucgugaccugcggccuguucgggcugguguccuuccuccugcugugcggccgcagcugcuccacgaccuacaagggggucuacgagcuccagacccuggagcuggacauggcgagccucaacaugugcaugccgcuguccugcaccaagaacaacagccaccacuacaucauggugggcaacgagacgggccuggagcucacccugaccaacaccuccaucaucaaccacaaguucugcaaccugagcgacgcccacaagaagaaccucuacgaccacgcccugauguccaucaucagcacguuccaccuguccauccccaacuucaaccaguacgaggccaugagcugcgacuucaacgggggcaagaucuccgugcaguacaaccucagccacgccuacgcgaucgacgccgccaaccacugcgggaccaucgccaacggcguccugcagaccuucaugcggauggcguggggcggguccuacaucgcccuggacagcggcaagggguccugggacugcaucaugaccagcuaccaguaccucaucauccagaacacgaccugggaggaccacugccaguucucccgccccagccccaucggcuaccuggggcugcucagccagcggacccgcgacaucuacaucucccggcgccggcgcggcaccuucacguggacccugagcgacuccgagggcaacgagacccccgggggcuacugccugacccgguggaugcucaucgaggccgagcugaagugcuucgggaacacggccguggccaagugcaacgagaagcacgacgaggaguucugcgacaugcugcgccucuucgacuucugcaagcaggcgauccggcgccugaagaccccggcccagaugagcauccagcugaucaacaaggccgugaacgcccucaucaacgaccagcugaucaugaagaaccaccuccgggacaucaugggcauccccuacugcaacuacuccaaguacugguaccugaaccacaccgucaccgggaagacgagccugccccgcugcuggcugguguccaacggcagcuaccucaacgagacccacuucuccgacgacaucgagcagcaggccgacaacaugaucaccgagcugcugcagaaggaguacaucgaccggcagggcaagaccccgcucgggcugguggaccuguucgucuucagcacguccuucuaccugaucagcaucuuccuccaccuggugaagauccccacccaccgccacgugaucggcaagcccugccccaagccgcaccggcugaaccacauggggaucugcuccugcggccucuacaagcaccccgggguccccgugaaguggaagcgcugaggacuagucccuguucccagagcccacuuuuuuuucuuuuuuugaaauaaaauagccugucuuucagaucucaaaggcucuuuucagagccaccaaaaaaaaaaaaaaaaaaaaaaaaaaaaaaaaaaaaaaaaaaaaaaaaaaaaaaaaaaaaaaaaaaaaaaaaaaaaaaaaaaaaaaaaaaaaaaaaaaaaa

SEQ ID NO: 23283 - RNA, 1745 nt, Artificial Sequence
  mRNA product Design a-1 (hSL-A100) comprising derived and/or modified sequence from LASV(LASV003-NIG-2008;Clade II)__AIT17580__GPCmut2 (opt1)
aggagagucccgcagucggcguccagcggcucugcuuguucgugugugugucguugcaggccuuauucaagcuuaccaugggccagaucaucaccuucuuccaggaggugccccacgucaucgaggaggugaugaacaucgugcugaucgcccucagccugcuggccauccucaaggggaucuacaacgucgcgaccugcggccuguucgggcugguguccuuccuccugcugugcggccgcagcugcuccacgaccuacaaggggguguacgagcuccagacccuggagcuggacauggccagccucaacaugugcaugccgcuguccugcaccaagaacaacagccaccacuacaucauggucggcaacgagacgggccuggagcucacccugaccaacaccuccaucaucaaccacaaguucugcaaccugagcgacgcccacaagaagaaccucuacgaccacgcccugauguccaucaucagcacguuccaccuguccauccccaacuucaaccaguacgaggccaugagcugcgacuucaacgggggcaagaucuccgugcaguacaaccucagccacaccuacgcgguggacgccgccaaccacugcgggaccaucgccaacggcguccugcagaccuucaugcggauggcguggggcggguccuacaucgcccuggacagcggcaagggguccugggacugcaucaugacgagcuaccaguaccucaucauccagaacaccaccugggaggaccacugccaguucucccgccccagccccaucggcuaccuggggcugcucagccagcggacccgcgacaucuacaucucccggcgccggcgcggcacguucaccuggacccugagcgacuccgagagcaacgagaccccgggcggguacugccugacgcgguggaugcucaucgaggccgagcugaagugcuucggcaacaccgccguggccaagugcaacgagaagcacgacgaggaguucugcgacaugcugcgccucuucgacuucugcaagcaggcgauccggcgccugaaggcccccgcccagauguccauccagcugaucaacaaggccgugaacgcccucaucaacgaccagcugaucaugaagaaccaccuccgggacaucauggggauccccuacugcaacuacagcaaguacugguaccugaaccacaccgucaccggccgcacgucccugccccggugcuggcuggugagcaacggguccuaccucaacgagacccacuucagcgacgacaucgagcagcaggcggacaacaugaucaccgagcugcugcagaaggaguacauggaccgccagggcaagaccccgcucggccugguggaccuguucgucuucuccacgagcuucuaccugaucuccaucuuccuccaccuggugaagauccccacccaccggcacgugaucgggaagcccugccccaagccgcaccgccugaaccacaugggcaucugcagcugcgggcucuacaagcaccccggcguccccgugaaguggaagcggugaggacuagucccuguucccagagcccacuuuuuuuucuuuuuuugaaauaaaauagccugucuuucagaucucaaaggcucuuuucagagccaccaaaaaaaaaaaaaaaaaaaaaaaaaaaaaaaaaaaaaaaaaaaaaaaaaaaaaaaaaaaaaaaaaaaaaaaaaaaaaaaaaaaaaaaaaaaaaaaaaaaaa

SEQ ID NO: 23284 - RNA, 1745 nt, Artificial Sequence
  mRNA product Design a-1 (hSL-A100) comprising derived and/or modified sequence from LASV(LASV035-NIG-2009;Clade II)__AIT17588__GPCmut2 (opt1)
aggagagucccgcagucggcguccagcggcucugcuuguucgugugugugucguugcaggccuuauucaagcuuaccaugggccagaucaucaccuucuuccaggaggugccccacgucaucgaggaggugaugaacaucgugcugaucgcccucagccugcuggccauccucaaggggaucuacaacgucgcgaccugcggccuguucgggcugguguccuuccuccugcugugcggccgcagcugcuccacgaccuacaaggggguguacgagcuccagacccuggagcuggacauggccagccucaacaugugcaugccgcuguccugcaccaagaacaacagccaccacuacaucauggucggcaacgagacgggccuggagcucacccugaccaacaccuccaucaucaaccacaaguucugcaaccugagcgacgcccacaagaagaaccucuacgaccacgcccugauguccaucaucagcacguuccaccuguccauccccaacuucaaccaguacgaggccaugagcugcgacuucaacgggggcaagaucuccgugcaguacaaccucagccacgcguacgccguggacgccgccaaccacugcgggaccaucgcgaacggcguccugcagaccuucaugcggauggccuggggcggguccuacaucgcccuggacagcggcaagggguccugggacugcaucaugaccagcuaccaguaccucaucauccagaacacgaccugggaggaccacugccaguucucccgccccagccccaucggcuaccuggggcugcucagccagcggacccgcgacaucuacaucucccggcgccggcgcggcaccuucacguggacccugagcgacuccgagggcaacgagacccccgggggcuacugccugacccgguggaugcucaucgaggccgagcugaagugcuucgggaacacggccguggcgaagugcaacgagaagcacgacgaggaguucugcgacaugcugcgccucuucgacuucugcaagcaggccauccggcgccugaaggccccggcccagaugagcauccagcugaucaacaaggccgugaacgcgcucaucaacgaccagcugaucaugaagaaccaccuccgggacaucaugggcauccccuacugcaacuacuccaaguacugguaccugaaccacaccgucaccgggaagaccagccugccccgcugcuggcugguguccaacggcagcuaccucaacgagacgcacuucuccgacgacaucgagcagcaggccgacaacaugaucaccgagcugcugcagaaggaguacaucgaccggcagggcaagaccccgcucgggcugguggaccuguucgucuucagcaccuccuucuaccugaucagcaucuuccuccaccuggugaagauccccacgcaccgccacgugaucggcaagcccugccccaagccgcaccggcugaaccacauggggaucugcuccugcggccucuacaagcaccccgggguccccgugaaguggaagcgcugaggacuagucccuguucccagagcccacuuuuuuuucuuuuuuugaaauaaaauagccugucuuucagaucucaaaggcucuuuucagagccaccaaaaaaaaaaaaaaaaaaaaaaaaaaaaaaaaaaaaaaaaaaaaaaaaaaaaaaaaaaaaaaaaaaaaaaaaaaaaaaaaaaaaaaaaaaaaaaaaaaaaa

SEQ ID NO: 23285 - RNA, 1745 nt, Artificial Sequence
  mRNA product Design a-1 (hSL-A100) comprising derived and/or modified sequence from LASV(LASV1000-NIG-2009;Clade II)__AIT17782__GPCmut2 (opt1)
aggagagucccgcagucggcguccagcggcucugcuuguucgugugugugucguugcaggccuuauucaagcuuaccaugggccagaucaucaccuucuuccaggaggugccccacgucaucgaggaggugaugaacaucgugcugaucgcccucagccugcuggccauccucaaggggaucuacaacgucgcgaccugcggccuguucgggcugguguccuuccuccugcugugcggccgcagcugcuccacgaccuacaaggggguguacgagcuccagacccuggagcuggacauggccagccucaacaugugcaugccgcuguccugcaccaagaacaacagccaccacuacaucauggucggcaacgagacgggccuggagcucacccugaccaacaccuccaucaucaaccacaaguucugcaaccugagcgacgcccacaagaagaaccucuacgaccacgcccugauguccaucaucagcacguuccaccuguccauccccaacuucaaccaguacgaggccaugagcugcgacuucaacgggggcaagaucuccgugcaguacaaccucagccacaccuacgcgguggacgccgccaaccacugcgggaccaucgccaacggcguccugcagaccuucaugcggauggcguggggcggguccuacaucgcccuggacagcggcaagggguccugggacugcaucaugacgagcuaccaguaccucaucauccagaacaccaccugggaggaccacugccaguucucccgccccagccccaucggcuaccuggggcugcucagccagcggacccgcgacaucuacaucucccggcgccggcgcggcacguucaccuggacccugagcgacuccgagggcaacgagacccccgggggcuacugccugacgcgguggaugcucaucgaggccgagcugaagugcuucgggaacaccgccguggccaagugcaacgagaagcacgacgaggaguucugcgacaugcugcgccucuucgacuucugcaagcaggcgaucaagcggcugaagaccccggcccagaugagcauccagcugaucaacaaggccgugaacgcccucaucaacgaccagcugaucaugaagaaccaccuccgcgacaucaugggcauccccuacugcaacuacuccaaguacugguaccugaaccacaccgucacggggaagaccagccugccccggugcuggcugguguccaacggcagcuaccucaacgagacccacuucuccgacgacaucgagcagcaggccgacaacaugaucaccgagcugcugcagaaggaguacaucgaccgccagggcaagacgccgcucgggcugguggaccuguucgucuucagcaccuccuucuaccugaucagcaucuuccuccaccuggugaagauccccacccaccggcacguggucggcaagcccugccccaagccgcaccgccugaaccacauggggaucugcuccugcggccucuacaagcaccccggggugcccgugaaguggaagcggugaggacuagucccuguucccagagcccacuuuuuuuucuuuuuuugaaauaaaauagccugucuuucagaucucaaaggcucuuuucagagccaccaaaaaaaaaaaaaaaaaaaaaaaaaaaaaaaaaaaaaaaaaaaaaaaaaaaaaaaaaaaaaaaaaaaaaaaaaaaaaaaaaaaaaaaaaaaaaaaaaaaaa

SEQ ID NO: 23286 - RNA, 1745 nt, Artificial Sequence
  mRNA product Design a-1 (hSL-A100) comprising derived and/or modified sequence from LASV(LASV221-NIG-2010;Clade II)__AIT17624__GPCmut2 (opt1)
aggagagucccgcagucggcguccagcggcucugcuuguucgugugugugucguugcaggccuuauucaagcuuaccaugggccagaucaucaccuucuuccaggaggugccccacgucaucgaggaggugaugaacaucgugcugaucgcccucagccugcuggccauccucaaggggaucuacaacgucgcgaccugcggccuguucgggcugguguccuuccuccugcugugcggccgcagcugcuccacgaccuacaaggggguguacgagcuccagacccuggagcuggacauggccagccucaacaugugcaugccgcuguccugcaccaagaacaacagccaccacuacaucauggucggcaacgagacgggccuggagcucacccugaccaacaccuccaucaucaaccacaaguucugcaaccugagcgacgcccacaagaagaaccucuacgaccacgcccugauguccaucaucagcacguuccaccuguccauccccaacuucaaccaguacgaggccaugagcugcgacuucaacgggggcaagaucuccgugcaguacaaccucagccacaccuacgcgaucgacgccgccaaccacugcgggaccaucgccaacggcgugcugcagaccuucaugcggauggcguggggcggguccuacaucgcccuggacagcggcaagggguccugggacugcaucaugacgagcuaccaguaccucaucauccagaacaccaccugggaggaccacugccaguucucccgccccagccccaucggcuaccuggggcugcucagccagcggacccgcgacaucuacaucucccggcgccggcgcggcacguucaccuggacccugagcgacuccgagggcaacgagacccccgggggcuacugccugacgcgguggaugcucaucgaggccgagcugaagugcuucgggaacaccgccgucgccaagugcaacgagaagcacgacgaggaguucugcgacaugcugcgccucuucgacuucugcaagcaggcgauccggcgccugaagaccccggcccagaugagcauccagcugaucaacaaggccgugaacgcccucaucaacgaccagcugaucaugaagaaccaccuccgggacaucaugggcauccccuacugcaacuacuccaaguacugguaccugaaccacaccgugacggggaagaccagccugccccgcugcuggcuggucuccaacggcagcuaccucaacgagacccacuucuccgacgacaucgagcagcaggccgacaacaugaucaccgagaugcugcagaaggaguacauggaccggcagggcaagacgccgcuggggcucguggaccuguucguguucagcaccuccuucuaccugaucagcaucuuccugcaccucgucaagauccccacccaccgccacgugaucggcaagcccugccccaagccgcaccggcugaaccacauggggaucugcuccugcggccuguacaagcaccccggggugcccgucaaguggaagcgcugaggacuagucccuguucccagagcccacuuuuuuuucuuuuuuugaaauaaaauagccugucuuucagaucucaaaggcucuuuucagagccaccaaaaaaaaaaaaaaaaaaaaaaaaaaaaaaaaaaaaaaaaaaaaaaaaaaaaaaaaaaaaaaaaaaaaaaaaaaaaaaaaaaaaaaaaaaaaaaaaaaaaa

SEQ ID NO: 23287 - RNA, 1745 nt, Artificial Sequence
  mRNA product Design a-1 (hSL-A100) comprising derived and/or modified sequence from LASV(LASV237-NIG-2010;Clade II)__AIT17638__GPCmut2 (opt1)
aggagagucccgcagucggcguccagcggcucugcuuguucgugugugugucguugcaggccuuauucaagcuuaccaugggccagaucaucaccuucuuccaggaggugccccacgucaucgaggaggugaugaacaucgugcugaucgcccucagccugcuggccauccucaaggggaucuacaacgucgcgaccugcggccuguucgggcugguguccuuccuccugcugugcggccgcagcugcuccacgaccuacaaggggguguacgagcuccagacccuggagcuggacauggccagccucaacaugugcaugccgcuguccugcaccaagaacaacagccaccacuacaucauggucggcaacgagacgggccuggagcucacccugaccaacaccuccaucaucaaccacaaguucugcaaccugagcgacgcccacaagaaggaccucuacgaccacgcccugauguccaucaucagcacguuccaccuguccauccccaacuucaaccaguacgaggccaugagcugcgacuucaacgggggcaagaucuccgugcaguacaaccucagccacaccuacgcgguggacgccgccaaccacugcgggaccaucgccaacggcguccugcagaccuucaugcggauggcguggggcggguccuacaucgcccuggacagcggcaagggguccugggacugcaucaugacgagcuaccaguaccucaucauccagaacaccaccugggaggaccacugccaguucucccgccccagccccaucggcuaccuggggcugcucagccagcggacccgcgacaucuacaucucccggcgccggcgcggcacguucaccuggacccugagcgacuccgagggcaacgagacccccgggggcuacugccugacgcgguggaugcucaucgaggccgagcugaagugcuucgggaacaccgccguggccaagugcaacgagaagcacgacgaggaguucugcgacaugcugcgccucuucgacuucugcaagcaggcgauccggcgccugaagaccccggcccagaugagcauccagcugaucaacaaggccgugaacgcccucaucaacgaccagcugaucaugaagaaccaccuccgggacaucaugggcauccccuacugcaacuacuccaaguacugguaccugaaccacaccgucacggggaagaccagccugccccgcugcuggcugguguccaacggcagcuaccucaacgagacccacuucuccgacgacaucgagcagcaggccgacaacaugaucaccgagcugcugcagaaggaguacauggaccggcagggcaagacgccgcucgggcugguggaccuguucgucuucagcaccuccuucuaccugaucagcaucuuccuccaccugaucaagauccccacccaccgccacaucaccggcaagcccugccccaagccgcaccggcugaaccacauggggaucugcuccugcggccucuacaagcaccccggggugcccgugaaguggaagcgcugaggacuagucccuguucccagagcccacuuuuuuuucuuuuuuugaaauaaaauagccugucuuucagaucucaaaggcucuuuucagagccaccaaaaaaaaaaaaaaaaaaaaaaaaaaaaaaaaaaaaaaaaaaaaaaaaaaaaaaaaaaaaaaaaaaaaaaaaaaaaaaaaaaaaaaaaaaaaaaaaaaaaa

SEQ ID NO: 23288 - RNA, 1745 nt, Artificial Sequence
  mRNA product Design a-1 (hSL-A100) comprising derived and/or modified sequence from LASV(LASV253-NIG-2011;Clade II)__AIT17670__GPCmut2 (opt1)
aggagagucccgcagucggcguccagcggcucugcuuguucgugugugugucguugcaggccuuauucaagcuuaccaugggccagaucaucaccuucuuccaggaggugccccacgucaucgaggaggugaugaacaucgugcugaucgcccucagccugcuggccauccucaaggggaucuacaacgucgcgaccugcggccuguucgggcugguguccuuccuccugcugugcggccgcagcugcuccacgaccuacaaggggguguacgagcuccagacccuggagcuggacauggccagccucaacaugugcaugccgcuguccugcaccaagaacaacagccaccacuacaucauggucggcaacgagacgggccuggagcucacccugaccaacaccuccaucaucaaccacaaguucugcaaccugagcgacgcccacaagaagaaccucuacgaccacgcccugauguccaucaucagcacguuccaccuguccauccccaacuucaaccaguacgaggccaugagcugcgacuucaacgggggcaagaucuccgugcaguacaaccucagccacaccuacgcgguggacgccgccaaccacugcgggaccaucgccaacggcguccugcagaccuucaugcggauggcguggggcggguccuacaucgcccuggacagcggcaagggguccugggacugcaucaugacgagcuaccaguaccucaucauccagaacaccaccugggaggaccacugccaguucucccgccccagccccaucggcuaccuggggcugcucagccagcggacccgcgacaucuacaucucccggcgccggcgcggcacguucaccuggacccugagcgacuccgagggcaacgagacccccgggggcuacugccugacgcgguggaugcucaucgaggccgagcugaagugcuucgggaacaccgccguggccaagugcaacgagaagcacgacgaggaguucugcgacaugcugcgccucuucgacuucugcaagcaggcgauccggcgccugaaggccccggcccagaugagcauccagcugaucaacaaggccgugaacgcccucaucaacgaccagcugaucaugaagaaccaccuccgggacaucaugggcauccccuacugcaacuacuccaaguacugguaccugaaccacaccgucaccgggcgcacgagccugccccggugcuggcugguguccaacggcagcuaccucaacgagacccacuucuccgacgacaucgagcagcaggcggacaacaugaucaccgagcugcugcagaaggaguacaucgaccgccagggcaagaccccgcucgggcugguggaccuguucgucuucagcacguccuucuaccugaucagcaucuuccuccaccuggugaagauccccacccaccggcacaucaucggcaagcccugccccaagccgcaccgccugaaccacauggggaucugcuccugcggccucuacaagcaccccggggugcccgucaaguggaagcggugaggacuagucccuguucccagagcccacuuuuuuuucuuuuuuugaaauaaaauagccugucuuucagaucucaaaggcucuuuucagagccaccaaaaaaaaaaaaaaaaaaaaaaaaaaaaaaaaaaaaaaaaaaaaaaaaaaaaaaaaaaaaaaaaaaaaaaaaaaaaaaaaaaaaaaaaaaaaaaaaaaaaa

SEQ ID NO: 23289 - RNA, 1745 nt, Artificial Sequence
  mRNA product Design a-1 (hSL-A100) comprising derived and/or modified sequence from LASV(LASV254-NIG-2011;Clade II)__AIT17674__GPCmut2 (opt1)
aggagagucccgcagucggcguccagcggcucugcuuguucgugugugugucguugcaggccuuauucaagcuuaccaugggccagaucaucaccuucuuccaggaggugccccacgucaucgaggaggugaugaacaucgugcugaucgcccucagccugcuggccauccucaaggggaucuacaacgucgcgaccugcggccuguucgggcugguguccuuccuccugcugugcggccgcagcugcuccacgaccuacaaggggguguacgagcuccagacccuggagcuggacaugaccaaccucaacaugugcaugccgcugagcugcacgaagaacaacucccaccacuacaucauggucggcaacgagaccggccuggagcucacccugaccaacacgagcaucaucaaccacaaguucugcaaccuguccgacgcccacaagaagaaccucuacaaccacgcccugaugagcaucaucuccaccuuccaccugagcauccccaacuucaaccaguacgaggccauguccugcgacuucaacgggggcaagaucagcgugcaguacaaccucucccacagcuacgccguggacgcggccaaccacugcgggaccaucgccaacggcguccugcagaccuucaugcggauggccuggggcggguccuacaucgcgcuggacagcggcaaggggaacugggacugcaucaugacguccuaccaguaccucaucauccagaacaccaccugggaggaccacugccaguucagccgccccucccccaucggcuaccuggggcugcucagccagcggacccgcgacaucuacaucagccggcgccggcgcggcacguucaccuggacccuguccgacagcgagggcaacgagacccccgggggcuacugccugacgcgguggaugcucaucgaggccgagcugaagugcuucgggaacaccgccguggccaagugcaacgagaagcacgacgaggaguucugcgacaugcugcgccucuucgacuucugcaagcaggccauccggcgccugaagaccccggcgcaggccaacauccagcugaucaacaaggccgugaacgcccucaucaacgaccagcugaucaugaagaaccaccuccgggacaucaugggcauccccuacugcaacuacuccaaguacugguaccugaaccacaccgucacggggaagaccagccugccccgcugcuggcugguguccaacggcagcuaccucaacgagacccacuucuccgacgacaucgagcagcaggccgacaacaugaucaccgagcugcugcagaaggaguacauggaccggcagggcaagacgccgcucgggcugguggaccuguucgucuucagcaccuccuucuaccugaucagcaucuuccuccaccuggugaagauccccacccaccgccacgugaucggcaagcccugccccaagccgcaccggcugaaccacauggggaucugcuccugcggccucuacaagcaccccgggguccccgugaaguggaagcgcugaggacuagucccuguucccagagcccacuuuuuuuucuuuuuuugaaauaaaauagccugucuuucagaucucaaaggcucuuuucagagccaccaaaaaaaaaaaaaaaaaaaaaaaaaaaaaaaaaaaaaaaaaaaaaaaaaaaaaaaaaaaaaaaaaaaaaaaaaaaaaaaaaaaaaaaaaaaaaaaaaaaaa

SEQ ID NO: 23290 - RNA, 1745 nt, Artificial Sequence
  mRNA product Design a-1 (hSL-A100) comprising derived and/or modified sequence from LASV(Nig08-A19;Clade III)__ADU56618__GPCmut2 (opt1)
aggagagucccgcagucggcguccagcggcucugcuuguucgugugugugucguugcaggccuuauucaagcuuaccaugggccagaucgugaccuucuuccaggaggucccccacgugaucgaggaggugaugaacaucguccugaucgcccucagcauccuggccauccugaaggggcucuacaacaucgcgaccugcggccugaucgggcuggugacguuccuccugcuguccggccgcagcugcuccaugaccuacaaggggguguacgagcuccagacccuggagcugaacaugaacacccucaacaugugcaugccgcugagcugcacgaagaacaacucccaccacuacaucauggucggcaacgagaccggccuggagcucacccugaccaacacgagccugcuccaccacaaguucugcaaccuguccgacgcccacaagaagaaccuguacgaccacacccucaugagcaucaucuccaccuuccaccugagcauccccaacuucaaccaguacgaggccauguccugcgacuucaacgggggcaagaucaccgugcaguacaaccugagccacuccuacgccaucgacgccgcgaaccacugcgggacgguggccaacggcguccuccagaccuucaugcggauggccuggggcgggagcuacaucgcccuggacuccggccgcgggaagugggacugcaucaugaccagcuaccaguaccugaucauccagaacaccacgugggaggaccacugccaguucucccggcccagccccaucggcuaccucgggcugcugucccagcgcacccgggacaucuacaucagccgccggcgccggggcaccuucaccuggacgcucagcgacuccgagggcaacgagacccccgggggcuacugccugacccgcuggaugcugaucgaggcggagcucaagugcuucgggaacaccgccguggccaagugcaacgagaagcacgacgaggaguucugcgacaugcugcggcuguucgacuucugcaagcaggccauccgccggcucaaggccccggcgcagaugagcauccagcugaucaacaaggccgugaacgcccugaucaacgaccagcucaucaugaagaaccaccuccgcgacaucaugggcauccccuacugcaacuacuccaaguacugguaccugaaccacacgagcaccgggcggaccucccugccccgcugcuggcuggucagcaacggcuccuaccugaacgagacccacuucagcgacgacaucgagcagcaggccgacaacaugaucacggagaugcuccagaaggaguaccuggaccggcagggcaagaccccgcuggggcugguggaccucuucguguucuccaccagcuucuaccugaucuccaucuuccugcaccucgucaagauccccacccaccgccacaucgugggcaagcccugccccaagccgcaccggcugaaccacauggggaucugcagcugcggccuguacaagcagcccggggugcccguccgcuggaagcggugaggacuagucccuguucccagagcccacuuuuuuuucuuuuuuugaaauaaaauagccugucuuucagaucucaaaggcucuuuucagagccaccaaaaaaaaaaaaaaaaaaaaaaaaaaaaaaaaaaaaaaaaaaaaaaaaaaaaaaaaaaaaaaaaaaaaaaaaaaaaaaaaaaaaaaaaaaaaaaaaaaaaa

SEQ ID NO: 23291 - RNA, 1748 nt, Artificial Sequence
  mRNA product Design a-1 (hSL-A100) comprising derived and/or modified sequence from LASV(G1180-SLE-2010;Clade IV)__AIT17168__GPCmut2 (opt1)
aggagagucccgcagucggcguccagcggcucugcuuguucgugugugugucguugcaggccuuauucaagcuuaccaugggccagaucgugaccuucuuccaggaggucccccacgugaucgaggaggugaugaacaucguccugaucgcccucagcauccuggccgugcugaaggggcucuacaacuucgcgaccugcggccugguggggcugcucacguuccugcugcucugcggccgcuccugcaccgccagccgguacaagggggucuacgagcugcagacccuggagcucaacauggagacccugaacaugugcaugccgcuguccugcacgaagaacaacagccaccacuacaucauggugggcaacgagaccggccucgagcugacccugaccaacacguccaucaucaaccacaaguucugcaaccucagcgacgcccacaagaagaaccuguacgaccacgcccugauguccaucaucagcaccuuccaccucuccauccccaacuucaaccaguacgaggccaugagcugcgacuucaacgggggcaagaucuccgugcaguacaaccugagccacuccuacgcgggggacgccgccaaccacugcggcaccgucgccaacggggugcugcagaccuucaugcgcauggcguggggcggcagcuacaucgcccucgacuccgggcacggcagcugggacugcaucaugacguccuaccaguaccugaucauccagaacaccaccugggaggaccacugccaguucagccggcccucccccaucggguaccugggccuccugagccagcgcacccgggacaucuacaucagccgccggcgccggggcacguucaccuggacccuguccgacagcgaggggaaggacaccccgggcggguacugccucacgcgcuggaugcugaucgaggccgagcugaagugcuucggcaacaccgccguggccaagugcaacgagaagcacgacgaggaguucugcgacaugcuccggcuguucgacuucugcaagcaggcgauccagcgccugaaggcccccgcccagauguccauccagcucaucaacaaggccgucaacgcccugaucaacgaccagcugaucaugaagaaccaccuccgggacaucauggggauccccuacugcaacuacagcaaguacugguaccugaaccacaccaccacgggcaagaccucccugcccaagugcuggcucgugagcaacggcuccuaccugaacgagacccacuucagcgacgacaucgagcagcaggcggacaacaugaucaccgagaugcugcagaaggaguacauggagcgccaggggaagacgccgcucggccugguggaccuguucgucuucuccaccagcuucuaccugaucuccaucuuccuccaccuggugaagauccccacccaccggcacaucgugggcaagagcugccccaagccccaccgccugaaccacauggggaucugcuccugcgggcucuacaagcagccgggcguccccgugaaguggaagcggugaggacuagucccuguucccagagcccacuuuuuuuucuuuuuuugaaauaaaauagccugucuuucagaucucaaaggcucuuuucagagccaccaaaaaaaaaaaaaaaaaaaaaaaaaaaaaaaaaaaaaaaaaaaaaaaaaaaaaaaaaaaaaaaaaaaaaaaaaaaaaaaaaaaaaaaaaaaaaaaaaaaaa

SEQ ID NO: 23292 - RNA, 1748 nt, Artificial Sequence
  mRNA product Design a-1 (hSL-A100) comprising derived and/or modified sequence from LASV(G1442-SLE-2011;Clade IV)__AIT17180__GPCmut2 (opt1)
aggagagucccgcagucggcguccagcggcucugcuuguucgugugugugucguugcaggccuuauucaagcuuaccaugggccagaucgugaccuucuuccaggaggucccccacgugaucgaggaggugaugaacaucguccugaucgcccucagcauccuggccgugcugaaggggcucuacaacguggcgaccugcggccugaucgggcuggucacguuccuccugcugugcggccgcuccugcaccaccacccucuacaaggggguguacgagcugcagacgcuggagcucaacauggagacccugaacaugugcaugccgcugagcugcaccaagaacaacucccaccacuacauccgggugggcaacgagaccggccucgagcugacgcugaccaacaccagcaucaucaaccacaaguucugcaaccucuccgacgcccacaagaagaaccuguacgaccacgcccugaugagcaucaucuccaccuuccaccucagcauccccaacuucaaccaguacgaggccauguccugcgacuucaacgggggcaagaucagcguccaguacaaccugucccacagcuacgccggggacgcggccaaccacugcggcacgguggccaacggggugcugcagaccuucaugcgcauggccuggggcggcuccuacaucgcgcucgacagcgggcggggcaacugggacugcaucaugaccuccuaccaguaccugaucauccagaacaccacgugggacgaccacugccaguucagccgccccucccccaucggguaccugggccuccugagccagcggacccgcgacgucuacaucucccggcgccggcgcggcaccuucaccuggacgcugagcgacagcgaggggaaggacaccccgggcggguacugccucacccgguggaugcugaucgaggccgagcugaagugcuucggcaacaccgccguggccaagugcaacgagaagcacgacgaggaguucugcgacaugcuccgccuguucgacuucugcaagcaggccauccagcggcugaaggcgcccgcccagauguccauccagcucaucaacaaggccgugaacgcccugaucaacgaccagcugaucaugaagaaccaccuccgcgacaucauggggauccccuacugcaacuacagcaaguacugguaccugaacaacacggccaccggcaagaccucccugcccaagugcuggcucaucagcaacggcuccuaccugaacgagacccacuucagcgacgacaucgagcaggaggcggacaacaugaucacggagaugcugcagaaggaguacauggagcggcaggggaagaccccgcucggccuggucgaccuguucguguucuccaccagcuucuaccugaucuccaucuuccuccaccuggugaagauccccacccaccgccacaucgucggcaagagcugccccaagccccaccggcugaaccacauggggaucugcuccugcgggcucuacaagcagccgggcgugcccgugcgcuggaagcggugaggacuagucccuguucccagagcccacuuuuuuuucuuuuuuugaaauaaaauagccugucuuucagaucucaaaggcucuuuucagagccaccaaaaaaaaaaaaaaaaaaaaaaaaaaaaaaaaaaaaaaaaaaaaaaaaaaaaaaaaaaaaaaaaaaaaaaaaaaaaaaaaaaaaaaaaaaaaaaaaaaaaa

SEQ ID NO: 23293 - RNA, 1748 nt, Artificial Sequence
  mRNA product Design a-1 (hSL-A100) comprising derived and/or modified sequence from LASV(G3010-SLE-2013;Clade IV)__AIT17344__GPCmut2 (opt1)
aggagagucccgcagucggcguccagcggcucugcuuguucgugugugugucguugcaggccuuauucaagcuuaccaugggccagaucgugaccuucuuccaggaggucccccacgugaucgaggaggugaugaacaucguccugaucgcccucagcauccuggccgugcugaaggggcucuacaacuucgcgaccugcggccugguggggcuggucacguuccuccugcugugcggccgcuccugcaccaccagccucuacaaggggguguacgagcugcagacccuggagcucaacauggagacgcugaacaugugcaugccgcuguccugcaccaagaacaacagccaccacuacaucauggugggcaacgagaccggccucgagcugacccugacgaacaccuccaucaucaaccacaaguucugcaaccucagcgacgcccacaagaagaaccuguacaaccacgcccugauguccaucaucagcaccuuccaccucuccauccccaacuucaaccaguacgaggccaugagcugcgacuucaacgggggcaagaucuccguccaguacaaccugagccacuccuacgccggggacgcggccagccacugcggcaccguggccaacggggugcugcagacguucaugcggauggccuggggcggcuccuacaucgcgcucgacagcggguacggcaagugggacugcaucaugaccuccuaccaguaccugaucauccagaacaccaccugggaggaccacugccaguucagccgccccucccccaucggguaccugggccuccugagccagcggacgcgcgacaucuacaucagccggcgccggcgcggcaccuucaccuggacccuguccgacagcgaggggaaggacacgccgggcggguacugccucacccgguggaugcugaucgaggccgagcugaagugcuucggcaacaccgccgucgccaagugcaacgagaagcacgacgaggaguucugcgacaugcuccgccuguucgacuucugcaagcaggccauccagcggcugaagacccccgcgcagauguccauccagcucaucaacaaggccgugaacgcccugaucaacgaccagcugaucaugaagaaccaccuccgcgacaucauggggauccccuacugcaacuacagcaaguacugguaccugaaccacacgaccaccggcaagaccucccugcccaagugcuggcucgugagcaacggcuccuaccugaacgagacgcacuucagcgacgacaucgagcagcaggccgacaacaugaucaccgagaugcugcagaaggaguacauggagcggcaggggaagaccccgcucggccuggucgaccuguucguguucuccaccagcuucuaccugaucuccaucuuccuccaccuggugaagauccccacgcaccgccacaucgucggcaagagcugccccaagccccaccggcugaaccacauggggaucugcuccugcgggcucuacaagcagccgggcgugcccgugcgcuggaagcggugaggacuagucccuguucccagagcccacuuuuuuuucuuuuuuugaaauaaaauagccugucuuucagaucucaaaggcucuuuucagagccaccaaaaaaaaaaaaaaaaaaaaaaaaaaaaaaaaaaaaaaaaaaaaaaaaaaaaaaaaaaaaaaaaaaaaaaaaaaaaaaaaaaaaaaaaaaaaaaaaaaaaa

SEQ ID NO: 23294 - RNA, 1748 nt, Artificial Sequence
  mRNA product Design a-1 (hSL-A100) comprising derived and/or modified sequence from LASV(G502-SLE-2009;Clade IV)__AIT17126__GPCmut2 (opt1)
aggagagucccgcagucggcguccagcggcucugcuuguucgugugugugucguugcaggccuuauucaagcuuaccaugggccagaucgugaccuucuuccaggaggucccccacgugaucgaggaggugaugaacaucguccugaucgcccucagcauccuggccgugcugaaggggcucuacaacuucgcgaccugcggccugguggggcugcucacguuccugcugcucugcggccgcuccugcaccaccgggcuguacaagggcgucuacgagcugcagacccucgagcugaacauggagacgcugaacaugugcaugccgcucagcugcaccaagaacaacucccaccacuacaucauggugggcaacgagaccgggcuggagcugacccucacgaacaccagcaucaucaaccacaaguucugcaaccuguccgacgcccacaagaagaaccuguacgaccacgcccucaugagcaucaucuccaccuuccaccugagcauccccaacuucaaccaguacgaggccauguccugcgacuucaacggcgggaagaucagcgugcaguacaaccugucccacagcuacgccggcgacgcggccgaccacugcgggaccgucgccaacggcgugcuccagacguucaugcggauggccuggggcggguccuacaucgcgcuggacagcggccgcgggcggugggacugcaucaugaccuccuaccaguaccugaucauccagaacaccaccugggaggaccacugccaguucagccgccccucccccaucggcuaccucggccugcugagccagcggacgcgcgacaucuacaucucccggcgccggcgcgggaccuucaccuggacccucagcgacagcgagggcaaggacacgcccgggggcuacugccugacccgguggaugcugaucgaggccgagcucaagugcuucgggaacaccgccguggccaagugcaacgagaagcacgacgaggaguucugcgacaugcugcgccuguucgacuucugcaagcaggccauccagcggcucaaggcgccggcccagauguccauccagcugaucaacaaggccgucaacgcccugaucaacgaccagcucgugaugaagaaccaccuccgcgacaucaugggcauccccuacugcaacuacagccgguacugguaccugaaccacaccacgaccggccgcaccucccugcccaagugcuggcuggugagcaacggguccuaccugaacgagacccacuucagcgacgacaucgagcagcaggccgacaacaugaucacggagaugcuccagaaggaguacauggagcggcagggcaagaccccgcuggggcuggucgaccuguucguguucuccaccagcuucuaccucaucuccaucuuccugcaccuggugaagauccccacccaccgccacaucgucggcaagagcugccccaagccccaccggcucaaccacauggggaucugcuccugcggccuguacaagcagccgggcgugcccgugaaguggaagcgcugaggacuagucccuguucccagagcccacuuuuuuuucuuuuuuugaaauaaaauagccugucuuucagaucucaaaggcucuuuucagagccaccaaaaaaaaaaaaaaaaaaaaaaaaaaaaaaaaaaaaaaaaaaaaaaaaaaaaaaaaaaaaaaaaaaaaaaaaaaaaaaaaaaaaaaaaaaaaaaaaaaaaa

SEQ ID NO: 23295 - RNA, 1748 nt, Artificial Sequence
  mRNA product Design a-1 (hSL-A100) comprising derived and/or modified sequence from LASV(G733-SLE-2010;Clade IV)__AIT17154__GPCmut2 (opt1)
aggagagucccgcagucggcguccagcggcucugcuuguucgugugugugucguugcaggccuuauucaagcuuaccaugggccagaucgugaccuucuuccaggaggucccccacgugaucgaggaggugaugaacaucguccugaucgcccucagcauccuggccgugcugaaggggcucuacaacuucgcgaccugcggcaucguggggcuggucuccuuccugcuccugugcggccgcagcugcacgaccucccuguacaaggggguguacgagcuccagacccuggagcugaacauggagacccucaacaugugcaugccgcugagcugcacgaagaacaacucccaccacuacaucauggugggcaacgagaccggccuggagcucacccugaccaacacgagcaucaucaaccacaaguucugcaaccuguccgacgcccacaagaagaaccucuacgaccacgcccugaugagcaucaucuccaccuuccaccugagcauccccaacuucaaccaguacgaggccauguccugcgacuucaacgggggcaagaucagcguccaguacaaccucucccacagcuacgccggggacgcggccaaccacugcggcaccaucgccaacggggugcugcagaccuucaugcggauggccuggggcggcuccuacaucgcgcuggacagcgggcgcgaccggugggacugcaucaugacguccuaccaguaccucaucauccagaacaccaccugggaggaccacugccaguucagccgccccucccccaucggcuaccuggggcugcucagccagcggacccgcgacaucuacaucagccggcgccggcgcggcacguucaccuggacccuguccgacagcgagggcaaggacacccccgggggcuacugccugacgcgguggaugcucaucgaggccgagcugaagugcuucgggaacaccgccguggccaagugcaacgagaagcacgacgaggaguucugcgacaugcugcgccucuucgacuucugcaagcaggccauccagcggcugaaggcgccggcccagauguccauccagcugaucaacaaggccgucaacgcccucaucaacgaccagcugaucaugaagaaccaccuccgcgacaucaugggcauccccuacugcaacuacagcaaguacugguaccugaaccacaccaccacggggaagaccucccugcccaagugcuggcuggugagcaacggcuccuaccucaacgagacccacuucagcgacgacaucgagcagcaggccgacaacaugaucaccgagaugcugcagaaggaguacauggagcggcagggcaagacgccgcuggggcucguggaccuguucgucuucuccaccagcuucuaccugaucuccaucuuccugcaccucgugaagauccccacccaccgccacguggucggcaagagcugccccaagccccaccggcugaaccacauggggaucugcuccugcggccuguacgggcagccgggcgugcccgugaaguggaagcgcugaggacuagucccuguucccagagcccacuuuuuuuucuuuuuuugaaauaaaauagccugucuuucagaucucaaaggcucuuuucagagccaccaaaaaaaaaaaaaaaaaaaaaaaaaaaaaaaaaaaaaaaaaaaaaaaaaaaaaaaaaaaaaaaaaaaaaaaaaaaaaaaaaaaaaaaaaaaaaaaaaaaaa

SEQ ID NO: 23296 - RNA, 1748 nt, Artificial Sequence
  mRNA product Design a-1 (hSL-A100) comprising derived and/or modified sequence from MOPV/LASV reassortant(IGS-1;Clade IV)__AFY05576__GPCmut2 (opt1)
aggagagucccgcagucggcguccagcggcucugcuuguucgugugugugucguugcaggccuuauucaagcuuaccaugggccagaucgugaccuucuuccaggaggucccccacgugaucgaggaggugaugaacaucguccugaucgcccucagcgugcuggccgugcugaaggggcucuacaacuucgcgaccugcggccuggucgggcuggugacguuccuccugcugugcggccgcuccugcaccaccagccucuacaaggggguguacgagcugcagacccuggagcucaacauggagacgcugaacaugugcaugccgcuguccugcaccaagaacaacagccaccacuacaucauggucggcaacgagaccggccucgagcugacccugacgaacaccuccaucaucaaccacaaguucugcaaccucagcgacgcccacaagaagaaccuguacgaccacgcccugauguccaucaucagcaccuuccaccucuccauccccaacuucaaccaguacgaggccaugagcugcgacuucaacgggggcaagaucuccgugcaguacaaccugagccacuccuacgccggggacgcggccaaccacugcggcaccguggccaacgggguccugcagacguucaugcggauggccuggggcggcagcuacaucgcgcucgacuccgggcgcggcaacugggacugcaucaugaccagcuaccaguaccugaucauccagaacaccaccugggaggaccacugccaguucucccggcccagccccaucggguaccugggccuccugucccagcgcacgcgggacaucuacaucagccgccggcgccggggcaccuucaccuggacccugagcgacuccgagggggaggacacgccgggcggguacugccucacccgcuggaugcugaucgaggccgagcugaagugcuucggcaacaccgccguggccaagugcaacgagaagcacgacgaggaguucugcgacaugcuccggcuguucgacuucugcaagcaggccauccagcgccugaaggcgcccgcccagaugagcauccagcucaucaacaaggccgugaacgcccugaucaacgaccagcugaucaugaagaaccaccuccgggacaucauggggauccccuacugcaacuacuccaaguacugguaccugaaccacaccacgaccggccgcaccagccugcccaagugcuggcucgucuccaacggcagcuaccugaacgagacccacuucuccgacgacaucgagcagcaggccgacaacaugaucacggagaugcugcagaaggaguacauggagcggcaggggaagaccccgcucggccugguggaccuguucguguucagcaccuccuucuaccugaucagcaucuuccuccaccuggucaagauccccacccaccgccacaucguggggaaguccugccccaagccccaccggcugaaccacaugggcaucugcagcugcgggcucuacaagcagccgggcgugcccgucaaguggaagcgcugaggacuagucccuguucccagagcccacuuuuuuuucuuuuuuugaaauaaaauagccugucuuucagaucucaaaggcucuuuucagagccaccaaaaaaaaaaaaaaaaaaaaaaaaaaaaaaaaaaaaaaaaaaaaaaaaaaaaaaaaaaaaaaaaaaaaaaaaaaaaaaaaaaaaaaaaaaaaaaaaaaaaa

SEQ ID NO: 23297 - RNA, 1748 nt, Artificial Sequence
  mRNA product Design a-1 (hSL-A100) comprising derived and/or modified sequence from LASV(LM765-SLE-2012;Clade IV)__AIT17814__GPCmut2 (opt1)
aggagagucccgcagucggcguccagcggcucugcuuguucgugugugugucguugcaggccuuauucaagcuuaccaugggccagaucgugaccuucuuccaggaggucccccacgugaucgaggaggugaugaacaucguccugaucgcccucagcauccuggccgugcugaaggggcucuacaacuucgcgaccugcggccugguggggcuggucacguuccuccugcugugcggccgcuccugcaccaccagccucuacaaggggguguacgagcugcagacccuggagcucaacauggagacgcugaacaugugcaugccgcuguccugcaccaagaacaacagccaccacuacaucauggugggcaacgagaccggccucgagcugacccugacgaacaccuccaucaucgaccacaaguucugcaaccucagcgacgcccaccggaagaaccuguacgaccacgcccugauguccaucaucagcaccuuccaccucuccauccccaacuucaaccaguacgaggccaugagcugcgacuucaacgggggcaagaucuccguccaguacaaccugagccacuccuacgccaaggacgcggccgaccacugcgggaccguggccaacggcgugcugcagacguucaugcgcauggccuggggcgggagcuacaucgcgcucgacuccggccgggggcgcugggacugcaucaugaccagcuaccaguaccugaucauccagaacaccaccugggaggaccacugccaguucucccggcccagccccaucggcuaccuggggcuccugucccagcgcacgcgggacaucuacaucagccgccggcgccggggcaccuucaccuggacccugagcgacuccgagggcaaggacacgcccgggggcuacugccucacccgcuggaugcugaucgaggccgagcugaagugcuucgggaacaccgccgucgccaagugcaacgagaagcacgacgaggaguucugcgacaugcuccggcuguucgacuucugcaagcaggccauccagcgccugaaggcgccggcccagaugagcauccagcucaucaacaaggccgugaacgcccugaucaacgaccagcugaucaugaagaaccaccuccgggacaucaugggcauccccuacugcaacuacuccaaguacugguaccugaaccacaccacgaccgggaagaccagccugcccaagugcuggcucguguccaacggcagcuaccugaacgagacccacuucuccgacgacaucgagcagcaggccgacaacaugaucacggagaugcugcagaaggaguacauggagcgccagggcaagaccccgcucgggcuggucgaccuguucguguucagcaccuccuucuaccugaucagcaucuuccuccaccuggugaagauccccacccaccggcacaucgucggcaagcccugccccaagccgcaccgccugaaccacauggggaucugcuccugcggccucuacaagcagcccggggugcccgugaaguggaagcggugaggacuagucccuguucccagagcccacuuuuuuuucuuuuuuugaaauaaaauagccugucuuucagaucucaaaggcucuuuucagagccaccaaaaaaaaaaaaaaaaaaaaaaaaaaaaaaaaaaaaaaaaaaaaaaaaaaaaaaaaaaaaaaaaaaaaaaaaaaaaaaaaaaaaaaaaaaaaaaaaaaaaa

SEQ ID NO: 23298 - RNA, 1748 nt, Artificial Sequence
  mRNA product Design a-1 (hSL-A100) comprising derived and/or modified sequence from LASV(LM776-SLE-2012;Clade IV)__AIT17824__GPCmut2 (opt1)
aggagagucccgcagucggcguccagcggcucugcuuguucgugugugugucguugcaggccuuauucaagcuuaccaugggccagaucgugaccuucuuccaggaggucccccacgugaucgaggaggugaugaacaucguccugaucgcccucagcauccuggccgugcugaaggggcucuacaacuucgcgaccugcggccugguggggcuggucacguuccuccugcugugcggccgcuccugcaccaccagcguguacaaggggguguacgagcuccagacccuggagcugaacauggagacgcucaacaugugcaugccgcuguccugcaccaagaacaacagccaccacuacaucauggucggcaacgagaccggccuggagcucacccugacgaacaccuccaucaucaaccacaaguucugcaaccugagcgacgcccacaagaagaaccucuacgaccacgcccugauguccaucaucagcaccuuccaccuguccauccccaacuucaaccaguacgaggccaugagcugcgacuucaacgggggcaagaucuccgugcaguacaaccucagccacuccuacgccggggacgcggccaaccacugcggcaccguggccaacgggguccugcagacguucaugcggauggccuggggcggcagcuacaucgcgcuggacuccgggcacggcaagugggacugcaucaugaccagcuaccaguaccucaucauccagaacaccaccugggaggaccacugccaguucucccgccccagccccaucggguaccugggccugcucucccagcggacgcgcgacaucuacaucagccggcgccggcgcggcaccuucaccuggacccugagcgacuccgaggggaaggacacgccgggcggguacugccugacccgguggaugcucaucgaggccgagcugaagugcuucggcaacaccgccguggccaagugcaacgagaagcacgacgaggaguucugcgacaugcugcgccucuucgacuucugcaagcaggccauccagcggcugaaggcgcccgcccagaugagcauccagcugaucaacaaggccgugaacgcccucaucaacgaccagcugaucaugaagaaccaccuccgcgacaucauggggauccccuacugcaacuacuccaaguacugguaccugaaccacaccacgaccggcaagaccagccugcccaagugcuggcuggucuccaacggcagcuaccucaacgagacccacuucuccgacgacaucgagcagcaggccgacaacaugaucacggagaugcugcagaaggaguacauggagcggcaggggaagaccccgcugggccucguggaccuguucguguucagcaccuccuucuaccugaucagcaucuuccugcaccucgucaagauccccacccaccgccacaucguggggaaguccugccccaagccccaccggcugaaccacaugggcaucugcagcugcgggcuguacaagcagccgggcgugcccguccgcuggaagcggugaggacuagucccuguucccagagcccacuuuuuuuucuuuuuuugaaauaaaauagccugucuuucagaucucaaaggcucuuuucagagccaccaaaaaaaaaaaaaaaaaaaaaaaaaaaaaaaaaaaaaaaaaaaaaaaaaaaaaaaaaaaaaaaaaaaaaaaaaaaaaaaaaaaaaaaaaaaaaaaaaaaaa

SEQ ID NO: 23299 - RNA, 1748 nt, Artificial Sequence
  mRNA product Design a-1 (hSL-A100) comprising derived and/or modified sequence from LASV(Mad39;Clade IV)__ANH09722__GPCmut2 (opt1)
aggagagucccgcagucggcguccagcggcucugcuuguucgugugugugucguugcaggccuuauucaagcuuaccaugggccagaucgugaccuucuuccaggaggucccccacgugaucgaggaggugaugaacaucguccugaucgcccucagcauccuggccgugcugaaggggcucuacaacguggcgaccugcggccugaucgggcuggucacguuccuccugcugugcggccgcuccugcaccaccacccucuacaaggggguguacgagcugcaggcccuggagcucaacauggagacgcugaacaugugcaugccgcugagcugcaccaagaacaacucccaccacuacauccgggugggcaacgagaccggccucgagcugacccugacgaacaccagccucaucaaccacaaguucugcaaccuguccgacgcccacaagaagaaccuguacgaccacgcccucaugagcaucaucuccaccuuccaccugagcauccccaacuucaaccaguacgaggccauguccugcgacuucaacgacgggaagaucagcguccaguacaaccugucccacaccuacgcgggcgacacggccaaccacugcgggaccguggccaacggcgugcuccagaccuucaugcgcauggccuggggcgggagcuacaucgcgcuggacuccggccgcgggggcugggacugcaucaugaccagcuaccaguaccugaucauccagaacacgaccugggaggaccacugccaguucucccggcccagccccaucggguaccucggccugcugucccagcggacccgcgacaucuacaucagccggcgccggcgcggcaccuucacguggacccucuccgacagcgaggggaaggacaccccgggcggguacugccugacccgguggaugcugaucgaggccgagcucaagugcuucggcaacacggccgucgccaagugcaacgagaagcacgacgaggaguucugcgacaugcugcgccuguucgacuucugcaagcaggccauccagcggcucaaggcgcccgcccagaugagcauccagcugaucaacaaggccgugaacgcccugaucaacgaccagcucaucaugaagaaccaccuccgcgacaucauggggauccccuacugcaacuacuccaaguacugguaccugaaccacaccgugaccggcaagaccagccugcccaagugcuggcuggucuccaacggcagcuaccugaacgagacgcacuucuccgacgacaucgagcagcaggccgacaacaugaucaccgagaugcuccagaaggaguacauggagcggcaggggaagaccccgcugggccugguggaccuguucguguucagcaccuccuucuaccucaucagcaucuuccugcaccuggucaagauccccacgcaccgccacgugguggggaagcccugccccaagccgcaccggcucaaccacaugggcaucugcuccugcggguucuacaagcagcccggcguccccgugcgcuggaagcggugaggacuagucccuguucccagagcccacuuuuuuuucuuuuuuugaaauaaaauagccugucuuucagaucucaaaggcucuuuucagagccaccaaaaaaaaaaaaaaaaaaaaaaaaaaaaaaaaaaaaaaaaaaaaaaaaaaaaaaaaaaaaaaaaaaaaaaaaaaaaaaaaaaaaaaaaaaaaaaaaaaaaa

SEQ ID NO: 23300 - RNA, 1748 nt, Artificial Sequence
  mRNA product Design a-1 (hSL-A100) comprising derived and/or modified sequence from LASV(Z0947-SLE-2011;Clade IV)__AIT17840__GPCmut2 (opt1)
aggagagucccgcagucggcguccagcggcucugcuuguucgugugugugucguugcaggccuuauucaagcuuaccaugggccagaucgugaccuucuuccaggaggucccccacgugaucgaggaggugaugaacaucguccugaucgcccucagcauccuggccgugcugaaggggcucuacaacuucgcgaccugcggccugguggggcuggucacguuccuccugcugugcggccgcuccugcaccaucagccucuacaaggggguguacgagcugcagacccuggagcucaacauggagacccugaacaugugcaugccgcuguccugcacgaagaacaacagccaccacuacaucauggugggcaacgagaccggccucgagcugacccugaccaacacguccaucaucaaccacaaguucugcaaccucagcgacgcccacaagaagaaccuguacgaccacgcccugauguccaucaucagcaccuuccaccucuccauccccaacuucaaccaguacgaggccaugagcugcgacuucaacgggggcaagaucuccguccaguacaaccugagccacuccuacgccggggacgcggccaaccacugcggcaccguggccaacggggugcugcagaccuucaugcggauggccuggggcggcagcuacaucgcgcucgacuccgggcgcgaccggugggacugcaucaugacgagcuaccaguaccugaucauccagaacaccaccugggaggaccacugccaguucucccgccccagccccaucggcuaccuggggcuccugucccagcggacccgcgacaucuacaucagccggcgccggcgcggcacguucaccuggacccugagcgacuccgagggcaaggacacccccgggggcuacugccucacgcgguggaugcugaucgaggccgagcugaagugcuucgggaacaccgccgucgccaagugcaacgagaagcacgacgaggaguucugcgacaugcuccgccuguucgacuucugcaagcaggccauccagcggcugaaggcgccggcccagaugagcauccagcucaucaacaaggccgugaacgcccugaucaacgaccagcugaucaugaagaaccaccuccgcgacaucaugggcauccccuacugcaacuacuccaaguacugguaccugaaccacaccaccacggggaagaccagccugcccaagugcuggcucguguccaacggcagcuaccugaacgagacccacuucuccgacgacaucgagcagcaggccgacaacaugaucaccgagaugcugcagaaggaguacauggagcggcagggcaagacgccgcucgggcuggucgaccuguucguguucagcaccuccuucuaccugaucagcaucuuccuccaccuggugaagauccccacccaccgccacaucgucggcaagcccugccccaagccgcaccggcugaaccacauggggaucugcuccugcggccucuacaagcagcccggggugcccgugaaguggaagcgcugaggacuagucccuguucccagagcccacuuuuuuuucuuuuuuugaaauaaaauagccugucuuucagaucucaaaggcucuuuucagagccaccaaaaaaaaaaaaaaaaaaaaaaaaaaaaaaaaaaaaaaaaaaaaaaaaaaaaaaaaaaaaaaaaaaaaaaaaaaaaaaaaaaaaaaaaaaaaaaaaaaaaa

SEQ ID NO: 23301 - RNA, 1748 nt, Artificial Sequence
  mRNA product Design a-1 (hSL-A100) comprising derived and/or modified sequence from LASV(Josiah;Clade IV)__NP_694870__GPCmut2 (opt4)
aggagagucccgcagucggcguccagcggcucugcuuguucgugugugugucguugcaggccuuauucaagcuuaccaugggccagaucgugaccuucuuccaggaggugccccacgugaucgaggaggugaugaacaucgugcugaucgcccugagcgugcuggccgugcugaagggccuguacaacuucgccaccugcggccuggugggccuggugaccuuccugcugcugugcggcagaagcugcaccaccagccuguacaagggcguguacgagcugcagacccuggagcugaacauggagacccugaacaugugcaugccccugagcugcaccaagaacaacagccaccacuacaucauggugggcaacgagaccggccuggagcugacccugaccaacaccagcaucaucaaccacaaguucugcaaccugagcgacgcccacaagaagaaccuguacgaccacgcccugaugagcaucaucagcaccuuccaccugagcauccccaacuucaaccaguacgaggccaugagcugcgacuucaacggcggcaagaucagcgugcaguacaaccugagccacagcuacgccggcgacgccgccaaccacugcggcaccguggccaacggcgugcugcagaccuucaugagaauggccuggggcggcagcuacaucgcccuggacagcggcagaggcaacugggacugcaucaugaccagcuaccaguaccugaucauccagaacaccaccugggaggaccacugccaguucagcagacccagccccaucggcuaccugggccugcugagccagagaaccagagacaucuacaucagcagaagaagaagaggcaccuucaccuggacccugagcgacagcgagggcaaggacacccccggcggcuacugccugaccagauggaugcugaucgaggccgagcugaagugcuucggcaacaccgccguggccaagugcaacgagaagcacgacgaggaguucugcgacaugcugagacuguucgacuucugcaagcaggccauccagagacugaaggcccccgcccagaugagcauccagcugaucaacaaggccgugaacgcccugaucaacgaccagcugaucaugaagaaccaccugagagacaucaugggcauccccuacugcaacuacagcaaguacugguaccugaaccacaccaccaccggcagaaccagccugcccaagugcuggcuggugagcaacggcagcuaccugaacgagacccacuucagcgacgacaucgagcagcaggccgacaacaugaucaccgagaugcugcagaaggaguacauggagagacagggcaagaccccccugggccugguggaccuguucguguucagcaccagcuucuaccugaucagcaucuuccugcaccuggugaagauccccacccacagacacaucgugggcaagagcugccccaagccccacagacugaaccacaugggcaucugcagcugcggccuguacaagcagcccggcgugcccgugaaguggaagagaugaggacuagucccuguucccagagcccacuuuuuuuucuuuuuuugaaauaaaauagccugucuuucagaucucaaaggcucuuuucagagccaccaaaaaaaaaaaaaaaaaaaaaaaaaaaaaaaaaaaaaaaaaaaaaaaaaaaaaaaaaaaaaaaaaaaaaaaaaaaaaaaaaaaaaaaaaaaaaaaaaaaaa

SEQ ID NO: 23302 - RNA, 1745 nt, Artificial Sequence
  mRNA product Design a-1 (hSL-A100) comprising derived and/or modified sequence from LASV(LP;Clade I)__AAF86701__GPCmut2 (opt4)
aggagagucccgcagucggcguccagcggcucugcuuguucgugugugugucguugcaggccuuauucaagcuuaccaugggccagaucaucaccuucuuccaggaggugccccacgugaucgaggaggugaugaacaucgugcugaucgcccugagccugcuggccauccugaagggccuguacaacaucgccaccugcggcaucaucggccugguggccuuccuguuccugugcggcaagagcugcagccugacccugaagggcggcuacgagcugcagacccuggagcugaacauggagacccugaacaugugcaugccccugagcugcaccaagaacagcagccaccacuacaucagagugggcaacgagaccggccuggagcugacccugaccaacaccagcaucaucaaccacaaguucugcaaccugagcgacgcccacaagaagaaccuguacgaccacgcccugaugagcaucaucagcaccuuccaccugagcauccccaacuucaaccaguacgaggccaugagcugcgacuucaacggcggcaagaucagcgugcaguacaaccugagccacagcuacgccggcgacgccgccgagcacugcggcaccguggccaacggcgugcugcagaccuucaugagaauggccuggggcggcagauacaucgcccuggacagcggcaagggcaacugggacugcaucaugaccagcuaccaguaccugaucauccagaacaccaccugggaggaccacugccaguucagcagacccagccccaucggcuaccugggccugcugagccagagaaccagagacaucuacaucagcagaagaagaagaggcaccuucaccuggacccugagcgacagcgagggcaacgagacccccggcggcuacugccugaccagauggaugcugaucgaggccgagcugaagugcuucggcaacaccgccguggccaagugcaacgagaagcacgacgaggaguucugcgacaugcugagacuguucgacuucugcaagcaggccaucagaagacugaaggcccccgcccagaugagcauccagcugaucaacaaggccgugaacgcccugaucaacgaccagcugaucaugaagaaccaccugagagacaucaugggcauccccuacugcaacuacagcaaguacugguaccugaaccacaccagcagcggcagaaccagccugcccaagugcuggcugaucagcaacggcagcuaccugaacgagacccaguucagcgacgacaucgagcagcaggccgacaacaugaucaccgagaugcugcagaaggaguacaucgagagacagggcaagaccccccugggccugguggacaucuucaucuucagcaccagcuucuaccugaucagcaucuuccugcaccugaucaagauccccacccacagacacaucgugggcaagcccugccccaagccccacagacugaaccacaugggcgugugcagcugcggccuguacaagcaccccggcgugcccaccaaguggaagagaugaggacuagucccuguucccagagcccacuuuuuuuucuuuuuuugaaauaaaauagccugucuuucagaucucaaaggcucuuuucagagccaccaaaaaaaaaaaaaaaaaaaaaaaaaaaaaaaaaaaaaaaaaaaaaaaaaaaaaaaaaaaaaaaaaaaaaaaaaaaaaaaaaaaaaaaaaaaaaaaaaaaaa

SEQ ID NO: 23303 - RNA, 1745 nt, Artificial Sequence
  mRNA product Design a-1 (hSL-A100) comprising derived and/or modified sequence from LASV(803213;Clade II)__AAF86703__GPCmut2 (opt4)
aggagagucccgcagucggcguccagcggcucugcuuguucgugugugugucguugcaggccuuauucaagcuuaccaugggccagaucaucaccuucuuccaggaggugccccacgugaucgaggaggugaugaacaucgugcugaucgcccugagccugcuggccauccugaagggcaucuacaacguggccaccugcggccuguucggccugaucagcuuccugcugcugugcggcagaagcugcagcgugaccuacaagggcguguacgagcugcagacccuggagcugaacauggccaaccugaacaugugcaugccccugagcugcaccaagaacaacagccaccacuacaucauggugggcaacgagaccggccuggagcugacccugaccaacaccagcaucaucaaccacaaguucugcaaccugagcgacgcccacaagaagaaccuguacgaccacgcccugaugagcaucaucagcaccuuccaccugagcauccccaacuucaaccaguacgaggccaugagcugcgacuucaacggcggcaagaucagcgugcaguacaaccugagccacagcuucgccguggacgccgccaaccacugcggcaccaucgccaacggcgugcugcagaccuucaugagaauggccuggggcggcagcuacaucgcccuggacagcggcaagggcaacugggacugcaucaugaccagcuaccaguaccugaucauccagaacaccaccugggaggaccacugccaguucagcagacccagccccaucggcuaccugggccugcugagccagagaaccagagacaucuacaucagcagaagaagaagaggcaccuucaccuggacccugagcgacagcgagggcaacgaggcccccggcggcuacugccugaccagauggaugcugaucgaggccgagcugaagugcuucggcaacaccgccguggccaagugcaacgagaagcacgacgaggaguucugcgacaugcugagacuguucgacuucugcaagcaggccaucaagagacugaagacccccgcccagaugagcauccagcugaucaacaaggccgugaacgcccugaucaacgaccagcugaucaugaagaaccaccugagagacaucaugggcauccccuacugcaacuacagcagauacugguaccugaaccacaccgugaccggcaagaccagccugcccagaugcuggcuggugagcaacggcagcuaccugaacgagacccacuucagcgacgacaucgagcagcaggccgacaacaugaucaccgagaugcugcagaaggaguacauggacagacagggcaagaccccccugggccugguggaccuguucguguucagcaccagcuucuaccugaucagcaucuuccugcaccuggugaagauccccacccacagacacaucgugggcaagcccugccccaagccccacagacugaaccacaugggcaucugcagcugcggccuguacaagcaccccggcgugcccgugaaguggaagagaugaggacuagucccuguucccagagcccacuuuuuuuucuuuuuuugaaauaaaauagccugucuuucagaucucaaaggcucuuuucagagccaccaaaaaaaaaaaaaaaaaaaaaaaaaaaaaaaaaaaaaaaaaaaaaaaaaaaaaaaaaaaaaaaaaaaaaaaaaaaaaaaaaaaaaaaaaaaaaaaaaaaaa

SEQ ID NO: 23304 - RNA, 1745 nt, Artificial Sequence
  mRNA product Design a-1 (hSL-A100) comprising derived and/or modified sequence from LASV(GA391;Clade III)__CAA36645__GPCmut2 (opt4)
aggagagucccgcagucggcguccagcggcucugcuuguucgugugugugucguugcaggccuuauucaagcuuaccaugggccagaucgugaccuucuuccaggaggugccccacgugaucgaggaggugaugaacaucgugcugaucgcccugagcauccuggccauccugaagggccuguacaacguggccaccugcggccugaucggccuggugaccuuccugcugcugagcggcagaagcugcagccugaucuacaagggcaccuacgagcugcagacccuggagcugaacauggagacccugaacaugugcaugccccugagcugcaccaagaacaacagccaccacuacaucagagugggcaacgagaccggccuggagcugacccugaccaacaccagcauccugaaccacaaguucugcaaccugagcgacgcccacaagagaaaccuguacgaccacagccugaugagcaucaucagcaccuuccaccugagcauccccaacuucaaccaguacgaggccaugagcugcgacuucaacggcggcaagaucaccgugcaguacaaccugagccacagcuucgccguggacgccgccggccacugcggcacccuggccaacggcgugcugcagaccuucaugagaauggccuggggcggcagcuacaucgcccuggacagcggcagaggcaacugggacugcaucaugaccagcuaccaguaccugaucauccagaacaccaccugggacgaccacugccaguucagcagacccagccccaucggcuaccugggccugcugagccagagaaccagagacaucuacaucagcagaagaagaagaggcaccuucaccuggacccugagcgacagcgagggcaacgagacccccggcggcuacugccugaccagauggaugcugaucgaggccgagcugaagugcuucggcaacaccgccguggccaagugcaacgagaagcacgacgaggaguucugcgacaugcugagacuguucgacuucugcaagcaggccaucagaagacugaagacccccgcccagaugagcauccagcugaucaacaaggccgugaacgcccugaucaacgaccagcugaucaugaagaaccaccugagagacaucaugggcauccccuacugcaacuacagcagauacugguaccugaaccacaccagcaccggcaagaccagccugcccagaugcuggcugaucagcaacggcagcuaccugaacgagaccaaguucagcgacgacaucgagcagcaggccgacaacaugaucaccgagaugcugcagaaggaguacaucgacagacagggcaagaccccccugggccugguggaccuguucguguucagcaccagcuucuaccugaucagcaucuuccugcaccuggugaagauccccacccacagacacaucgugggcaagcccugccccaagccccacagacugaaccacaugggcaucugcagcugcggccuguacaagcagcccggcgugcccgugagauggaagagaugaggacuagucccuguucccagagcccacuuuuuuuucuuuuuuugaaauaaaauagccugucuuucagaucucaaaggcucuuuucagagccaccaaaaaaaaaaaaaaaaaaaaaaaaaaaaaaaaaaaaaaaaaaaaaaaaaaaaaaaaaaaaaaaaaaaaaaaaaaaaaaaaaaaaaaaaaaaaaaaaaaaaa

SEQ ID NO: 23305 - RNA, 1748 nt, Artificial Sequence
  mRNA product Design a-1 (hSL-A100) comprising derived and/or modified sequence from LASV(AV;Clade V)__CCA30314__GPCmut2 (opt4)
aggagagucccgcagucggcguccagcggcucugcuuguucgugugugugucguugcaggccuuauucaagcuuaccaugggccagaucgugaccuucuuccaggaggugccccacgugaucgaggaggugaugaacaucgugcugaucgcccugagcauccuggccgugcugaagggccuguacaacaucgccaccugcggccugaucggccugaucaccuuccugcugcugugcggcagaagcugcagcagcaaccuguacaagggcguguacgagcugcagagccuggaccugaacauggagacccugaacaugugcaugccccugagcugcaccaagaacaacagccaccacuacaucagagugggcaacgacaccggccuggagcugacccugaccaacaccagcauccugaaccacaaguucugcaaccugagcgacgcccacaagaaggaccuguacgaccacgcccugaugagcaucaucagcaccuuccaccugagcauccccaacuucaaccaguacgaggccaugagcugcgacuucaacggcggcaagaucagcgugcaguacaaccugagccacagcuacgccaucgacgccgccaaccacugcggcaccguggccaacggcauccugcagaccuucaugagaauggccuggggcggcagcuacaucgcccuggacagcggcagaggcaacugggacugcaucaugaccagcuaccaguaccugaucauccagaacaccaccugggagaaccacugccaguucagcagacccagccccaucggcuaccugggccugcugagccagagaaccagagacaucuacaucagcagaagaagaagaggcaccuucaccuggacccugagcgacagcgagggcaacgccacccccggcggcuacugccugaccagauggaugcugaucgaggccgagcugaagugcuucggcaacaccgccguggccaagugcaacgagaagcacgacgaggaguucugcgacaugcugagacuguucgacuucugcaagcaggccaucagcagacugaagagccccgcccagaugagcauccagcugaucaacaaggccgugaacgcccugaucaacgaccagcugaucaugaagaaccaccugagagacaucaugggcauccccuacugcaacuacagcaaguacugguaccugaaccacaccaucaccggcaagaccagccugcccaagugcuggcuggugagcaacggcagcuaccugaacgagacccacuucagcgacgacaucgagcagcaggccgacaacaugaucaccgagaugcugcagaaggaguacauggagagacagggcaagaccccccugggccugguggaccuguucguguucagcaccagcuucuaccugaucagcaucuuccugagacuggugaagauccccacccacagacacaucgugggcaagcccugccccaagccccacagacugaaccacaugggcaucugcagcugcggccuguacaagcagcccggcgugcccgugagauggaagagaugaggacuagucccuguucccagagcccacuuuuuuuucuuuuuuugaaauaaaauagccugucuuucagaucucaaaggcucuuuucagagccaccaaaaaaaaaaaaaaaaaaaaaaaaaaaaaaaaaaaaaaaaaaaaaaaaaaaaaaaaaaaaaaaaaaaaaaaaaaaaaaaaaaaaaaaaaaaaaaaaaaaaa

SEQ ID NO: 23306 - RNA, 1745 nt, Artificial Sequence
  mRNA product Design a-1 (hSL-A100) comprising derived and/or modified sequence from LASV(Togo/2016/7082;Clade VI)__AMR44577__GPCmut2 (opt4)
aggagagucccgcagucggcguccagcggcucugcuuguucgugugugugucguugcaggccuuauucaagcuuaccaugggccagaucaucaccuucuuccaggaggugccccacgugaucgaggaggugaugaacaucgugcugaucgcccugagccugcuggccauccugaagggcguguacaacguggccaccugcggcaucaucggccuggugaccuuccuguuccugugcggcagaagcugcagccugaucuacaagggcagcuacgagcugcagacccuggagcugaacauggagacccugaacaugugcaugccccugagcugcaccaagaacagcagccaccacuacaucagagugggcaacgagaccggccuggagcugacccugaccaacaccagcaucaucaaccacaaguucugcaaccugagcgacgcccacaagagaaaccuguacgaccacgcccugaugagcauccugagcaccuuccaccugagcauccccaacuucaaccaguacgaggccaugagcugcgacuucaacggcggcaagaucagcgugcaguacaaccugagccacgccuacgccguggacgccgccgagcacugcggcaccguggccaacggcgugcugcagaccuucaugagaauggccuggggcggcagcuacaucgcccuggacagcggcagaggcaacugggacugcaucaugaccagcuaccaguaccugaucauccagaacaccaccugggaggaccacugccaguucagcagacccagccccaucggcuaccugggccugcugagccagagaaccagagacaucuacaucagcagaagaagaagaggcaccuucaccuggacccugagcgacagcgagggcaacgagacccccggcggcuacugccugaccagauggaugcugaucgaggccgagcugaagugcuucggcaacaccgccguggccaagugcaacgagaagcacgacgaggaguucugcgacaugcugagacuguucgacuucugcaagcaggccauccagagacugaagagccccgcccagaugagcauccagcugaucaacaaggccgugaacgcccugaucaacgaccagcugaucaugaagaaccaccugagagacaugaugggcauccccuacugcaacuacagcaaguacugguaccugaaccacaccagcagcggcagaaccagccugcccaagugcuggcuggugagcaacggcagcuaccugaacgagacccacuucagcgacgacaucgagcagcaggccgacaacaugaucaccgagaugcugcagaaggaguacaucgacagacagggcaagaccccccugggccugguggaccuguucguguucagcaccagcuucuaccugaucagcaucuuccugcaccugaucaagauccccacccacagacacaucgugggcaagcccugccccaagccccacagacugaaccacaugggcaucugcagcugcggccuguacaagcagcccggcgugcccaccagauggaagagaugaggacuagucccuguucccagagcccacuuuuuuuucuuuuuuugaaauaaaauagccugucuuucagaucucaaaggcucuuuucagagccaccaaaaaaaaaaaaaaaaaaaaaaaaaaaaaaaaaaaaaaaaaaaaaaaaaaaaaaaaaaaaaaaaaaaaaaaaaaaaaaaaaaaaaaaaaaaaaaaaaaaaa

SEQ ID NO: 23307 - RNA, 1745 nt, Artificial Sequence
  mRNA product Design a-1 (hSL-A100) comprising derived and/or modified sequence from LASV(KAK-428;Clade n.d. (VII))__ANH09740__GPCmut2 (opt4)
aggagagucccgcagucggcguccagcggcucugcuuguucgugugugugucguugcaggccuuauucaagcuuaccaugggccagaucgugaccuucuuccaggaggugccccacgugaucgaggaggugaugaacaucgugcugaucgcccugagccugcuggccauccugaagggccuguacaacuucgccaccugcggcgugaucggccugaucaccuuccugcugcugugcggcagaagcugcagcgccaccuacaagggccaguacgagcugcagacccuggagcugaacauggagagccugaacaugugcaugccccugagcugcaccaagaacaacagccaccacuacaucagagccggcaacaacaccggccuggagcugacccugaccaacaccagcaucaucagccacaaguucugcaaccugagcgacgcccacaagaagaaccuguacgaccacacccugaugagcaucaucaccaccuuccaccugagcauccccaacuucaaccaguacgaggccaugagcugcgacuucaacggcggcaagaucagcauccaguacaaccugagccacagcuacgccggcgacgccgcccagcacugcggcaccguggccaacggcgugcugcagaccuucaugagaauggccuggggcggcagcuaccuggcccuggacagcggcagaagaggcugggacugcaucaucagcagcuaccaguaccugaucauccagaacaccaccugggacgaccacugccaguucagcagacccagccccaucggcuaccugggcuucgugagccagaagaccagagacaucuacaucagcagaagaagaagaggcaccuucaccuggacccugagcgacagcgagggccacgacaugcccggcggcuacugccugaccagauggaugcugaucgaggccgaccugaagugcuucggcaacaccgccguggccaagugcaacgagaagcacgacgaggaguucugcgacauguggagacuguucgacuucugcaagcaggccauccagagacugaaggcccccgcccagaugaacauccagcugaucaacaaggccgugaacgcccugaucaacgaccagcugaugaugaagaaccaccugagagacaucaugggcauccccuacugcaacuacagcaaguucugguaccugaacaacaccaccaccggcagaaccagccugcccagaugcuggcugaucagcaacggcagcuaccugaacgagacccacuucagcgacgacaucgagcagcaggccgacaacaugaucaccgagaugcugcagaaggaguacauggacagacagggcaagaccccccugggccugguggaccuguucguguucagcaccagcuucuaccugaucaccaucuuccugcaccuggugaagauccccacccacagacacaucgugggcaagcccugccccaagccccacagacugaaccacaugggcaucugcagcugcggccuguacaagcagcccggcgugcccgugagauggaagagaugaggacuagucccuguucccagagcccacuuuuuuuucuuuuuuugaaauaaaauagccugucuuucagaucucaaaggcucuuuucagagccaccaaaaaaaaaaaaaaaaaaaaaaaaaaaaaaaaaaaaaaaaaaaaaaaaaaaaaaaaaaaaaaaaaaaaaaaaaaaaaaaaaaaaaaaaaaaaaaaaaaaaa

SEQ ID NO: 23308 - RNA, 1745 nt, Artificial Sequence; identical to SEQ ID NO: 23302
  mRNA product Design a-1 (hSL-A100) comprising derived and/or modified sequence from LASV(Pinneo-NIG-1969;Clade I)__AIT17836__GPCmut2 (opt4)

SEQ ID NO: 23309 - RNA, 1745 nt, Artificial Sequence
  mRNA product Design a-1 (hSL-A100) comprising derived and/or modified sequence from LASV(ISTH0009-NIG-2011;Clade II)__AIT17404__GPCmut2 (opt4)
aggagagucccgcagucggcguccagcggcucugcuuguucgugugugugucguugcaggccuuauucaagcuuaccaugggccagaucaucaccuucuuccaggaggugccccacgugaucgaggaggugaugaacaucgugcugaucgcccugagccugcuggccauccugaagggcaucuacaacguggccaccugcggccuguucggccuggugagcuuccugcugcugugcggcagaagcugcagcaccaccuacaagggcguguacgagcugcagacccuggagcuggacauggccagccugaacaugugcaugccccugagcugcaccaagaacaacagccaccacuacaucauggugggcaacgagaccggccuggagcugacccugaccaacaccagcaucaucaaccacaaguucugcaaccugagcgacgcccacaagaagaaccuguacgaccacgcccugaugagcaucaucagcaccuuccaccugagcauccccaacuucaaccaguacgaggccaugagcugcgacuucaacggcggcaagaucagcgugcaguacaaccugagccacgccuacgccguggacgccgccaaccacugcggcaccaucgccaacggcgugcugcagaccuucaugagaauggccuggggcggcagcuacaucgcccuggacagcggcaagggcagcugggacugcaucaugaccagcuaccaguaccugaucauccagaacaccaccugggaggaccacugccaguucagcagacccagccccaucggcuaccugggccugcugagccagagaaccagagacaucuacaucagcagaagaagaagaggcaccuucaccuggacccugagcgacagcgagggcaacgagacccccggcggcuacugccugaccagauggaugcugaucgaggccgagcugaagugcuucggcaacaccgccguggccaagugcaacgagaagcacgacgaggaguucugcgacaugcugagacuguucgacuucugcaagcaggccaucagaagacugaagacccccgcccagaugagcauccagcugaucaacaaggccgugaacgcccugaucaacgaccagcugaucaugaagaaccaccugagagacaucaugggcauccccuacugcaacuacagcaaguacugguaccugaaccacaccgugaccggcaagaccagccugcccagaugcuggcuggugagcaacggcagcuaccugaacgagacccacuucagcgacgacaucgagcagcaggccgacaacaugaucaccgagcugcugcagaaggaguacauggacagacagggcaagaccccccugggccugguggaccuguucguguucagcaccagcuucuaccugaucagcaucuuccugcaccugaucaagauccccacccacagacacaucaccggcaagcccugccccaagccccacagacugaaccacaugggcaucugcagcugcggccuguacaagcaccccggcgugcccgugaaguggaagagaugaggacuagucccuguucccagagcccacuuuuuuuucuuuuuuugaaauaaaauagccugucuuucagaucucaaaggcucuuuucagagccaccaaaaaaaaaaaaaaaaaaaaaaaaaaaaaaaaaaaaaaaaaaaaaaaaaaaaaaaaaaaaaaaaaaaaaaaaaaaaaaaaaaaaaaaaaaaaaaaaaaaaa

SEQ ID NO: 23310 - RNA, 1745 nt, Artificial Sequence
  mRNA product Design a-1 (hSL-A100) comprising derived and/or modified sequence from LASV(ISTH2010-NIG-2012;Clade II)__AIT17482__GPCmut2 (opt4)
aggagagucccgcagucggcguccagcggcucugcuuguucgugugugugucguugcaggccuuauucaagcuuaccaugggccagaucaucaccuucuuccaggaggugccccacgugaucgaggaggugaugaacaucgugcugaucgcccugagccugcuggccauccugaagggcaucuacaacguggccaccugcggccuguucggccuggugagcuuccugcugcugugcggcagaagcugcagcaccaccuacaagggcguguacgagcugcagacccuggagcuggacauggccagccugaacaugugcaugccccugagcugcaccaagaacaacagccaccacuacaucauggugggcaacgagaccggccuggagcugacccugaccaacaccagcaucaucaaccacaaguucugcaaccugagcgacgcccacaagaagaaccuguacgaccacgcccugaugagcaucaucagcaccuuccaccugagcauccccaacuucaaccaguacgaggccaugagcugcgacuucaacggcggcaagaucagcgugcaguacaaccugagccacgccuacgccguggacgccgccaaccacugcggcaccaucgccaacggcgugcugcagaccuucaugagaauggccuggggcggcagcuacaucgcccuggacagcggcaagggcagcugggacugcaucaugaccagcuaccaguaccugaucauccagaacaucaccugggaggaccacugccaguucagcagacccagccccaucggcuaccugggccugcugagccagagaaccagagacaucuacaucagcagaagaagaagaggcaccuucaccuggacccugagcgacagcgagggcaacgagacccccggcggcuacugccugaccagauggaugcugaucgaggccgagcugaagugcuucggcaacaccgccguggccaagugcaacgagaagcacgacgaggaguucugcgacaugcugagacuguucgacuucugcaagcaggccaucagaagacugaagacccccgcccagaugagcauccagcugaucaacaaggccgugaacgcccugaucaacgaccagcugaucaugaagaaccaccugagagacaucaugggcauccccuacugcaacuacagcaaguacugguaccugaaccacaccgugaccggcaagaccagccugcccagaugcuggcuggugagcaacggcagcuaccugaacgagacccacuucagcgacgacaucgagcagcaggccgacaacaugaucaccgagcugcugcagaaggaguacaucgacagacagggcaagaccccccugggccugguggaccuguucguguucagcaccagcuucuaccugaucagcaucuuccugcaccuggugaagauccccacccacagacacguggugggcaagcccugccccaagccccacagacugaaccacaugggcaucugcagcugcggccuguacaagcaccccggcgugcccgugaaguggaagagaugaggacuagucccuguucccagagcccacuuuuuuuucuuuuuuugaaauaaaauagccugucuuucagaucucaaaggcucuuuucagagccaccaaaaaaaaaaaaaaaaaaaaaaaaaaaaaaaaaaaaaaaaaaaaaaaaaaaaaaaaaaaaaaaaaaaaaaaaaaaaaaaaaaaaaaaaaaaaaaaaaaaaa

SEQ ID NO: 23311 - RNA, 1745 nt, Artificial Sequence
  mRNA product Design a-1 (hSL-A100) comprising derived and/or modified sequence from LASV(Lassa virus/H.sapiens-wt/NGA/2015/ISTH_0543;Clade II)__AVO03639__GPCmut2 (opt4)
aggagagucccgcagucggcguccagcggcucugcuuguucgugugugugucguugcaggccuuauucaagcuuaccaugggccagaucaucaccuucuuccaggaggugccccacgugaucgaggaggugaugaacaucgugcugaucgcccugagccugcuggccauccugaagggcaucuacaacguggccaccugcggccuguucggccuggugagcuuccugcugcugugcggcagaagcugcagcaccaccuacaagggcguguacgagcugcagacccuggagcuggacauggccaaccugaacaugugcaugccccugagcugcaccaagaacaacagccaccacuacaucauggugggcaacgagaccggccuggagcugacccugaccaacaccagcaucaucaaccacaaguucugcaaccugagcgacgcccacaagaagaaccuguacgaccacgcccugaugagcaucaucagcaccuuccaccugagcauccccaacuucaaccaguacgaggccaugagcugcgacuucaacggcggcaagaucagcgugcaguacaaccugagccacaccuacgccguggacgccgccaaccacugcggcaccaucgccaacggcgugcugcagaccuucaugagaauggccuggggcggcagcuacaucgcccuggacagcggcaagggcagcugggacugcaucaugaccagcuaccaguaccuggugauccagaacaccaccugggaggaccacugccaguucagcagacccagccccaucggcuaccugggccugcugagccagagaaccagagacaucuacaucagcagaagaagaagaggcaccuucaccuggacccugagcgacagcgagggcaacgagacccccggcggcuacugccugaccagauggaugcugaucgaggccgagcugaagugcuucggcaacaccgccguggccaagugcaacgagaagcacgacgaggaguucugcgacaugcugagacuguucgacuucugcaagcaggccaucagaagacugaagacccccgcccagaugagcauccagcugaucaacaaggccgugaacgcccugaucaacgaccagcugaucaugaagaaccaccugagagacaucaugggcauccccuacugcaacuacagcaaguacugguaccugaaccacaccgugaccggcaagaccagccugcccagaugcuggcuggugagcaacggcagcuaccugaacgagacccacuucagcgacgacaucgagcagcaggccgacaacaugaucaccgagcugcugcagaaggaguacaucgacagacagggcaagaccccccugggccugguggaccuguucguguucagcaccagcuucuaccugaucagcaucuuccugcaccuggugaagauccccacccacagacacaucaccggcaagcccugccccaagccccacagacugaaccacaugggcaucugcagcugcggccuguacaagcaccccggcgugcccgugaaguggaagagaugaggacuagucccuguucccagagcccacuuuuuuuucuuuuuuugaaauaaaauagccugucuuucagaucucaaaggcucuuuucagagccaccaaaaaaaaaaaaaaaaaaaaaaaaaaaaaaaaaaaaaaaaaaaaaaaaaaaaaaaaaaaaaaaaaaaaaaaaaaaaaaaaaaaaaaaaaaaaaaaaaaaaa

SEQ ID NO: 23312 - RNA, 1745 nt, Artificial Sequence
  mRNA product Design a-1 (hSL-A100) comprising derived and/or modified sequence from LASV(Lassa virus/H.sapiens-wt/NGA/2016/ISTH_0009;Clade II)__AVO03571__GPCmut2 (opt4)
aggagagucccgcagucggcguccagcggcucugcuuguucgugugugugucguugcaggccuuauucaagcuuaccaugggccagaucaucaccuucuuccaggaggugccccacgugaucgaggaggugaugaacaucgugcugaucgcccugagccugcuggccauccugaagggcaucuacaacguggccaccugcggccugcugggccuggugagcuuccugcugcugugcggcagaagcugcagcaccaccuacaagggcguguacgagcugcagacccuggagcuggacauggccagccugaacaugugcaugccccugagcugcaccaagaacaacagccaccacuacaucauggugggcaacgagaccggccuggagcugacccugaccaacaccagcaucaucaaccacaaguucugcaaccugagcgacgcccacaagaagaaccuguacgaccacgcccugaugagcaucaucagcaccuuccaccugagcauccccaacuucaaccaguacgaggccaugagcugcgacuucaacggcggcagaaucagcgugcaguacaaccugagccacagcuacgccguggacgccgccaaccacugcggcaccaucgccaacggcgugcugcagaccuucaugagaauggccuggggcggcagcuacaucgcccuggacagcggcaagggcagcugggacugcaucaugaccagcuaccaguaccugaucauccagaacaccaccugggaggaccacugccaguucagcagacccagccccaucggcuaccugggccugcugagccagagaaccagagacaucuacaucagcagaagaagaagaggcaccuucaccuggacccugagcgacagcgagggcaacgagacccccggcggcuacugccugaccagauggaugcugaucgaggccgagcugaagugcuucggcaacaccgccguggccaagugcaacgagaagcacgacgaggaguucugcgacaugcugagacuguucgacuucugcaagcaggccaucagaagacugaagacccccgcccagaugagcauccagcugaucaacaaggccgugaacgcccugaucaacgaccagcugaucaugaagaaccaccugagagacaucaugggcauccccuacugcaacuacagcaaguacugguaccugaaccacaccgugaccggcaagaccagccugcccagaugcuggcuggugagcaacggcagcuaccugaacgagacccacuucagcgacgacaucgagcagcaggccgacaacaugaucaccgagcugcugcagaaggaguacaucgacagacagggcaagaccccccugggccugguggaccuguucguguucagcaccagcuucuaccugaucagcaucuuccugcaccuggugaagauccccacccacagacacaucaccggcaagcccugccccaagccccacagacugaaccacaugggcaucugcagcugcggccuguacaaccaccccggcgugcccgugaaguggaagagaugaggacuagucccuguucccagagcccacuuuuuuuucuuuuuuugaaauaaaauagccugucuuucagaucucaaaggcucuuuucagagccaccaaaaaaaaaaaaaaaaaaaaaaaaaaaaaaaaaaaaaaaaaaaaaaaaaaaaaaaaaaaaaaaaaaaaaaaaaaaaaaaaaaaaaaaaaaaaaaaaaaaaa

SEQ ID NO: 23313 - RNA, 1745 nt, Artificial Sequence
  mRNA product Design a-1 (hSL-A100) comprising derived and/or modified sequence from LASV(Lassa virus/H.sapiens-wt/NGA/2016/ISTH_0017;Clade II)__AVO03567__GPCmut2 (opt4)
aggagagucccgcagucggcguccagcggcucugcuuguucgugugugugucguugcaggccuuauucaagcuuaccaugggccagaucaucaccuucuuccaggaggugccccacgugaucgaggaggugaugaacaucgugcugaucgcccugagccugcuggccauccugaagggcaucuacaacguggccaccugcggccuguucggccuggugagcuuccugcugcugugcggcagaagcugcagcaccaccuacaagggcguguacgagcugcagacccuggagcuggacauggccagccugaacaugugcaugccccugagcugcaccaagaacaacagccaccacuacaucauggugggcaacgagaccggccuggagcugacccugaccaacaccagcaucaucaaccacaaguucugcaaccugagcgacgcccacaagaagaaccuguacgaccacgcccugaugagcaucaucagcaccuuccaccugagcauccccaacuucaaccaguacgaggccaugagcugcgacuucaacggcggcaagaucagcgugcaguacaaccugagccacaccuacgccaucgacgccgccaaccacugcggcaccaucgccaacggcgugcugcagaccuucaugagaauggccuggggcggcagcuacaucgcccuggacagcggcaagggcagcugggacugcaucaugaccagcuaccaguaccugaucauccagaacaccaccugggaggaccacugccaguucagcagacccagccccaucggcuaccugggccugcugagccagagaaccagagacaucuacaucagcagaagaagaagaggcaccuucaccuggacccugagcgacagcgagggcaacgagacccccggcggcuacugccugaccagauggaugcugaucgaggccgagcugaagugcuucggcaacaccgccguggccaagugcaacgagaagcacgacgaggaguucugcgacaugcugagacuguucgacuucugcaagcaggccaucagaagacugaagacccccgcccagaugagcauccagcugaucaacaaggccgugaacgcccugaucaacgaccagcugaucaugaagaaccaccugagagacaucaugggcauccccuacugcaacuacagcaaguacugguaccugaaccacaccgugaccggcaagaccagccugcccagaugcuggcuggugagcaacggcagcuaccugaacgagacccacuucagcgacgacaucgagcagcaggccgacaacaugaucaccgagcugcugcagaaggaguacauggacagacagggcaagaccccccugggccugguggaccuguucguguucagcaccagcuucuaccugaucagcaucuuccugcaccuggugagaauccccacccacagacacgugaucggcaagcccugccccaagccccacagacugaaccacaugggcaucugcagcugcggccuguacaagcaccccggcgugcccgugaaguggaagagaugaggacuagucccuguucccagagcccacuuuuuuuucuuuuuuugaaauaaaauagccugucuuucagaucucaaaggcucuuuucagagccaccaaaaaaaaaaaaaaaaaaaaaaaaaaaaaaaaaaaaaaaaaaaaaaaaaaaaaaaaaaaaaaaaaaaaaaaaaaaaaaaaaaaaaaaaaaaaaaaaaaaaa

SEQ ID NO: 23314 - RNA, 1745 nt, Artificial Sequence
  mRNA product Design a-1 (hSL-A100) comprising derived and/or modified sequence from LASV(Lassa virus/H.sapiens-wt/NGA/2018/ISTH_0959;Clade II)__AVV65099__GPCmut2 (opt4)
aggagagucccgcagucggcguccagcggcucugcuuguucgugugugugucguugcaggccuuauucaagcuuaccaugggccagaucaucaccuucuuccaggaggugccccacgugaucgaggaggugaugaacaucgugcugaucgcccugagccugcuggccauccugaagggcaucuacaacguggugaccugcggccuguucggccuggugagcuuccugcugcugugcggcagaagcugcagcaccaccuacaagggcguguacgagcugcagacccuggagcuggacauggccagccugaacaugugcaugccccugagcugcaccaagaacaacagccaccacuacaucauggugggcaacgagaccggccuggagcugacccugaccaacaccagcaucaucaaccacaaguucugcaaccugagcgacgcccacaagaagaaccuguacgaccacgcccugaugagcaucaucagcaccuuccaccugagcauccccaacuucaaccaguacgaggccaugagcugcgacuucaacggcggcaagaucagcgugcaguacaaccugagccacgccuacgccaucgacgccgccaaccacugcggcaccaucgccaacggcgugcugcagaccuucaugagaauggccuggggcggcagcuacaucgcccuggacagcggcaagggcagcugggacugcaucaugaccagcuaccaguaccugaucauccagaacaccaccugggaggaccacugccaguucagcagacccagccccaucggcuaccugggccugcugagccagagaaccagagacaucuacaucagcagaagaagaagaggcaccuucaccuggacccugagcgacagcgagggcaacgagacccccggcggcuacugccugaccagauggaugcugaucgaggccgagcugaagugcuucggcaacaccgccguggccaagugcaacgagaagcacgacgaggaguucugcgacaugcugagacuguucgacuucugcaagcaggccaucagaagacugaagacccccgcccagaugagcauccagcugaucaacaaggccgugaacgcccugaucaacgaccagcugaucaugaagaaccaccugagagacaucaugggcauccccuacugcaacuacagcaaguacugguaccugaaccacaccgugaccggcaagaccagccugcccagaugcuggcuggugagcaacggcagcuaccugaacgagacccacuucagcgacgacaucgagcagcaggccgacaacaugaucaccgagcugcugcagaaggaguacaucgacagacagggcaagaccccccugggccugguggaccuguucguguucagcaccagcuucuaccugaucagcaucuuccugcaccuggugaagauccccacccacagacacgugaucggcaagcccugccccaagccccacagacugaaccacaugggcaucugcagcugcggccuguacaagcaccccggcgugcccgugaaguggaagagaugaggacuagucccuguucccagagcccacuuuuuuuucuuuuuuugaaauaaaauagccugucuuucagaucucaaaggcucuuuucagagccaccaaaaaaaaaaaaaaaaaaaaaaaaaaaaaaaaaaaaaaaaaaaaaaaaaaaaaaaaaaaaaaaaaaaaaaaaaaaaaaaaaaaaaaaaaaaaaaaaaaaaa

SEQ ID NO: 23315 - RNA, 1745 nt, Artificial Sequence
  mRNA product Design a-1 (hSL-A100) comprising derived and/or modified sequence from LASV(LASV003-NIG-2008;Clade II)__AIT17580__GPCmut2 (opt4)
aggagagucccgcagucggcguccagcggcucugcuuguucgugugugugucguugcaggccuuauucaagcuuaccaugggccagaucaucaccuucuuccaggaggugccccacgugaucgaggaggugaugaacaucgugcugaucgcccugagccugcuggccauccugaagggcaucuacaacguggccaccugcggccuguucggccuggugagcuuccugcugcugugcggcagaagcugcagcaccaccuacaagggcguguacgagcugcagacccuggagcuggacauggccagccugaacaugugcaugccccugagcugcaccaagaacaacagccaccacuacaucauggugggcaacgagaccggccuggagcugacccugaccaacaccagcaucaucaaccacaaguucugcaaccugagcgacgcccacaagaagaaccuguacgaccacgcccugaugagcaucaucagcaccuuccaccugagcauccccaacuucaaccaguacgaggccaugagcugcgacuucaacggcggcaagaucagcgugcaguacaaccugagccacaccuacgccguggacgccgccaaccacugcggcaccaucgccaacggcgugcugcagaccuucaugagaauggccuggggcggcagcuacaucgcccuggacagcggcaagggcagcugggacugcaucaugaccagcuaccaguaccugaucauccagaacaccaccugggaggaccacugccaguucagcagacccagccccaucggcuaccugggccugcugagccagagaaccagagacaucuacaucagcagaagaagaagaggcaccuucaccuggacccugagcgacagcgagagcaacgagacccccggcggcuacugccugaccagauggaugcugaucgaggccgagcugaagugcuucggcaacaccgccguggccaagugcaacgagaagcacgacgaggaguucugcgacaugcugagacuguucgacuucugcaagcaggccaucagaagacugaaggcccccgcccagaugagcauccagcugaucaacaaggccgugaacgcccugaucaacgaccagcugaucaugaagaaccaccugagagacaucaugggcauccccuacugcaacuacagcaaguacugguaccugaaccacaccgugaccggcagaaccagccugcccagaugcuggcuggugagcaacggcagcuaccugaacgagacccacuucagcgacgacaucgagcagcaggccgacaacaugaucaccgagcugcugcagaaggaguacauggacagacagggcaagaccccccugggccugguggaccuguucguguucagcaccagcuucuaccugaucagcaucuuccugcaccuggugaagauccccacccacagacacgugaucggcaagcccugccccaagccccacagacugaaccacaugggcaucugcagcugcggccuguacaagcaccccggcgugcccgugaaguggaagagaugaggacuagucccuguucccagagcccacuuuuuuuucuuuuuuugaaauaaaauagccugucuuucagaucucaaaggcucuuuucagagccaccaaaaaaaaaaaaaaaaaaaaaaaaaaaaaaaaaaaaaaaaaaaaaaaaaaaaaaaaaaaaaaaaaaaaaaaaaaaaaaaaaaaaaaaaaaaaaaaaaaaaa

SEQ ID NO: 23316 - RNA, 1745 nt, Artificial Sequence
  mRNA product Design a-1 (hSL-A100) comprising derived and/or modified sequence from LASV(LASV035-NIG-2009;Clade II)__AIT17588__GPCmut2 (opt4)
aggagagucccgcagucggcguccagcggcucugcuuguucgugugugugucguugcaggccuuauucaagcuuaccaugggccagaucaucaccuucuuccaggaggugccccacgugaucgaggaggugaugaacaucgugcugaucgcccugagccugcuggccauccugaagggcaucuacaacguggccaccugcggccuguucggccuggugagcuuccugcugcugugcggcagaagcugcagcaccaccuacaagggcguguacgagcugcagacccuggagcuggacauggccagccugaacaugugcaugccccugagcugcaccaagaacaacagccaccacuacaucauggugggcaacgagaccggccuggagcugacccugaccaacaccagcaucaucaaccacaaguucugcaaccugagcgacgcccacaagaagaaccuguacgaccacgcccugaugagcaucaucagcaccuuccaccugagcauccccaacuucaaccaguacgaggccaugagcugcgacuucaacggcggcaagaucagcgugcaguacaaccugagccacgccuacgccguggacgccgccaaccacugcggcaccaucgccaacggcgugcugcagaccuucaugagaauggccuggggcggcagcuacaucgcccuggacagcggcaagggcagcugggacugcaucaugaccagcuaccaguaccugaucauccagaacaccaccugggaggaccacugccaguucagcagacccagccccaucggcuaccugggccugcugagccagagaaccagagacaucuacaucagcagaagaagaagaggcaccuucaccuggacccugagcgacagcgagggcaacgagacccccggcggcuacugccugaccagauggaugcugaucgaggccgagcugaagugcuucggcaacaccgccguggccaagugcaacgagaagcacgacgaggaguucugcgacaugcugagacuguucgacuucugcaagcaggccaucagaagacugaaggcccccgcccagaugagcauccagcugaucaacaaggccgugaacgcccugaucaacgaccagcugaucaugaagaaccaccugagagacaucaugggcauccccuacugcaacuacagcaaguacugguaccugaaccacaccgugaccggcaagaccagccugcccagaugcuggcuggugagcaacggcagcuaccugaacgagacccacuucagcgacgacaucgagcagcaggccgacaacaugaucaccgagcugcugcagaaggaguacaucgacagacagggcaagaccccccugggccugguggaccuguucguguucagcaccagcuucuaccugaucagcaucuuccugcaccuggugaagauccccacccacagacacgugaucggcaagcccugccccaagccccacagacugaaccacaugggcaucugcagcugcggccuguacaagcaccccggcgugcccgugaaguggaagagaugaggacuagucccuguucccagagcccacuuuuuuuucuuuuuuugaaauaaaauagccugucuuucagaucucaaaggcucuuuucagagccaccaaaaaaaaaaaaaaaaaaaaaaaaaaaaaaaaaaaaaaaaaaaaaaaaaaaaaaaaaaaaaaaaaaaaaaaaaaaaaaaaaaaaaaaaaaaaaaaaaaaaa

SEQ ID NO: 23317 - RNA, 1745 nt, Artificial Sequence
  mRNA product Design a-1 (hSL-A100) comprising derived and/or modified sequence from LASV(LASV1000-NIG-2009;Clade II)__AIT17782__GPCmut2 (opt4)
aggagagucccgcagucggcguccagcggcucugcuuguucgugugugugucguugcaggccuuauucaagcuuaccaugggccagaucaucaccuucuuccaggaggugccccacgugaucgaggaggugaugaacaucgugcugaucgcccugagccugcuggccauccugaagggcaucuacaacguggccaccugcggccuguucggccuggugagcuuccugcugcugugcggcagaagcugcagcaccaccuacaagggcguguacgagcugcagacccuggagcuggacauggccagccugaacaugugcaugccccugagcugcaccaagaacaacagccaccacuacaucauggugggcaacgagaccggccuggagcugacccugaccaacaccagcaucaucaaccacaaguucugcaaccugagcgacgcccacaagaagaaccuguacgaccacgcccugaugagcaucaucagcaccuuccaccugagcauccccaacuucaaccaguacgaggccaugagcugcgacuucaacggcggcaagaucagcgugcaguacaaccugagccacaccuacgccguggacgccgccaaccacugcggcaccaucgccaacggcgugcugcagaccuucaugagaauggccuggggcggcagcuacaucgcccuggacagcggcaagggcagcugggacugcaucaugaccagcuaccaguaccugaucauccagaacaccaccugggaggaccacugccaguucagcagacccagccccaucggcuaccugggccugcugagccagagaaccagagacaucuacaucagcagaagaagaagaggcaccuucaccuggacccugagcgacagcgagggcaacgagacccccggcggcuacugccugaccagauggaugcugaucgaggccgagcugaagugcuucggcaacaccgccguggccaagugcaacgagaagcacgacgaggaguucugcgacaugcugagacuguucgacuucugcaagcaggccaucaagagacugaagacccccgcccagaugagcauccagcugaucaacaaggccgugaacgcccugaucaacgaccagcugaucaugaagaaccaccugagagacaucaugggcauccccuacugcaacuacagcaaguacugguaccugaaccacaccgugaccggcaagaccagccugcccagaugcuggcuggugagcaacggcagcuaccugaacgagacccacuucagcgacgacaucgagcagcaggccgacaacaugaucaccgagcugcugcagaaggaguacaucgacagacagggcaagaccccccugggccugguggaccuguucguguucagcaccagcuucuaccugaucagcaucuuccugcaccuggugaagauccccacccacagacacguggugggcaagcccugccccaagccccacagacugaaccacaugggcaucugcagcugcggccuguacaagcaccccggcgugcccgugaaguggaagagaugaggacuagucccuguucccagagcccacuuuuuuuucuuuuuuugaaauaaaauagccugucuuucagaucucaaaggcucuuuucagagccaccaaaaaaaaaaaaaaaaaaaaaaaaaaaaaaaaaaaaaaaaaaaaaaaaaaaaaaaaaaaaaaaaaaaaaaaaaaaaaaaaaaaaaaaaaaaaaaaaaaaaa

SEQ ID NO: 23318 - RNA, 1745 nt, Artificial Sequence
  mRNA product Design a-1 (hSL-A100) comprising derived and/or modified sequence from LASV(LASV221-NIG-2010;Clade II)__AIT17624__GPCmut2 (opt4)
aggagagucccgcagucggcguccagcggcucugcuuguucgugugugugucguugcaggccuuauucaagcuuaccaugggccagaucaucaccuucuuccaggaggugccccacgugaucgaggaggugaugaacaucgugcugaucgcccugagccugcuggccauccugaagggcaucuacaacguggccaccugcggccuguucggccuggugagcuuccugcugcugugcggcagaagcugcagcaccaccuacaagggcguguacgagcugcagacccuggagcuggacauggccagccugaacaugugcaugccccugagcugcaccaagaacaacagccaccacuacaucauggugggcaacgagaccggccuggagcugacccugaccaacaccagcaucaucaaccacaaguucugcaaccugagcgacgcccacaagaagaaccuguacgaccacgcccugaugagcaucaucagcaccuuccaccugagcauccccaacuucaaccaguacgaggccaugagcugcgacuucaacggcggcaagaucagcgugcaguacaaccugagccacaccuacgccaucgacgccgccaaccacugcggcaccaucgccaacggcgugcugcagaccuucaugagaauggccuggggcggcagcuacaucgcccuggacagcggcaagggcagcugggacugcaucaugaccagcuaccaguaccugaucauccagaacaccaccugggaggaccacugccaguucagcagacccagccccaucggcuaccugggccugcugagccagagaaccagagacaucuacaucagcagaagaagaagaggcaccuucaccuggacccugagcgacagcgagggcaacgagacccccggcggcuacugccugaccagauggaugcugaucgaggccgagcugaagugcuucggcaacaccgccguggccaagugcaacgagaagcacgacgaggaguucugcgacaugcugagacuguucgacuucugcaagcaggccaucagaagacugaagacccccgcccagaugagcauccagcugaucaacaaggccgugaacgcccugaucaacgaccagcugaucaugaagaaccaccugagagacaucaugggcauccccuacugcaacuacagcaaguacugguaccugaaccacaccgugaccggcaagaccagccugcccagaugcuggcuggugagcaacggcagcuaccugaacgagacccacuucagcgacgacaucgagcagcaggccgacaacaugaucaccgagaugcugcagaaggaguacauggacagacagggcaagaccccccugggccugguggaccuguucguguucagcaccagcuucuaccugaucagcaucuuccugcaccuggugaagauccccacccacagacacgugaucggcaagcccugccccaagccccacagacugaaccacaugggcaucugcagcugcggccuguacaagcaccccggcgugcccgugaaguggaagagaugaggacuagucccuguucccagagcccacuuuuuuuucuuuuuuugaaauaaaauagccugucuuucagaucucaaaggcucuuuucagagccaccaaaaaaaaaaaaaaaaaaaaaaaaaaaaaaaaaaaaaaaaaaaaaaaaaaaaaaaaaaaaaaaaaaaaaaaaaaaaaaaaaaaaaaaaaaaaaaaaaaaaa

SEQ ID NO: 23319 - RNA, 1745 nt, Artificial Sequence
  mRNA product Design a-1 (hSL-A100) comprising derived and/or modified sequence from LASV(LASV237-NIG-2010;Clade II)__AIT17638__GPCmut2 (opt4)
aggagagucccgcagucggcguccagcggcucugcuuguucgugugugugucguugcaggccuuauucaagcuuaccaugggccagaucaucaccuucuuccaggaggugccccacgugaucgaggaggugaugaacaucgugcugaucgcccugagccugcuggccauccugaagggcaucuacaacguggccaccugcggccuguucggccuggugagcuuccugcugcugugcggcagaagcugcagcaccaccuacaagggcguguacgagcugcagacccuggagcuggacauggccagccugaacaugugcaugccccugagcugcaccaagaacaacagccaccacuacaucauggugggcaacgagaccggccuggagcugacccugaccaacaccagcaucaucaaccacaaguucugcaaccugagcgacgcccacaagaaggaccuguacgaccacgcccugaugagcaucaucagcaccuuccaccugagcauccccaacuucaaccaguacgaggccaugagcugcgacuucaacggcggcaagaucagcgugcaguacaaccugagccacaccuacgccguggacgccgccaaccacugcggcaccaucgccaacggcgugcugcagaccuucaugagaauggccuggggcggcagcuacaucgcccuggacagcggcaagggcagcugggacugcaucaugaccagcuaccaguaccugaucauccagaacaccaccugggaggaccacugccaguucagcagacccagccccaucggcuaccugggccugcugagccagagaaccagagacaucuacaucagcagaagaagaagaggcaccuucaccuggacccugagcgacagcgagggcaacgagacccccggcggcuacugccugaccagauggaugcugaucgaggccgagcugaagugcuucggcaacaccgccguggccaagugcaacgagaagcacgacgaggaguucugcgacaugcugagacuguucgacuucugcaagcaggccaucagaagacugaagacccccgcccagaugagcauccagcugaucaacaaggccgugaacgcccugaucaacgaccagcugaucaugaagaaccaccugagagacaucaugggcauccccuacugcaacuacagcaaguacugguaccugaaccacaccgugaccggcaagaccagccugcccagaugcuggcuggugagcaacggcagcuaccugaacgagacccacuucagcgacgacaucgagcagcaggccgacaacaugaucaccgagcugcugcagaaggaguacauggacagacagggcaagaccccccugggccugguggaccuguucguguucagcaccagcuucuaccugaucagcaucuuccugcaccugaucaagauccccacccacagacacaucaccggcaagcccugccccaagccccacagacugaaccacaugggcaucugcagcugcggccuguacaagcaccccggcgugcccgugaaguggaagagaugaggacuagucccuguucccagagcccacuuuuuuuucuuuuuuugaaauaaaauagccugucuuucagaucucaaaggcucuuuucagagccaccaaaaaaaaaaaaaaaaaaaaaaaaaaaaaaaaaaaaaaaaaaaaaaaaaaaaaaaaaaaaaaaaaaaaaaaaaaaaaaaaaaaaaaaaaaaaaaaaaaaaa

SEQ ID NO: 23320 - RNA, 1745 nt, Artificial Sequence
  mRNA product Design a-1 (hSL-A100) comprising derived and/or modified sequence from LASV(LASV253-NIG-2011;Clade II)__AIT17670__GPCmut2 (opt4)
aggagagucccgcagucggcguccagcggcucugcuuguucgugugugugucguugcaggccuuauucaagcuuaccaugggccagaucaucaccuucuuccaggaggugccccacgugaucgaggaggugaugaacaucgugcugaucgcccugagccugcuggccauccugaagggcaucuacaacguggccaccugcggccuguucggccuggugagcuuccugcugcugugcggcagaagcugcagcaccaccuacaagggcguguacgagcugcagacccuggagcuggacauggccagccugaacaugugcaugccccugagcugcaccaagaacaacagccaccacuacaucauggugggcaacgagaccggccuggagcugacccugaccaacaccagcaucaucaaccacaaguucugcaaccugagcgacgcccacaagaagaaccuguacgaccacgcccugaugagcaucaucagcaccuuccaccugagcauccccaacuucaaccaguacgaggccaugagcugcgacuucaacggcggcaagaucagcgugcaguacaaccugagccacaccuacgccguggacgccgccaaccacugcggcaccaucgccaacggcgugcugcagaccuucaugagaauggccuggggcggcagcuacaucgcccuggacagcggcaagggcagcugggacugcaucaugaccagcuaccaguaccugaucauccagaacaccaccugggaggaccacugccaguucagcagacccagccccaucggcuaccugggccugcugagccagagaaccagagacaucuacaucagcagaagaagaagaggcaccuucaccuggacccugagcgacagcgagggcaacgagacccccggcggcuacugccugaccagauggaugcugaucgaggccgagcugaagugcuucggcaacaccgccguggccaagugcaacgagaagcacgacgaggaguucugcgacaugcugagacuguucgacuucugcaagcaggccaucagaagacugaaggcccccgcccagaugagcauccagcugaucaacaaggccgugaacgcccugaucaacgaccagcugaucaugaagaaccaccugagagacaucaugggcauccccuacugcaacuacagcaaguacugguaccugaaccacaccgugaccggcagaaccagccugcccagaugcuggcuggugagcaacggcagcuaccugaacgagacccacuucagcgacgacaucgagcagcaggccgacaacaugaucaccgagcugcugcagaaggaguacaucgacagacagggcaagaccccccugggccugguggaccuguucguguucagcaccagcuucuaccugaucagcaucuuccugcaccuggugaagauccccacccacagacacaucaucggcaagcccugccccaagccccacagacugaaccacaugggcaucugcagcugcggccuguacaagcaccccggcgugcccgugaaguggaagagaugaggacuagucccuguucccagagcccacuuuuuuuucuuuuuuugaaauaaaauagccugucuuucagaucucaaaggcucuuuucagagccaccaaaaaaaaaaaaaaaaaaaaaaaaaaaaaaaaaaaaaaaaaaaaaaaaaaaaaaaaaaaaaaaaaaaaaaaaaaaaaaaaaaaaaaaaaaaaaaaaaaaaa

SEQ ID NO: 23321 - RNA, 1745 nt, Artificial Sequence
  mRNA product Design a-1 (hSL-A100) comprising derived and/or modified sequence from LASV(LASV254-NIG-2011;Clade II)__AIT17674__GPCmut2 (opt4)
aggagagucccgcagucggcguccagcggcucugcuuguucgugugugugucguugcaggccuuauucaagcuuaccaugggccagaucaucaccuucuuccaggaggugccccacgugaucgaggaggugaugaacaucgugcugaucgcccugagccugcuggccauccugaagggcaucuacaacguggccaccugcggccuguucggccuggugagcuuccugcugcugugcggcagaagcugcagcaccaccuacaagggcguguacgagcugcagacccuggagcuggacaugaccaaccugaacaugugcaugccccugagcugcaccaagaacaacagccaccacuacaucauggugggcaacgagaccggccuggagcugacccugaccaacaccagcaucaucaaccacaaguucugcaaccugagcgacgcccacaagaagaaccuguacaaccacgcccugaugagcaucaucagcaccuuccaccugagcauccccaacuucaaccaguacgaggccaugagcugcgacuucaacggcggcaagaucagcgugcaguacaaccugagccacagcuacgccguggacgccgccaaccacugcggcaccaucgccaacggcgugcugcagaccuucaugagaauggccuggggcggcagcuacaucgcccuggacagcggcaagggcaacugggacugcaucaugaccagcuaccaguaccugaucauccagaacaccaccugggaggaccacugccaguucagcagacccagccccaucggcuaccugggccugcugagccagagaaccagagacaucuacaucagcagaagaagaagaggcaccuucaccuggacccugagcgacagcgagggcaacgagacccccggcggcuacugccugaccagauggaugcugaucgaggccgagcugaagugcuucggcaacaccgccguggccaagugcaacgagaagcacgacgaggaguucugcgacaugcugagacuguucgacuucugcaagcaggccaucagaagacugaagacccccgcccaggccaacauccagcugaucaacaaggccgugaacgcccugaucaacgaccagcugaucaugaagaaccaccugagagacaucaugggcauccccuacugcaacuacagcaaguacugguaccugaaccacaccgugaccggcaagaccagccugcccagaugcuggcuggugagcaacggcagcuaccugaacgagacccacuucagcgacgacaucgagcagcaggccgacaacaugaucaccgagcugcugcagaaggaguacauggacagacagggcaagaccccccugggccugguggaccuguucguguucagcaccagcuucuaccugaucagcaucuuccugcaccuggugaagauccccacccacagacacgugaucggcaagcccugccccaagccccacagacugaaccacaugggcaucugcagcugcggccuguacaagcaccccggcgugcccgugaaguggaagagaugaggacuagucccuguucccagagcccacuuuuuuuucuuuuuuugaaauaaaauagccugucuuucagaucucaaaggcucuuuucagagccaccaaaaaaaaaaaaaaaaaaaaaaaaaaaaaaaaaaaaaaaaaaaaaaaaaaaaaaaaaaaaaaaaaaaaaaaaaaaaaaaaaaaaaaaaaaaaaaaaaaaaa

SEQ ID NO: 23322 - RNA, 1745 nt, Artificial Sequence
  mRNA product Design a-1 (hSL-A100) comprising derived and/or modified sequence from LASV(Nig08-A19;Clade III)__ADU56618__GPCmut2 (opt4)
aggagagucccgcagucggcguccagcggcucugcuuguucgugugugugucguugcaggccuuauucaagcuuaccaugggccagaucgugaccuucuuccaggaggugccccacgugaucgaggaggugaugaacaucgugcugaucgcccugagcauccuggccauccugaagggccuguacaacaucgccaccugcggccugaucggccuggugaccuuccugcugcugagcggcagaagcugcagcaugaccuacaagggcguguacgagcugcagacccuggagcugaacaugaacacccugaacaugugcaugccccugagcugcaccaagaacaacagccaccacuacaucauggugggcaacgagaccggccuggagcugacccugaccaacaccagccugcugcaccacaaguucugcaaccugagcgacgcccacaagaagaaccuguacgaccacacccugaugagcaucaucagcaccuuccaccugagcauccccaacuucaaccaguacgaggccaugagcugcgacuucaacggcggcaagaucaccgugcaguacaaccugagccacagcuacgccaucgacgccgccaaccacugcggcaccguggccaacggcgugcugcagaccuucaugagaauggccuggggcggcagcuacaucgcccuggacagcggcagaggcaagugggacugcaucaugaccagcuaccaguaccugaucauccagaacaccaccugggaggaccacugccaguucagcagacccagccccaucggcuaccugggccugcugagccagagaaccagagacaucuacaucagcagaagaagaagaggcaccuucaccuggacccugagcgacagcgagggcaacgagacccccggcggcuacugccugaccagauggaugcugaucgaggccgagcugaagugcuucggcaacaccgccguggccaagugcaacgagaagcacgacgaggaguucugcgacaugcugagacuguucgacuucugcaagcaggccaucagaagacugaaggcccccgcccagaugagcauccagcugaucaacaaggccgugaacgcccugaucaacgaccagcugaucaugaagaaccaccugagagacaucaugggcauccccuacugcaacuacagcaaguacugguaccugaaccacaccagcaccggcagaaccagccugcccagaugcuggcuggugagcaacggcagcuaccugaacgagacccacuucagcgacgacaucgagcagcaggccgacaacaugaucaccgagaugcugcagaaggaguaccuggacagacagggcaagaccccccugggccugguggaccuguucguguucagcaccagcuucuaccugaucagcaucuuccugcaccuggugaagauccccacccacagacacaucgugggcaagcccugccccaagccccacagacugaaccacaugggcaucugcagcugcggccuguacaagcagcccggcgugcccgugagauggaagagaugaggacuagucccuguucccagagcccacuuuuuuuucuuuuuuugaaauaaaauagccugucuuucagaucucaaaggcucuuuucagagccaccaaaaaaaaaaaaaaaaaaaaaaaaaaaaaaaaaaaaaaaaaaaaaaaaaaaaaaaaaaaaaaaaaaaaaaaaaaaaaaaaaaaaaaaaaaaaaaaaaaaaa

SEQ ID NO: 23323 - RNA, 1748 nt, Artificial Sequence
  mRNA product Design a-1 (hSL-A100) comprising derived and/or modified sequence from LASV(G1180-SLE-2010;Clade IV)__AIT17168__GPCmut2 (opt4)
aggagagucccgcagucggcguccagcggcucugcuuguucgugugugugucguugcaggccuuauucaagcuuaccaugggccagaucgugaccuucuuccaggaggugccccacgugaucgaggaggugaugaacaucgugcugaucgcccugagcauccuggccgugcugaagggccuguacaacuucgccaccugcggccuggugggccugcugaccuuccugcugcugugcggcagaagcugcaccgccagcagauacaagggcguguacgagcugcagacccuggagcugaacauggagacccugaacaugugcaugccccugagcugcaccaagaacaacagccaccacuacaucauggugggcaacgagaccggccuggagcugacccugaccaacaccagcaucaucaaccacaaguucugcaaccugagcgacgcccacaagaagaaccuguacgaccacgcccugaugagcaucaucagcaccuuccaccugagcauccccaacuucaaccaguacgaggccaugagcugcgacuucaacggcggcaagaucagcgugcaguacaaccugagccacagcuacgccggcgacgccgccaaccacugcggcaccguggccaacggcgugcugcagaccuucaugagaauggccuggggcggcagcuacaucgcccuggacagcggccacggcagcugggacugcaucaugaccagcuaccaguaccugaucauccagaacaccaccugggaggaccacugccaguucagcagacccagccccaucggcuaccugggccugcugagccagagaaccagagacaucuacaucagcagaagaagaagaggcaccuucaccuggacccugagcgacagcgagggcaaggacacccccggcggcuacugccugaccagauggaugcugaucgaggccgagcugaagugcuucggcaacaccgccguggccaagugcaacgagaagcacgacgaggaguucugcgacaugcugagacuguucgacuucugcaagcaggccauccagagacugaaggcccccgcccagaugagcauccagcugaucaacaaggccgugaacgcccugaucaacgaccagcugaucaugaagaaccaccugagagacaucaugggcauccccuacugcaacuacagcaaguacugguaccugaaccacaccaccaccggcaagaccagccugcccaagugcuggcuggugagcaacggcagcuaccugaacgagacccacuucagcgacgacaucgagcagcaggccgacaacaugaucaccgagaugcugcagaaggaguacauggagagacagggcaagaccccccugggccugguggaccuguucguguucagcaccagcuucuaccugaucagcaucuuccugcaccuggugaagauccccacccacagacacaucgugggcaagagcugccccaagccccacagacugaaccacaugggcaucugcagcugcggccuguacaagcagcccggcgugcccgugaaguggaagagaugaggacuagucccuguucccagagcccacuuuuuuuucuuuuuuugaaauaaaauagccugucuuucagaucucaaaggcucuuuucagagccaccaaaaaaaaaaaaaaaaaaaaaaaaaaaaaaaaaaaaaaaaaaaaaaaaaaaaaaaaaaaaaaaaaaaaaaaaaaaaaaaaaaaaaaaaaaaaaaaaaaaaa

SEQ ID NO: 23324 - RNA, 1748 nt, Artificial Sequence
  mRNA product Design a-1 (hSL-A100) comprising derived and/or modified sequence from LASV(G1442-SLE-2011;Clade IV)__AIT17180__GPCmut2 (opt4)
aggagagucccgcagucggcguccagcggcucugcuuguucgugugugugucguugcaggccuuauucaagcuuaccaugggccagaucgugaccuucuuccaggaggugccccacgugaucgaggaggugaugaacaucgugcugaucgcccugagcauccuggccgugcugaagggccuguacaacguggccaccugcggccugaucggccuggugaccuuccugcugcugugcggcagaagcugcaccaccacccuguacaagggcguguacgagcugcagacccuggagcugaacauggagacccugaacaugugcaugccccugagcugcaccaagaacaacagccaccacuacaucagagugggcaacgagaccggccuggagcugacccugaccaacaccagcaucaucaaccacaaguucugcaaccugagcgacgcccacaagaagaaccuguacgaccacgcccugaugagcaucaucagcaccuuccaccugagcauccccaacuucaaccaguacgaggccaugagcugcgacuucaacggcggcaagaucagcgugcaguacaaccugagccacagcuacgccggcgacgccgccaaccacugcggcaccguggccaacggcgugcugcagaccuucaugagaauggccuggggcggcagcuacaucgcccuggacagcggcagaggcaacugggacugcaucaugaccagcuaccaguaccugaucauccagaacaccaccugggacgaccacugccaguucagcagacccagccccaucggcuaccugggccugcugagccagagaaccagagacguguacaucagcagaagaagaagaggcaccuucaccuggacccugagcgacagcgagggcaaggacacccccggcggcuacugccugaccagauggaugcugaucgaggccgagcugaagugcuucggcaacaccgccguggccaagugcaacgagaagcacgacgaggaguucugcgacaugcugagacuguucgacuucugcaagcaggccauccagagacugaaggcccccgcccagaugagcauccagcugaucaacaaggccgugaacgcccugaucaacgaccagcugaucaugaagaaccaccugagagacaucaugggcauccccuacugcaacuacagcaaguacugguaccugaacaacaccgccaccggcaagaccagccugcccaagugcuggcugaucagcaacggcagcuaccugaacgagacccacuucagcgacgacaucgagcaggaggccgacaacaugaucaccgagaugcugcagaaggaguacauggagagacagggcaagaccccccugggccugguggaccuguucguguucagcaccagcuucuaccugaucagcaucuuccugcaccuggugaagauccccacccacagacacaucgugggcaagagcugccccaagccccacagacugaaccacaugggcaucugcagcugcggccuguacaagcagcccggcgugcccgugagauggaagagaugaggacuagucccuguucccagagcccacuuuuuuuucuuuuuuugaaauaaaauagccugucuuucagaucucaaaggcucuuuucagagccaccaaaaaaaaaaaaaaaaaaaaaaaaaaaaaaaaaaaaaaaaaaaaaaaaaaaaaaaaaaaaaaaaaaaaaaaaaaaaaaaaaaaaaaaaaaaaaaaaaaaaa

SEQ ID NO: 23325 - RNA, 1748 nt, Artificial Sequence
  mRNA product Design a-1 (hSL-A100) comprising derived and/or modified sequence from LASV(G3010-SLE-2013;Clade IV)__AIT17344__GPCmut2 (opt4)
aggagagucccgcagucggcguccagcggcucugcuuguucgugugugugucguugcaggccuuauucaagcuuaccaugggccagaucgugaccuucuuccaggaggugccccacgugaucgaggaggugaugaacaucgugcugaucgcccugagcauccuggccgugcugaagggccuguacaacuucgccaccugcggccuggugggccuggugaccuuccugcugcugugcggcagaagcugcaccaccagccuguacaagggcguguacgagcugcagacccuggagcugaacauggagacccugaacaugugcaugccccugagcugcaccaagaacaacagccaccacuacaucauggugggcaacgagaccggccuggagcugacccugaccaacaccagcaucaucaaccacaaguucugcaaccugagcgacgcccacaagaagaaccuguacaaccacgcccugaugagcaucaucagcaccuuccaccugagcauccccaacuucaaccaguacgaggccaugagcugcgacuucaacggcggcaagaucagcgugcaguacaaccugagccacagcuacgccggcgacgccgccagccacugcggcaccguggccaacggcgugcugcagaccuucaugagaauggccuggggcggcagcuacaucgcccuggacagcggcuacggcaagugggacugcaucaugaccagcuaccaguaccugaucauccagaacaccaccugggaggaccacugccaguucagcagacccagccccaucggcuaccugggccugcugagccagagaaccagagacaucuacaucagcagaagaagaagaggcaccuucaccuggacccugagcgacagcgagggcaaggacacccccggcggcuacugccugaccagauggaugcugaucgaggccgagcugaagugcuucggcaacaccgccguggccaagugcaacgagaagcacgacgaggaguucugcgacaugcugagacuguucgacuucugcaagcaggccauccagagacugaagacccccgcccagaugagcauccagcugaucaacaaggccgugaacgcccugaucaacgaccagcugaucaugaagaaccaccugagagacaucaugggcauccccuacugcaacuacagcaaguacugguaccugaaccacaccaccaccggcaagaccagccugcccaagugcuggcuggugagcaacggcagcuaccugaacgagacccacuucagcgacgacaucgagcagcaggccgacaacaugaucaccgagaugcugcagaaggaguacauggagagacagggcaagaccccccugggccugguggaccuguucguguucagcaccagcuucuaccugaucagcaucuuccugcaccuggugaagauccccacccacagacacaucgugggcaagagcugccccaagccccacagacugaaccacaugggcaucugcagcugcggccuguacaagcagcccggcgugcccgugagauggaagagaugaggacuagucccuguucccagagcccacuuuuuuuucuuuuuuugaaauaaaauagccugucuuucagaucucaaaggcucuuuucagagccaccaaaaaaaaaaaaaaaaaaaaaaaaaaaaaaaaaaaaaaaaaaaaaaaaaaaaaaaaaaaaaaaaaaaaaaaaaaaaaaaaaaaaaaaaaaaaaaaaaaaaa

SEQ ID NO: 23326 - RNA, 1748 nt, Artificial Sequence
  mRNA product Design a-1 (hSL-A100) comprising derived and/or modified sequence from LASV(G502-SLE-2009;Clade IV)__AIT17126__GPCmut2 (opt4)
aggagagucccgcagucggcguccagcggcucugcuuguucgugugugugucguugcaggccuuauucaagcuuaccaugggccagaucgugaccuucuuccaggaggugccccacgugaucgaggaggugaugaacaucgugcugaucgcccugagcauccuggccgugcugaagggccuguacaacuucgccaccugcggccuggugggccugcugaccuuccugcugcugugcggcagaagcugcaccaccggccuguacaagggcguguacgagcugcagacccuggagcugaacauggagacccugaacaugugcaugccccugagcugcaccaagaacaacagccaccacuacaucauggugggcaacgagaccggccuggagcugacccugaccaacaccagcaucaucaaccacaaguucugcaaccugagcgacgcccacaagaagaaccuguacgaccacgcccugaugagcaucaucagcaccuuccaccugagcauccccaacuucaaccaguacgaggccaugagcugcgacuucaacggcggcaagaucagcgugcaguacaaccugagccacagcuacgccggcgacgccgccgaccacugcggcaccguggccaacggcgugcugcagaccuucaugagaauggccuggggcggcagcuacaucgcccuggacagcggcagaggcagaugggacugcaucaugaccagcuaccaguaccugaucauccagaacaccaccugggaggaccacugccaguucagcagacccagccccaucggcuaccugggccugcugagccagagaaccagagacaucuacaucagcagaagaagaagaggcaccuucaccuggacccugagcgacagcgagggcaaggacacccccggcggcuacugccugaccagauggaugcugaucgaggccgagcugaagugcuucggcaacaccgccguggccaagugcaacgagaagcacgacgaggaguucugcgacaugcugagacuguucgacuucugcaagcaggccauccagagacugaaggcccccgcccagaugagcauccagcugaucaacaaggccgugaacgcccugaucaacgaccagcuggugaugaagaaccaccugagagacaucaugggcauccccuacugcaacuacagcagauacugguaccugaaccacaccaccaccggcagaaccagccugcccaagugcuggcuggugagcaacggcagcuaccugaacgagacccacuucagcgacgacaucgagcagcaggccgacaacaugaucaccgagaugcugcagaaggaguacauggagagacagggcaagaccccccugggccugguggaccuguucguguucagcaccagcuucuaccugaucagcaucuuccugcaccuggugaagauccccacccacagacacaucgugggcaagagcugccccaagccccacagacugaaccacaugggcaucugcagcugcggccuguacaagcagcccggcgugcccgugaaguggaagagaugaggacuagucccuguucccagagcccacuuuuuuuucuuuuuuugaaauaaaauagccugucuuucagaucucaaaggcucuuuucagagccaccaaaaaaaaaaaaaaaaaaaaaaaaaaaaaaaaaaaaaaaaaaaaaaaaaaaaaaaaaaaaaaaaaaaaaaaaaaaaaaaaaaaaaaaaaaaaaaaaaaaaa

SEQ ID NO: 23327 - RNA, 1748 nt, Artificial Sequence
  mRNA product Design a-1 (hSL-A100) comprising derived and/or modified sequence from LASV(G733-SLE-2010;Clade IV)__AIT17154__GPCmut2 (opt4)
aggagagucccgcagucggcguccagcggcucugcuuguucgugugugugucguugcaggccuuauucaagcuuaccaugggccagaucgugaccuucuuccaggaggugccccacgugaucgaggaggugaugaacaucgugcugaucgcccugagcauccuggccgugcugaagggccuguacaacuucgccaccugcggcaucgugggccuggugagcuuccugcugcugugcggcagaagcugcaccaccagccuguacaagggcguguacgagcugcagacccuggagcugaacauggagacccugaacaugugcaugccccugagcugcaccaagaacaacagccaccacuacaucauggugggcaacgagaccggccuggagcugacccugaccaacaccagcaucaucaaccacaaguucugcaaccugagcgacgcccacaagaagaaccuguacgaccacgcccugaugagcaucaucagcaccuuccaccugagcauccccaacuucaaccaguacgaggccaugagcugcgacuucaacggcggcaagaucagcgugcaguacaaccugagccacagcuacgccggcgacgccgccaaccacugcggcaccaucgccaacggcgugcugcagaccuucaugagaauggccuggggcggcagcuacaucgcccuggacagcggcagagacagaugggacugcaucaugaccagcuaccaguaccugaucauccagaacaccaccugggaggaccacugccaguucagcagacccagccccaucggcuaccugggccugcugagccagagaaccagagacaucuacaucagcagaagaagaagaggcaccuucaccuggacccugagcgacagcgagggcaaggacacccccggcggcuacugccugaccagauggaugcugaucgaggccgagcugaagugcuucggcaacaccgccguggccaagugcaacgagaagcacgacgaggaguucugcgacaugcugagacuguucgacuucugcaagcaggccauccagagacugaaggcccccgcccagaugagcauccagcugaucaacaaggccgugaacgcccugaucaacgaccagcugaucaugaagaaccaccugagagacaucaugggcauccccuacugcaacuacagcaaguacugguaccugaaccacaccaccaccggcaagaccagccugcccaagugcuggcuggugagcaacggcagcuaccugaacgagacccacuucagcgacgacaucgagcagcaggccgacaacaugaucaccgagaugcugcagaaggaguacauggagagacagggcaagaccccccugggccugguggaccuguucguguucagcaccagcuucuaccugaucagcaucuuccugcaccuggugaagauccccacccacagacacguggugggcaagagcugccccaagccccacagacugaaccacaugggcaucugcagcugcggccuguacggccagcccggcgugcccgugaaguggaagagaugaggacuagucccuguucccagagcccacuuuuuuuucuuuuuuugaaauaaaauagccugucuuucagaucucaaaggcucuuuucagagccaccaaaaaaaaaaaaaaaaaaaaaaaaaaaaaaaaaaaaaaaaaaaaaaaaaaaaaaaaaaaaaaaaaaaaaaaaaaaaaaaaaaaaaaaaaaaaaaaaaaaaa

SEQ ID NO: 23328 - RNA, 1748 nt, Artificial Sequence
  mRNA product Design a-1 (hSL-A100) comprising derived and/or modified sequence from MOPV/LASV reassortant(IGS-1;Clade IV)__AFY05576__GPCmut2 (opt4)
aggagagucccgcagucggcguccagcggcucugcuuguucgugugugugucguugcaggccuuauucaagcuuaccaugggccagaucgugaccuucuuccaggaggugccccacgugaucgaggaggugaugaacaucgugcugaucgcccugagcgugcuggccgugcugaagggccuguacaacuucgccaccugcggccuggugggccuggugaccuuccugcugcugugcggcagaagcugcaccaccagccuguacaagggcguguacgagcugcagacccuggagcugaacauggagacccugaacaugugcaugccccugagcugcaccaagaacaacagccaccacuacaucauggugggcaacgagaccggccuggagcugacccugaccaacaccagcaucaucaaccacaaguucugcaaccugagcgacgcccacaagaagaaccuguacgaccacgcccugaugagcaucaucagcaccuuccaccugagcauccccaacuucaaccaguacgaggccaugagcugcgacuucaacggcggcaagaucagcgugcaguacaaccugagccacagcuacgccggcgacgccgccaaccacugcggcaccguggccaacggcgugcugcagaccuucaugagaauggccuggggcggcagcuacaucgcccuggacagcggcagaggcaacugggacugcaucaugaccagcuaccaguaccugaucauccagaacaccaccugggaggaccacugccaguucagcagacccagccccaucggcuaccugggccugcugagccagagaaccagagacaucuacaucagcagaagaagaagaggcaccuucaccuggacccugagcgacagcgagggcgaggacacccccggcggcuacugccugaccagauggaugcugaucgaggccgagcugaagugcuucggcaacaccgccguggccaagugcaacgagaagcacgacgaggaguucugcgacaugcugagacuguucgacuucugcaagcaggccauccagagacugaaggcccccgcccagaugagcauccagcugaucaacaaggccgugaacgcccugaucaacgaccagcugaucaugaagaaccaccugagagacaucaugggcauccccuacugcaacuacagcaaguacugguaccugaaccacaccaccaccggcagaaccagccugcccaagugcuggcuggugagcaacggcagcuaccugaacgagacccacuucagcgacgacaucgagcagcaggccgacaacaugaucaccgagaugcugcagaaggaguacauggagagacagggcaagaccccccugggccugguggaccuguucguguucagcaccagcuucuaccugaucagcaucuuccugcaccuggugaagauccccacccacagacacaucgugggcaagagcugccccaagccccacagacugaaccacaugggcaucugcagcugcggccuguacaagcagcccggcgugcccgugaaguggaagagaugaggacuagucccuguucccagagcccacuuuuuuuucuuuuuuugaaauaaaauagccugucuuucagaucucaaaggcucuuuucagagccaccaaaaaaaaaaaaaaaaaaaaaaaaaaaaaaaaaaaaaaaaaaaaaaaaaaaaaaaaaaaaaaaaaaaaaaaaaaaaaaaaaaaaaaaaaaaaaaaaaaaaa

SEQ ID NO: 23329 - RNA, 1748 nt, Artificial Sequence
  mRNA product Design a-1 (hSL-A100) comprising derived and/or modified sequence from LASV(LM765-SLE-2012;Clade IV)__AIT17814__GPCmut2 (opt4)
aggagagucccgcagucggcguccagcggcucugcuuguucgugugugugucguugcaggccuuauucaagcuuaccaugggccagaucgugaccuucuuccaggaggugccccacgugaucgaggaggugaugaacaucgugcugaucgcccugagcauccuggccgugcugaagggccuguacaacuucgccaccugcggccuggugggccuggugaccuuccugcugcugugcggcagaagcugcaccaccagccuguacaagggcguguacgagcugcagacccuggagcugaacauggagacccugaacaugugcaugccccugagcugcaccaagaacaacagccaccacuacaucauggugggcaacgagaccggccuggagcugacccugaccaacaccagcaucaucgaccacaaguucugcaaccugagcgacgcccacagaaagaaccuguacgaccacgcccugaugagcaucaucagcaccuuccaccugagcauccccaacuucaaccaguacgaggccaugagcugcgacuucaacggcggcaagaucagcgugcaguacaaccugagccacagcuacgccaaggacgccgccgaccacugcggcaccguggccaacggcgugcugcagaccuucaugagaauggccuggggcggcagcuacaucgcccuggacagcggcagaggcagaugggacugcaucaugaccagcuaccaguaccugaucauccagaacaccaccugggaggaccacugccaguucagcagacccagccccaucggcuaccugggccugcugagccagagaaccagagacaucuacaucagcagaagaagaagaggcaccuucaccuggacccugagcgacagcgagggcaaggacacccccggcggcuacugccugaccagauggaugcugaucgaggccgagcugaagugcuucggcaacaccgccguggccaagugcaacgagaagcacgacgaggaguucugcgacaugcugagacuguucgacuucugcaagcaggccauccagagacugaaggcccccgcccagaugagcauccagcugaucaacaaggccgugaacgcccugaucaacgaccagcugaucaugaagaaccaccugagagacaucaugggcauccccuacugcaacuacagcaaguacugguaccugaaccacaccaccaccggcaagaccagccugcccaagugcuggcuggugagcaacggcagcuaccugaacgagacccacuucagcgacgacaucgagcagcaggccgacaacaugaucaccgagaugcugcagaaggaguacauggagagacagggcaagaccccccugggccugguggaccuguucguguucagcaccagcuucuaccugaucagcaucuuccugcaccuggugaagauccccacccacagacacaucgugggcaagcccugccccaagccccacagacugaaccacaugggcaucugcagcugcggccuguacaagcagcccggcgugcccgugaaguggaagagaugaggacuagucccuguucccagagcccacuuuuuuuucuuuuuuugaaauaaaauagccugucuuucagaucucaaaggcucuuuucagagccaccaaaaaaaaaaaaaaaaaaaaaaaaaaaaaaaaaaaaaaaaaaaaaaaaaaaaaaaaaaaaaaaaaaaaaaaaaaaaaaaaaaaaaaaaaaaaaaaaaaaaa

SEQ ID NO: 23330 - RNA, 1748 nt, Artificial Sequence
  mRNA product Design a-1 (hSL-A100) comprising derived and/or modified sequence from LASV(LM776-SLE-2012;Clade IV)__AIT17824__GPCmut2 (opt4)
aggagagucccgcagucggcguccagcggcucugcuuguucgugugugugucguugcaggccuuauucaagcuuaccaugggccagaucgugaccuucuuccaggaggugccccacgugaucgaggaggugaugaacaucgugcugaucgcccugagcauccuggccgugcugaagggccuguacaacuucgccaccugcggccuggugggccuggugaccuuccugcugcugugcggcagaagcugcaccaccagcguguacaagggcguguacgagcugcagacccuggagcugaacauggagacccugaacaugugcaugccccugagcugcaccaagaacaacagccaccacuacaucauggugggcaacgagaccggccuggagcugacccugaccaacaccagcaucaucaaccacaaguucugcaaccugagcgacgcccacaagaagaaccuguacgaccacgcccugaugagcaucaucagcaccuuccaccugagcauccccaacuucaaccaguacgaggccaugagcugcgacuucaacggcggcaagaucagcgugcaguacaaccugagccacagcuacgccggcgacgccgccaaccacugcggcaccguggccaacggcgugcugcagaccuucaugagaauggccuggggcggcagcuacaucgcccuggacagcggccacggcaagugggacugcaucaugaccagcuaccaguaccugaucauccagaacaccaccugggaggaccacugccaguucagcagacccagccccaucggcuaccugggccugcugagccagagaaccagagacaucuacaucagcagaagaagaagaggcaccuucaccuggacccugagcgacagcgagggcaaggacacccccggcggcuacugccugaccagauggaugcugaucgaggccgagcugaagugcuucggcaacaccgccguggccaagugcaacgagaagcacgacgaggaguucugcgacaugcugagacuguucgacuucugcaagcaggccauccagagacugaaggcccccgcccagaugagcauccagcugaucaacaaggccgugaacgcccugaucaacgaccagcugaucaugaagaaccaccugagagacaucaugggcauccccuacugcaacuacagcaaguacugguaccugaaccacaccaccaccggcaagaccagccugcccaagugcuggcuggugagcaacggcagcuaccugaacgagacccacuucagcgacgacaucgagcagcaggccgacaacaugaucaccgagaugcugcagaaggaguacauggagagacagggcaagaccccccugggccugguggaccuguucguguucagcaccagcuucuaccugaucagcaucuuccugcaccuggugaagauccccacccacagacacaucgugggcaagagcugccccaagccccacagacugaaccacaugggcaucugcagcugcggccuguacaagcagcccggcgugcccgugagauggaagagaugaggacuagucccuguucccagagcccacuuuuuuuucuuuuuuugaaauaaaauagccugucuuucagaucucaaaggcucuuuucagagccaccaaaaaaaaaaaaaaaaaaaaaaaaaaaaaaaaaaaaaaaaaaaaaaaaaaaaaaaaaaaaaaaaaaaaaaaaaaaaaaaaaaaaaaaaaaaaaaaaaaaaa

SEQ ID NO: 23331 - RNA, 1748 nt, Artificial Sequence
  mRNA product Design a-1 (hSL-A100) comprising derived and/or modified sequence from LASV(Mad39;Clade IV)__ANH09722__GPCmut2 (opt4)
aggagagucccgcagucggcguccagcggcucugcuuguucgugugugugucguugcaggccuuauucaagcuuaccaugggccagaucgugaccuucuuccaggaggugccccacgugaucgaggaggugaugaacaucgugcugaucgcccugagcauccuggccgugcugaagggccuguacaacguggccaccugcggccugaucggccuggugaccuuccugcugcugugcggcagaagcugcaccaccacccuguacaagggcguguacgagcugcaggcccuggagcugaacauggagacccugaacaugugcaugccccugagcugcaccaagaacaacagccaccacuacaucagagugggcaacgagaccggccuggagcugacccugaccaacaccagccugaucaaccacaaguucugcaaccugagcgacgcccacaagaagaaccuguacgaccacgcccugaugagcaucaucagcaccuuccaccugagcauccccaacuucaaccaguacgaggccaugagcugcgacuucaacgacggcaagaucagcgugcaguacaaccugagccacaccuacgccggcgacaccgccaaccacugcggcaccguggccaacggcgugcugcagaccuucaugagaauggccuggggcggcagcuacaucgcccuggacagcggcagaggcggcugggacugcaucaugaccagcuaccaguaccugaucauccagaacaccaccugggaggaccacugccaguucagcagacccagccccaucggcuaccugggccugcugagccagagaaccagagacaucuacaucagcagaagaagaagaggcaccuucaccuggacccugagcgacagcgagggcaaggacacccccggcggcuacugccugaccagauggaugcugaucgaggccgagcugaagugcuucggcaacaccgccguggccaagugcaacgagaagcacgacgaggaguucugcgacaugcugagacuguucgacuucugcaagcaggccauccagagacugaaggcccccgcccagaugagcauccagcugaucaacaaggccgugaacgcccugaucaacgaccagcugaucaugaagaaccaccugagagacaucaugggcauccccuacugcaacuacagcaaguacugguaccugaaccacaccgugaccggcaagaccagccugcccaagugcuggcuggugagcaacggcagcuaccugaacgagacccacuucagcgacgacaucgagcagcaggccgacaacaugaucaccgagaugcugcagaaggaguacauggagagacagggcaagaccccccugggccugguggaccuguucguguucagcaccagcuucuaccugaucagcaucuuccugcaccuggugaagauccccacccacagacacguggugggcaagcccugccccaagccccacagacugaaccacaugggcaucugcagcugcggcuucuacaagcagcccggcgugcccgugagauggaagagaugaggacuagucccuguucccagagcccacuuuuuuuucuuuuuuugaaauaaaauagccugucuuucagaucucaaaggcucuuuucagagccaccaaaaaaaaaaaaaaaaaaaaaaaaaaaaaaaaaaaaaaaaaaaaaaaaaaaaaaaaaaaaaaaaaaaaaaaaaaaaaaaaaaaaaaaaaaaaaaaaaaaaa

SEQ ID NO: 23332 - RNA, 1748 nt, Artificial Sequence
  mRNA product Design a-1 (hSL-A100) comprising derived and/or modified sequence from LASV(Z0947-SLE-2011;Clade IV)__AIT17840__GPCmut2 (opt4)
aggagagucccgcagucggcguccagcggcucugcuuguucgugugugugucguugcaggccuuauucaagcuuaccaugggccagaucgugaccuucuuccaggaggugccccacgugaucgaggaggugaugaacaucgugcugaucgcccugagcauccuggccgugcugaagggccuguacaacuucgccaccugcggccuggugggccuggugaccuuccugcugcugugcggcagaagcugcaccaucagccuguacaagggcguguacgagcugcagacccuggagcugaacauggagacccugaacaugugcaugccccugagcugcaccaagaacaacagccaccacuacaucauggugggcaacgagaccggccuggagcugacccugaccaacaccagcaucaucaaccacaaguucugcaaccugagcgacgcccacaagaagaaccuguacgaccacgcccugaugagcaucaucagcaccuuccaccugagcauccccaacuucaaccaguacgaggccaugagcugcgacuucaacggcggcaagaucagcgugcaguacaaccugagccacagcuacgccggcgacgccgccaaccacugcggcaccguggccaacggcgugcugcagaccuucaugagaauggccuggggcggcagcuacaucgcccuggacagcggcagagacagaugggacugcaucaugaccagcuaccaguaccugaucauccagaacaccaccugggaggaccacugccaguucagcagacccagccccaucggcuaccugggccugcugagccagagaaccagagacaucuacaucagcagaagaagaagaggcaccuucaccuggacccugagcgacagcgagggcaaggacacccccggcggcuacugccugaccagauggaugcugaucgaggccgagcugaagugcuucggcaacaccgccguggccaagugcaacgagaagcacgacgaggaguucugcgacaugcugagacuguucgacuucugcaagcaggccauccagagacugaaggcccccgcccagaugagcauccagcugaucaacaaggccgugaacgcccugaucaacgaccagcugaucaugaagaaccaccugagagacaucaugggcauccccuacugcaacuacagcaaguacugguaccugaaccacaccaccaccggcaagaccagccugcccaagugcuggcuggugagcaacggcagcuaccugaacgagacccacuucagcgacgacaucgagcagcaggccgacaacaugaucaccgagaugcugcagaaggaguacauggagagacagggcaagaccccccugggccugguggaccuguucguguucagcaccagcuucuaccugaucagcaucuuccugcaccuggugaagauccccacccacagacacaucgugggcaagcccugccccaagccccacagacugaaccacaugggcaucugcagcugcggccuguacaagcagcccggcgugcccgugaaguggaagagaugaggacuagucccuguucccagagcccacuuuuuuuucuuuuuuugaaauaaaauagccugucuuucagaucucaaaggcucuuuucagagccaccaaaaaaaaaaaaaaaaaaaaaaaaaaaaaaaaaaaaaaaaaaaaaaaaaaaaaaaaaaaaaaaaaaaaaaaaaaaaaaaaaaaaaaaaaaaaaaaaaaaaa

SEQ ID NO: 23333 - RNA, 1748 nt, Artificial Sequence
  mRNA product Design a-1 (hSL-A100) comprising derived and/or modified sequence from LASV(Josiah;Clade IV)__NP_694870__GPCmut2 (opt5)
aggagagucccgcagucggcguccagcggcucugcuuguucgugugugugucguugcaggccuuauucaagcuuaccaugggccagaucgugaccuucuuucaagaggucccccacguuauugaagaggugaugaacaucgugcugauugcccucagcguccuggcugugcuuaaggggcuguacaauuucgccacaugcggacucguuggccuggugacguuucuucugcucugugggagauccugcaccacaucucuguauaaaggagucuacgaacugcagacccucgagcugaacauggaaacacuuaauauguguaugccucugagcugcaccaagaacaauucccaucacuauaucauggugggcaacgagacagggcucgagcugacccuuacgaauaccucuauuaucaaccauaaauucuguaaucugagcgacgcgcacaagaaaaaccucuacgaucaugcucugauguccaucauuucuacauuucaccugagcaucccgaauuucaaccaguaugaagccauguccugcgacuuuaauggaggcaagauuagcguucaguacaaccucucucacuccuaugccggcgaugcugccaaucauugugggaccguggcuaacggaguccugcaaacauucaugcggauggccuggggcgggagcuacaucgcgcuugacucuggacgcggcaacugggauugcauuaugaccuccuaccaguaucugaucauucagaauacgacaugggaggaccacugucaguuuagcagacccucuccuaucggguaccucggacugcuuucccaacggacccgcgauaucuauauuagcagacggcgcagaggcacauucaccuggacccuguccgacucugaaggcaaggauacacccgggggauacugccucacgcgguggaugcugaucgaggccgagcugaaauguuuuggcaacaccgcuguggccaagugcaaugaaaaacaugacgaggaguucugcgauaugcuccgccuguuugacuucuguaagcaggcuauucagagacuuaaagccccugcgcagaugagcauccaacugauuaacaaggccgugaaugcucucaucaacgaucagcugaucaugaagaaucaccuucgggacauuauggggauccccuauugcaacuacuccaaauauugguaccugaaucacacaaccacaggacgcaccagccucccuaaguguuggcuggucucuaacggcuccuaccugaaugaaacgcauuucagcgacgauauugaacagcaagccgacaacaugaucacagagaugcuccagaaagaguauauggaaagacaggggaagaccccgcugggacuuguugaucuguuuguguucucuaccagcuuuuaccucauuuccaucuuccugcaccuggugaaaauccccacacaucggcacauugucggcaagucuugcccuaaaccccaucgccuuaaucacaugggcaucuguagcugcgggcucuauaagcagccuggagugcccguuaaguggaaaagaugaggacuagucccuguucccagagcccacuuuuuuuucuuuuuuugaaauaaaauagccugucuuucagaucucaaaggcucuuuucagagccaccaaaaaaaaaaaaaaaaaaaaaaaaaaaaaaaaaaaaaaaaaaaaaaaaaaaaaaaaaaaaaaaaaaaaaaaaaaaaaaaaaaaaaaaaaaaaaaaaaaaaa

SEQ ID NO: 23334 - RNA, 1745 nt, Artificial Sequence
  mRNA product Design a-1 (hSL-A100) comprising derived and/or modified sequence from LASV(LP;Clade I)__AAF86701__GPCmut2 (opt5)
aggagagucccgcagucggcguccagcggcucugcuuguucgugugugugucguugcaggccuuauucaagcuuaccaugggccagaucauuaccuucuuucaagaggugccccacgucaucgaagagguuaugaacauugugcugaucgcccucagccugcuugcuauucugaaggggcucuacaauaucgccacaugcggaaucauuggccugguggcguuccuuuuucugugugggaaauccugcucucucacgcugaagggaggcuaugaacugcagacccucgagcugaacauggaaacacuuaauauguguaugccucugagcugcaccaaaaacuccucucaucacuacaucagagucgggaaugagacaggacucgagcugacccuuacaaacaccagcauuaucaaucauaaguucuguaaccuguccgacgcucacaaaaagaaucucuaugaucaugcccugaugucuauuaucagcacguuucaccuguccauuccgaacuucaaucaguacgaagccaugagcugcgacuuuaacggcggcaagaucucugugcaguauaaucucucccacagcuacgcuggggaugccgcugagcauuguggaaccguugccaacggcgugcugcaaacauucaugcggauggcguggggagggcgcuauaucgcccuugacucuggcaaagggaauugggauugcauuaugaccuccuaccaguaccugaucauucagaacacaaccugggaagaccacugucaguuuagcagacccucuccuaucggauaucucggccugcuuucccaacggacgcgcgauauuuacaucagcagacggcgcagaggcacauucaccuggacacuguccgacucugaggggaacgagacccccggaggcuauugccucacccgguggaugcugaucgaagcugagcugaaguguuuugggaauacagccgucgcuaaaugcaacgaaaagcaugaugaggaguucugcgacaugcuccgccuguuugauuucuguaaacaggccauuagacggcuuaaggcgccugcccagaugagcauccagcugauuaauaaggcugugaacgcccucaucaaugaccaacugauuaugaaaaaccaccuucgcgauaucaugggaauccccuacugcaauuauuccaaguacugguaucugaaccacacgagcucuggcagaaccucccucccuaaauguuggcugauuagcaaugggucuuaccugaacgaaacacaguucagcgacgacaucgagcagcaagcugauaauaugauuaccgaaaugcuccagaaggaguacaucgaacggcagggaaaaacaccgcugggccuuguugacauuuuuaucuucuccaccucuuuuuaucugauuagcaucuuccuccaucugaucaagauucccacgcaccgccauaucgugggcaaaccuugccccaagccucacagacugaaccauaugggggucuguuccugcggacuuuacaagcaccccggcgugccgacaaaauggaagcggugaggacuagucccuguucccagagcccacuuuuuuuucuuuuuuugaaauaaaauagccugucuuucagaucucaaaggcucuuuucagagccaccaaaaaaaaaaaaaaaaaaaaaaaaaaaaaaaaaaaaaaaaaaaaaaaaaaaaaaaaaaaaaaaaaaaaaaaaaaaaaaaaaaaaaaaaaaaaaaaaaaaaa

SEQ ID NO: 23335 - RNA, 1745 nt, Artificial Sequence
  mRNA product Design a-1 (hSL-A100) comprising derived and/or modified sequence from LASV(803213;Clade II)__AAF86703__GPCmut2 (opt5)
aggagagucccgcagucggcguccagcggcucugcuuguucgugugugugucguugcaggccuuauucaagcuuaccaugggccagaucauuaccuucuuucaagaggugccccacgucaucgaagagguuaugaacauugugcugaucgcccucagccugcuugcuauucugaaggggaucuacaauguggccacaugcggacucuucggccugaucuccuuucuucugcucugugggagaucuugcagcgucacguauaaaggaguguacgaacugcagacccuggagcucaacauggcgaaucugaacauguguaugccucuuuccugcacaaagaauaacucucaucacuauauuaugguuggcaaugaaaccgggcuggagcucacacugaccaacacaagcaucauuaaucauaaauucuguaaccuuuccgacgcucacaagaaaaaucuguacgaucaugcccucaugucuaucauuagcaccuuucaccuguccaucccgaacuucaaucaguaugaggccaugagcugcgacuuuaacggaggcaagauuucugugcaguacaaucugucccacagcuucgcugucgaugccgcuaaccauuguggcacgaucgccaacggggugcuccaaaccuuuaugcggauggcguggggaggcucuuauaucgcccuggacuccgggaagggaaauugggauugcauuaugacaagcuaccaguaccuuaucauucagaacaccacaugggaagaccacugucaguucucucgccccuccccuaucggcuaucuggggcuccugagccaaagaacccgggauauuuacaucucccgcagacggcgcggaacguuuacauggacccuuucugacagcgagggcaaugaagcucccggcggguauugccugacaagauggaugcucaucgaggccgagcugaaauguuucggaaacaccgcuguugccaagugcaaugaaaaacaugaugaggaauuuugcgacaugcugcgccucuucgauuucuguaagcaggcgauuaaacggcugaagaccccugcccagauguccauccagcuuauuaacaaggcugugaaugcccugaucaacgaccaacucauuaugaaaaaucaccugagagauaucaugggcauccccuacugcaacuauagccgguacugguaucuuaaucacacagucacggggaagaccucucugccucgcuguuggcucguguccaacggaagcuaccugaaugagacacauuuuucugacgacauugaacagcaggcugauaacaugaucaccgagaugcugcaaaaagaguacauggacagacagggcaagacaccgcucgggcugguggaucuuuucgucuuuagcaccuccuucuaucugauuucuaucuuucuccaccugguuaaaauucccacgcaucggcacaucgugggaaagccuugccccaaaccucaucgccugaaucacaugggcauuuguagcugcggccuuuacaagcaccccggggugccggucaaguggaaaagaugaggacuagucccuguucccagagcccacuuuuuuuucuuuuuuugaaauaaaauagccugucuuucagaucucaaaggcucuuuucagagccaccaaaaaaaaaaaaaaaaaaaaaaaaaaaaaaaaaaaaaaaaaaaaaaaaaaaaaaaaaaaaaaaaaaaaaaaaaaaaaaaaaaaaaaaaaaaaaaaaaaaaa

SEQ ID NO: 23336 - RNA, 1745 nt, Artificial Sequence
  mRNA product Design a-1 (hSL-A100) comprising derived and/or modified sequence from LASV(GA391;Clade III)__CAA36645__GPCmut2 (opt5)
aggagagucccgcagucggcguccagcggcucugcuuguucgugugugugucguugcaggccuuauucaagcuuaccaugggccagaucgugaccuucuuucaagaggucccccacguuauugaagaggugaugaacaucgugcugauugcccucagcauccuggcuauucuuaaggggcuguacaaugucgccacaugcggacucaucggccuggugacguuccuucugcucuccgggagaucuuguagccugaucuauaaaggaaccuacgaacugcagacacucgagcugaacauggaaacccuuaauaugugcaugccucuguccuguacaaagaacaauucucaucacuauauucggguuggcaacgagaccgggcucgagcugacacuuaccaauacgagcauccugaaccauaaauuuugcaaucucuccgacgcgcacaagcgcaaccuguacgaucauucucugaugagcauuaucuccaccuuccaccucagcauuccgaauuuuaaccaguaugaagcuaugucuugugacuucaauggaggcaaaaucacagugcaguacaaccugucccacagcuuugccgucgaugccgcuggccauugcgggacccuugccaauggagugcugcaaacauucaugagaauggcuuggggcgggucuuauauugcccucgacuccggacggggcaacugggauuguaucaugaccagcuaccaguaccugaucauucagaacacgacaugggacgaucacugccaguuuucucgccccuccccuaucggguaucuuggacugcucagccaaagaacccgggacauuuacaucucccgcagacggcgcggcacauucaccuggacccugucugauagcgagggcaaugaaacacccgggggauauugucugacgagauggaugcucauugaggcggagcugaagugcuuuggcaacaccgccguugcuaaguguaaugaaaaacaugacgaggaguucugcgauaugcuucggcuguuugacuucugcaagcaggccauccgcagacucaaaaccccugcucagauguccauccagcugauuaacaaggccgugaaugcgcuuaucaacgaucaacugauuaugaaaaaucaccuccgggacaucauggggauucccuacuguaacuauagccgcuacugguaucugaaucacacaucuacaggaaagaccucccugccuagaugcuggcucaucagcaacggcucuuaccugaaugaaacgaaguucagcgacgauaucgaacagcaggccgacaacaugauuacagagaugcuucaaaaagaguacaucgaucggcaggggaagaccccgcugggacucgucgaccuguuuguguucuccaccucuuuuuaucugauuagcaucuuccuucaucucgugaaaauucccacacacagacauaucgucggcaagccuugucccaaaccucaccgccugaaucauaugggcauuugcuccugugggcuguacaagcagcccggaguuccggugcgguggaaaagaugaggacuagucccuguucccagagcccacuuuuuuuucuuuuuuugaaauaaaauagccugucuuucagaucucaaaggcucuuuucagagccaccaaaaaaaaaaaaaaaaaaaaaaaaaaaaaaaaaaaaaaaaaaaaaaaaaaaaaaaaaaaaaaaaaaaaaaaaaaaaaaaaaaaaaaaaaaaaaaaaaaaaa

SEQ ID NO: 23337 - RNA, 1748 nt, Artificial Sequence
  mRNA product Design a-1 (hSL-A100) comprising derived and/or modified sequence from LASV(AV;Clade V)__CCA30314__GPCmut2 (opt5)
aggagagucccgcagucggcguccagcggcucugcuuguucgugugugugucguugcaggccuuauucaagcuuaccaugggccagaucgugaccuucuuucaagaggucccccacguuauugaagaggugaugaacaucgugcugauugcccucagcauccuggcuguccuuaaggggcuguacaauauugccacaugcggacucaucggccugaucacguuccuucugcucugugggagauccugcucuagcaaccuguauaaaggaguguacgaacugcagucccucgaccugaauauggagacccuuaacauguguaugccucugucuugcacaaagaauaacagccaucacuauauucggguuggcaaugauaccgggcucgaacugacacuuaccaacacauccauccugaaucauaaauuuuguaaccucucugacgcgcacaagaaagaucuguacgaccaugcucugaugagcauuaucuccaccuuccaccucagcauuccgaauuuuaaccaguaugaggccaugucuugcgauuucaauggaggcaagaucuccgugcaguacaaccugagccacucuuaugccauugacgcugccaaucauuguggcacggucgcuaacgggauccuucaaaccuuuaugcgcauggccuggggaggcuccuacaucgcgcuggauagcgggagaggaaacugggacugcauuaugacaucuuaccaguaucucaucauucagaauaccacaugggagaaccacugucaguucucccggcccagcccuaucggcuaccuggggcuucugucccaacgcaccagagauauuuauaucucucggcgcagacggggaacguuuacauggacccucagcgacuccgaaggcaaugccacacccggcggguacugccugacccgcuggaugcugaucgaggcugaacucaaguguuucggaaacaccgccguggcuaaaugcaaugagaagcaugaugaggaauuuugcgacaugcugagacuuuucgauuuuuguaaacaggccauuagccggcugaagucuccugcgcagauguccauccagcucauuaacaaagccguuaaugcucugaucaacgaccaacuuauuaugaagaaucaucugcgcgacaucaugggcauccccuauugcaacuacagcaaguauugguaccucaaucacacaauuacggggaaaaccucucugccuaaguguuggcuggugagcaacggauccuaccucaaugagacacacuucucugaugacaucgaacagcaggccgauaacaugauuaccgagaugcugcaaaaagaauauauggagagacagggcaagacaccgcuugggcuggucgaccucuucguguuuagcaccuccuucuaccugaucagcauuuuucugcggcuugugaaaauccccacgcaccgccauauugucggaaagccuugccccaaaccucacagacucaaucauaugggcaucuguucuugcggccuguauaagcagcccgggguuccggugcgguggaagagaugaggacuagucccuguucccagagcccacuuuuuuuucuuuuuuugaaauaaaauagccugucuuucagaucucaaaggcucuuuucagagccaccaaaaaaaaaaaaaaaaaaaaaaaaaaaaaaaaaaaaaaaaaaaaaaaaaaaaaaaaaaaaaaaaaaaaaaaaaaaaaaaaaaaaaaaaaaaaaaaaaaaaa

SEQ ID NO: 23338 - RNA, 1745 nt, Artificial Sequence
  mRNA product Design a-1 (hSL-A100) comprising derived and/or modified sequence from LASV(Togo/2016/7082;Clade VI)__AMR44577__GPCmut2 (opt5)
aggagagucccgcagucggcguccagcggcucugcuuguucgugugugugucguugcaggccuuauucaagcuuaccaugggccagaucauuaccuucuuucaagaggugccccacgucaucgaagagguuaugaacauugugcugaucgcccucagccugcuugcuauucugaaggggguguacaaugucgccacaugcggaaucaucggccucgugacguuccuguuucuuugugggagauccugcucucugauuuauaaaggaagcuacgaacuccagacccuggagcugaacauggaaacacucaauauguguaugccucuguccugcaccaagaacucuagccaucacuauauccggguuggcaaugagacagggcuugagcugacccucacaaacaccuccauuaucaaucauaaauucuguaaccugucugacgcgcacaagcgcaaucuuuacgaucaugcucugaugagcauucucuccacguuucaccugagcaucccgaacuucaaucaguaugaagccaugucuugcgacuuuaacggaggcaaaauuuccgugcaguacaaucugagccacgccuaugcugucgaugccgcugagcauuguggcaccguggccaacgggguucuccaaacauucaugagaauggcguggggaggcucuuacaucgcccuggacuccgggcggggaaauugggauugcaucaugaccagcuaccaguaucuuauuauccagaacacaaccugggaagaccacugucaguuuucucgccccuccccuauuggcuaccuggggcuccugagccaaagaacgcgggauaucuauauuucccgcagacggcgcggaacauucaccuggacacuuucugacagcgagggcaacgagacccccggcggguacugccugaccagauggaugcucaucgaagcugagcugaaguguuuuggaaauacagccguggcuaagugcaacgaaaaacaugaugaggaguucugcgacaugcugcggcucuuugauuucuguaagcaggccauccagcgccugaaauccccugcgcagaugagcauucaacuuaucaauaaggccgucaacgcucugauuaaugaccagcucaucaugaaaaaccaccugagagauaugaugggcauucccuauugcaauuacucuaaguauugguaccuuaaccacacguccagcgggcggaccucucugccuaaguguuggcucgugagcaauggauccuaccugaacgaaacacauuucucugacgacaucgagcagcaagccgauaauaugaucaccgaaaugcugcagaaagaguauauugaccgccagggcaagacaccgcucgggcugguggaucuuuuugucuucagcaccuccuuuuaccugaucagcauuuuccuccaccugaucaaaauucccacgcauagacacaucguuggaaagccuugccccaaaccucaucggcugaaccacaugggcauuuguucuugcggccuuuauaagcagcccggggugccgacaagauggaaacgcugaggacuagucccuguucccagagcccacuuuuuuuucuuuuuuugaaauaaaauagccugucuuucagaucucaaaggcucuuuucagagccaccaaaaaaaaaaaaaaaaaaaaaaaaaaaaaaaaaaaaaaaaaaaaaaaaaaaaaaaaaaaaaaaaaaaaaaaaaaaaaaaaaaaaaaaaaaaaaaaaaaaaa

SEQ ID NO: 23339 - RNA, 1745 nt, Artificial Sequence
  mRNA product Design a-1 (hSL-A100) comprising derived and/or modified sequence from LASV(KAK-428;Clade n.d. (VII))__ANH09740__GPCmut2 (opt5)
aggagagucccgcagucggcguccagcggcucugcuuguucgugugugugucguugcaggccuuauucaagcuuaccaugggccagaucgugaccuucuuucaagaggucccccacguuauugaagaggugaugaacaucgugcugauugcccucagccugcuugcuauccugaaggggcucuacaauuucgccacaugcggagucauuggccugaucacguuucuucugcucugugggagauccugcucugcgaccuauaaaggacaguacgaacugcagacacuggagcucaacauggaaagccugaauauguguaugccucuuuccugcaccaagaacaauucucaucacuauauccgggcuggcaacaauacagggcuggagcucacccugacaaacaccagcauuaucucccauaaauucuguaaucuuucugacgcccacaagaaaaaccuguacgaucauacgcucaugagcauuaucaccacauuucaccuguccauuccgaauuucaaccaguaugaggccaugagcugcgacuuuaauggaggcaagaucucuauucaauacaaccugucccacagcuaugcuggcgaugccgcucagcauugugggaccguggccaauggaguucuccagacauucaugcgcauggcguggggcgggucuuaccuggcccuugacuccggaagacggggcugggauugcaucaucagcucuuaccaguaucugauuauccaaaacaccacgugggacgaucacugucaguuuucccgccccagcccuauuggguaccucggauucgugucccagaagacaagagacaucuauauuucucggcgcagacggggcaccuuuacauggacccugagcgauuccgaaggccaugacaugcccgggggauacugccuuacccgcuggaugcugaucgaggcugaucucaaauguuucggcaacacagccgucgcuaagugcaaugaaaaacacgacgaggaguuuugcgauauguggagacuguucgacuucuguaagcaggccauccaacggcugaaagcgccugcccagaugaacauucagcucaucaauaaggcugugaacgcccugauuaaugaccaacuuaugaugaagaaccaucugcgcgauaucauggggauucccuauugcaauuacagcaaauuuugguaucucaacaauacgaccacaggaagaaccucucugccucgguguuggcuuaucuccaacggcagcuaccugaaugaaacacacuucucugacgauaucgagcagcaggcugacaacaugauuaccgaaaugcuccagaaggaguacauggaucgccaagggaaaacgccgcugggacugguugaccucuuuguguucagcacauccuuuuaucugaucaccauuuuccuucaccuggucaagauccccacccauagacacauugugggcaaaccuugccccaagccucaucggcucaaucacaugggcaucuguucuugcgggcuguacaaacagcccggagugccggucagauggaagcgcugaggacuagucccuguucccagagcccacuuuuuuuucuuuuuuugaaauaaaauagccugucuuucagaucucaaaggcucuuuucagagccaccaaaaaaaaaaaaaaaaaaaaaaaaaaaaaaaaaaaaaaaaaaaaaaaaaaaaaaaaaaaaaaaaaaaaaaaaaaaaaaaaaaaaaaaaaaaaaaaaaaaaa

SEQ ID NO: 23340 - RNA, 1745 nt, Artificial Sequence; identical to SEQ ID NO: 23334
  mRNA product Design a-1 (hSL-A100) comprising derived and/or modified sequence from LASV(Pinneo-NIG-1969;Clade I)__AIT17836__GPCmut2 (opt5)

SEQ ID NO: 23341 - RNA, 1745 nt, Artificial Sequence
  mRNA product Design a-1 (hSL-A100) comprising derived and/or modified sequence from LASV(ISTH0009-NIG-2011;Clade II)__AIT17404__GPCmut2 (opt5)
aggagagucccgcagucggcguccagcggcucugcuuguucgugugugugucguugcaggccuuauucaagcuuaccaugggccagaucauuaccuucuuucaagaggugccccacgucaucgaagagguuaugaacauugugcugaucgcccucagccugcuugcuauucugaaggggaucuacaauguggccacaugcggacucuucggccuggucuccuuucuucugcucugugggagaucuugcagcacgaccuauaaaggaguguacgaacugcagacacuggagcucgacauggcgucccugaacauguguaugccucuuucuugcaccaagaauaacagccaucacuauaucaugguuggcaaugaaacagggcuggagcucacccugacaaacaccuccauuaucaaucauaaauucuguaaccuuucugaugcucacaagaaaaaucuguacgaccaugcccucaugagcauuaucuccacguuucaccugagcauuccgaacuucaaucaguaugaggccaugucuugcgauuuuaacggaggcaagaucuccgugcaguacaaucugagccacgcuuaugccgucgacgcugccaaccauuguggcaccauugcgaauggggugcuccaaacauucaugcggauggccuggggaggcucuuacaucgcucuggauuccgggaagggaagcugggacugcaucaugaccucuuaccaguaucuuauuauccagaacacaaccugggaagaucacugucaguuuucccgccccagcccuauuggcuaccuggggcuccugucccaaagaacgcgggacaucuauauuucucgcagacggcgcggaacauucaccuggacacuuagcgauuccgagggcaacgaaacccccggcggguacugccugaccagauggaugcucaucgaggccgagcugaaauguuuuggaaauacagcuguugccaagugcaacgaaaaacaugacgaggaguucugcgauaugcugcggcucuuugacuucuguaagcaggcgauccgcagacugaaaacgccugcccagaugagcauucagcuuaucaauaaggcugugaacgcccugauuaaugaucaacucaucaugaagaaccaucugcgggacauuaugggcauccccuauugcaauuacucuaaauauugguaccuuaaccacaccgucacagggaagaccucccugccucgcuguuggcucgugagcaauggaucuuaccugaacgaaacacacuucagcgacgauaucgaacagcaggcugacaauaugauuaccgagcugcuccaaaaagaguauauggauagacagggcaagacgccgcuggggcuuguggaccuguuugucuucuccacaucuuuuuaccucaucagcauuuuccugcaccugaucaaaauucccacccaucggcacaucaccggaaagccuugccccaaaccucaucgccuuaaccacaugggcauuuguuccugcggccucuauaagcaccccgggguuccggugaaguggaaaagaugaggacuagucccuguucccagagcccacuuuuuuuucuuuuuuugaaauaaaauagccugucuuucagaucucaaaggcucuuuucagagccaccaaaaaaaaaaaaaaaaaaaaaaaaaaaaaaaaaaaaaaaaaaaaaaaaaaaaaaaaaaaaaaaaaaaaaaaaaaaaaaaaaaaaaaaaaaaaaaaaaaaaa

SEQ ID NO: 23342 - RNA, 1745 nt, Artificial Sequence
  mRNA product Design a-1 (hSL-A100) comprising derived and/or modified sequence from LASV(ISTH2010-NIG-2012;Clade II)__AIT17482__GPCmut2 (opt5)
aggagagucccgcagucggcguccagcggcucugcuuguucgugugugugucguugcaggccuuauucaagcuuaccaugggccagaucauuaccuucuuucaagaggugccccacgucaucgaagagguuaugaacauugugcugaucgcccucagccugcuugcuauucugaaggggaucuacaauguggccacaugcggacucuucggccuggucuccuuucuucugcucugugggagaucuugcagcacgaccuauaaaggaguguacgaacugcagacacuggagcucgacauggcgucccugaacauguguaugccucuuucuugcaccaagaauaacagccaucacuauaucaugguuggcaaugaaacagggcuggagcucacccugacaaacaccuccauuaucaaucauaaauucuguaaccuuucugaugcucacaagaaaaaucuguacgaccaugcccucaugagcauuaucuccacguuucaccugagcauuccgaacuucaaucaguaugaggccaugucuugcgauuuuaacggaggcaagaucuccgugcaguacaaucugagccacgcuuaugccgucgacgcugccaaccauuguggcaccauugcgaauggggugcuccaaacauucaugcggauggccuggggaggcucuuacaucgcucuggauuccgggaagggaagcugggacugcaucaugaccucuuaccaguaucuuauuauccagaacauuacaugggaagaucacugucaguuuucccgccccagcccuaucggcuaccuggggcuccugucccaaagaacccgggacauuuauaucucucgcagacggcgcggaacguucacauggacccuuagcgauuccgagggcaacgaaacacccggcggguacugccugaccagauggaugcucaucgaggccgagcugaaauguuuuggaaauaccgcuguugccaagugcaacgaaaaacaugacgaggaguucugcgauaugcugcggcucuuugacuucuguaagcaggcgauucgcagacugaaaacgccugcccagaugagcauccagcuuauuaauaaggcugugaacgcccugaucaaugaucaacucauuaugaagaaccaucugcgggacaucaugggcauccccuauugcaauuacucuaaauauugguaccuuaaccacacagucaccgggaagacaucccugccucgcuguuggcucgugagcaauggaucuuaccugaacgaaacccacuucagcgacgauauugaacagcaggcugacaauaugaucacagagcugcuccaaaaagaguauauugauagacagggcaagaccccgcuggggcuuguggaccuguuugucuucuccacgucuuuuuaccucaucagcauuuuccugcaccugguuaaaauccccacacaucggcacguggugggaaagccuugccccaaaccucaucgccuuaaccacaugggcauuuguuccugcggccucuauaagcaccccggggucccggugaaguggaaaagaugaggacuagucccuguucccagagcccacuuuuuuuucuuuuuuugaaauaaaauagccugucuuucagaucucaaaggcucuuuucagagccaccaaaaaaaaaaaaaaaaaaaaaaaaaaaaaaaaaaaaaaaaaaaaaaaaaaaaaaaaaaaaaaaaaaaaaaaaaaaaaaaaaaaaaaaaaaaaaaaaaaaaa

SEQ ID NO: 23343 - RNA, 1745 nt, Artificial Sequence
  mRNA product Design a-1 (hSL-A100) comprising derived and/or modified sequence from LASV(Lassa virus/H.sapiens-wt/NGA/2015/ISTH_0543;Clade II)__AVO03639__GPCmut2 (opt5)
aggagagucccgcagucggcguccagcggcucugcuuguucgugugugugucguugcaggccuuauucaagcuuaccaugggccagaucauuaccuucuuucaagaggugccccacgucaucgaagagguuaugaacauugugcugaucgcccucagccugcuugcuauucugaaggggaucuacaauguggccacaugcggacucuucggccuggucuccuuucuucugcucugugggagaucuugcagcacgaccuauaaaggaguguacgaacugcagacacuggagcucgacauggcgaaccugaauauguguaugccucuuuccugcaccaagaacaauucucaucacuauaucaugguuggcaacgaaacagggcuggagcucacccugacaaauaccagcauuaucaaccauaaauucuguaaucuuuccgaugcucacaagaaaaaccuguacgaccaugcccucaugucuauuaucagcacguuucaccuguccauuccgaauuucaaccaguaugaggccaugagcugcgauuuuaauggaggcaagaucucugugcaguacaaccugucccacaccuaugcugucgacgccgcuaaucauuguggcacaauugccaacggggugcuccaaaccuucaugcggauggcguggggaggcagcuacaucgcccuggauucugggaagggauccugggacugcaucaugacaagcuaccaguaucuuguuauucagaacaccacgugggaagaucacugucaguuuucucgccccuccccuaucggcuaccuggggcuccugagccaaagaacacgggacauuuauaucucccgcagacggcgcggaaccuucacauggacccuuucugauagcgagggcaaugaaacccccggcggguacugccugacaagauggaugcucauugaggcugagcugaaauguuuuggaaacacggccguggcuaagugcaaugaaaaacaugacgaggaguucugcgauaugcugcggcucuuugacuucuguaagcaggccauccgcagacugaaaaccccugcgcagauguccauccagcuuauuaacaaggccgucaaugcucugaucaacgaucaacucauuaugaagaaucaucugcgggacaucaugggcauucccuauugcaacuacagcaaauauugguaccuuaaucacacagugaccgggaagacaucucugccucgcuguuggcucguguccaacggaagcuaccugaaugaaacccacuucucugacgauaucgaacagcaggccgacaacaugaucacggagcugcuccaaaaagaguauauugauagacagggcaagacaccgcuggggcuugucgaccuguuuguuuucagcaccuccuuuuaccucaucucuauuuuccugcaccuggugaaaauccccacccaucggcacauuacaggaaagccuugccccaaaccucaucgccuuaaucacaugggcaucuguagcugcggccucuauaagcaccccggggugccggucaaguggaaaagaugaggacuagucccuguucccagagcccacuuuuuuuucuuuuuuugaaauaaaauagccugucuuucagaucucaaaggcucuuuucagagccaccaaaaaaaaaaaaaaaaaaaaaaaaaaaaaaaaaaaaaaaaaaaaaaaaaaaaaaaaaaaaaaaaaaaaaaaaaaaaaaaaaaaaaaaaaaaaaaaaaaaaa

SEQ ID NO: 23344 - RNA, 1745 nt, Artificial Sequence
  mRNA product Design a-1 (hSL-A100) comprising derived and/or modified sequence from LASV(Lassa virus/H.sapiens-wt/NGA/2016/ISTH_0009;Clade II)__AVO03571__GPCmut2 (opt5)
aggagagucccgcagucggcguccagcggcucugcuuguucgugugugugucguugcaggccuuauucaagcuuaccaugggccagaucauuaccuucuuucaagaggugccccacgucaucgaagagguuaugaacauugugcugaucgcccucagccugcuugcuauucugaaggggaucuacaauguggccacaugcggacuccugggccuugucuccuuccugcuccugugugggagaucuugcagcacgaccuauaaaggaguguacgaacugcagacacucgagcuggacauggcgucccuuaacauguguaugccucugucuugcaccaagaauaacagccaucacuauaucaugguuggcaaugaaacagggcucgagcugacccuuacaaacaccuccauuaucaaucauaaauuuuguaaccugucugaugcucacaagaaaaaucucuacgaccaugcccugaugagcauuaucuccacguuccaccugagcauuccgaacuuuaaucaguaugaggccaugucuugcgauuucaacggaggccggaucuccgugcaguacaaucucagccacucuuaugcugucgacgccgcuaaccauuguggcaccauugccaauggggugcugcaaacauuuaugcgcauggcguggggaggcuccuacaucgcccuugauagcgggaagggaucuugggacugcaucaugaccuccuaccaguaucugauuauccagaacacaaccugggaagaucacugucaguucagcagacccuccccuauuggcuaccucgggcugcuuucucaacggacgcgcgacaucuauauuagcagacggcgcagaggaacauuuaccuggacacuguccgauagcgagggcaacgaaacccccggcggguacugccucacccgguggaugcugaucgaggcugagcugaaguguuucggaaauacagccguugcuaaaugcaacgaaaagcaugacgaggaauuuugcgauaugcuccgccuguucgacuuuuguaaacaggccaucagacggcuuaagacgccugcgcagaugucuauucagcugaucaauaaagccgugaacgcucucauuaaugaucaacugaucaugaagaaccaccuucgcgacauuaugggcauccccuauugcaauuacuccaaguauugguaccugaaccacaccgucacagggaaaaccagccucccuagauguuggcuggugucuaauggaagcuaccugaacgagacacauuucuccgacgauaucgaacagcaggccgacaauaugauuaccgagcuccugcaaaaggaguauaucgaucggcagggcaaaacgccgcuugggcugguggaccucuucgucuuuucuaccagcuucuaccugauuuccaucuuucugcaccuuguuaagauucccacacaucgccacaucaccggaaaaccuugccccaagccucauagacucaaccacaugggcauuuguagcugcggccuguauaaucaccccggggugccggugaaauggaagcggugaggacuagucccuguucccagagcccacuuuuuuuucuuuuuuugaaauaaaauagccugucuuucagaucucaaaggcucuuuucagagccaccaaaaaaaaaaaaaaaaaaaaaaaaaaaaaaaaaaaaaaaaaaaaaaaaaaaaaaaaaaaaaaaaaaaaaaaaaaaaaaaaaaaaaaaaaaaaaaaaaaaaa

SEQ ID NO: 23345 - RNA, 1745 nt, Artificial Sequence
  mRNA product Design a-1 (hSL-A100) comprising derived and/or modified sequence from LASV(Lassa virus/H.sapiens-wt/NGA/2016/ISTH_0017;Clade II)__AVO03567__GPCmut2 (opt5)
aggagagucccgcagucggcguccagcggcucugcuuguucgugugugugucguugcaggccuuauucaagcuuaccaugggccagaucauuaccuucuuucaagaggugccccacgucaucgaagagguuaugaacauugugcugaucgcccucagccugcuugcuauucugaaggggaucuacaauguggccacaugcggacucuucggccuggucuccuuucuucugcucugugggagaucuugcagcacgaccuauaaaggaguguacgaacugcagacacuggagcucgacauggcgucccugaacauguguaugccucuuucuugcaccaagaauaacagccaucacuauaucaugguuggcaaugaaacagggcuggagcucacccugacaaacaccuccauuaucaaucauaaauucuguaaccuuucugaugcucacaagaaaaaucuguacgaccaugcccucaugagcauuaucuccacguuucaccugagcauuccgaacuucaaucaguaugaggccaugucuugcgauuuuaacggaggcaagaucuccgugcaguacaaucugagccacaccuaugcuauugacgccgcuaaccauuguggcacaaucgccaaugggguccuccaaaccuucaugcggauggcguggggaggcucuuacaucgcccuggauuccgggaagggaagcugggacugcauuaugacaucuuaccaguaucuuaucauucagaacaccacgugggaagaucacugucaguuuucccgccccagcccuaucggcuaccuggggcuccugucccaaagaacacgggacauuuauaucucucgcagacggcgcggaaccuucacauggacccuuagcgauuccgagggcaacgaaacccccggcggguacugccugacaagauggaugcucaucgaggcugagcugaaauguuuuggaaauacggccguggcuaagugcaacgaaaaacaugacgaggaguucugcgauaugcugcggcucuuugacuucuguaagcaggccauucgcagacugaaaaccccugcgcagaugagcauccagcuuauuaauaaggccguuaacgcucugaucaaugaucaacucauuaugaagaaccaucugcgggacaucaugggcauccccuauugcaauuacucuaaauauugguaccuuaaccacacagugaccgggaagacaucccugccucgcuguuggcucgucagcaauggaucuuaccugaacgaaacccacuucagcgacgauauugaacagcaggccgacaauaugaucacggagcugcuccaaaaagaguauauggauagacagggcaagacaccgcuggggcuuguggaccuguuuguguucuccaccucuuuuuaccucauuagcaucuuccugcaccugguccggauucccacccaucgccacguuaucggaaaaccuugccccaagccucauagacuuaaccacaugggcauuuguuccugcggccucuauaaacaccccggggugccggugaaguggaagcggugaggacuagucccuguucccagagcccacuuuuuuuucuuuuuuugaaauaaaauagccugucuuucagaucucaaaggcucuuuucagagccaccaaaaaaaaaaaaaaaaaaaaaaaaaaaaaaaaaaaaaaaaaaaaaaaaaaaaaaaaaaaaaaaaaaaaaaaaaaaaaaaaaaaaaaaaaaaaaaaaaaaaa

SEQ ID NO: 23346 - RNA, 1745 nt, Artificial Sequence
  mRNA product Design a-1 (hSL-A100) comprising derived and/or modified sequence from LASV(Lassa virus/H.sapiens-wt/NGA/2018/ISTH_0959;Clade II)__AVV65099__GPCmut2 (opt5)
aggagagucccgcagucggcguccagcggcucugcuuguucgugugugugucguugcaggccuuauucaagcuuaccaugggccagaucauuaccuucuuucaagaggugccccacgucaucgaagagguuaugaacauugugcugaucgcccucagccugcuugcuauucugaaggggaucuacaauguggucacaugcggacucuucggccugguguccuuucuucugcucugugggagaucuugcagcacgaccuauaaaggaguuuacgaacugcagacacuggagcucgacauggccucccugaacauguguaugccucuuucuugcaccaagaauaacagccaucacuauaucauggugggcaaugaaacagggcuggagcucacccugacaaacaccuccauuaucaaucauaaauucuguaaccuuucugaugcgcacaagaaaaaucuguacgaccaugcucucaugagcauuaucuccacguuucaccugagcauuccgaacuucaaucaguaugaggccaugucuugcgauuuuaacggaggcaagaucuccguccaguacaaucugagccacgccuaugcuauugacgccgcuaaccauuguggcaccaucgccaauggggugcuccaaacauucaugcggauggcguggggaggcucuuacaucgcccuggauuccgggaagggaagcugggacugcauuaugaccucuuaccaguaucuuaucauucagaacacaaccugggaagaucacugucaguuuucccgccccagcccuaucggcuaccuggggcuccugucccaaagaacgcgggacauuuauaucucucgcagacggcgcggaacauucaccuggacacuuagcgauuccgagggcaacgaaacccccggcggguacugccugaccagauggaugcucaucgaggcugagcugaaauguuuuggaaauacagccguugcuaagugcaacgaaaaacaugacgaggaguucugcgauaugcugcggcucuuugacuucuguaagcaggccauucgcagacugaaaacgccugcgcagaugagcauccagcuuauuaauaaggccgugaacgcucugaucaaugaucaacucauuaugaagaaccaucugcgggacaucaugggcauccccuauugcaauuacucuaaauauugguaccuuaaccacaccgucacagggaagaccucccugccucgcuguuggcucgugagcaauggaucuuaccugaacgaaacacacuucagcgacgauauugaacagcaggccgacaauaugaucaccgagcugcuccaaaaagaguauauugauagacagggcaagacgccgcuggggcuuguggaccuguuugucuucuccacaucuuuuuaccucaucagcauuuuccugcaccugguuaaaauccccacccaucggcacgugauuggaaagccuugccccaaaccucaucgccuuaaccacaugggcaucuguuccugcggccucuauaagcaccccggggugccggucaaguggaaaagaugaggacuagucccuguucccagagcccacuuuuuuuucuuuuuuugaaauaaaauagccugucuuucagaucucaaaggcucuuuucagagccaccaaaaaaaaaaaaaaaaaaaaaaaaaaaaaaaaaaaaaaaaaaaaaaaaaaaaaaaaaaaaaaaaaaaaaaaaaaaaaaaaaaaaaaaaaaaaaaaaaaaaa

SEQ ID NO: 23347 - RNA, 1745 nt, Artificial Sequence
  mRNA product Design a-1 (hSL-A100) comprising derived and/or modified sequence from LASV(LASV003-NIG-2008;Clade II)__AIT17580__GPCmut2 (opt5)
aggagagucccgcagucggcguccagcggcucugcuuguucgugugugugucguugcaggccuuauucaagcuuaccaugggccagaucauuaccuucuuucaagaggugccccacgucaucgaagagguuaugaacauugugcugaucgcccucagccugcuugcuauucugaaggggaucuacaauguggccacaugcggacucuucggccuggucuccuuucuucugcucugugggagaucuugcagcacgaccuauaaaggaguguacgaacugcagacacuggagcucgacauggcgucccugaacauguguaugccucuuucuugcaccaagaauaacagccaucacuauaucaugguuggcaaugaaacagggcuggagcucacccugacaaacaccuccauuaucaaucauaaauucuguaaccuuucugaugcucacaagaaaaaucuguacgaccaugcccucaugagcauuaucuccacguuucaccugagcauuccgaacuucaaucaguaugaggccaugucuugcgauuuuaacggaggcaagaucuccgugcaguacaaucugagccacaccuaugcugucgacgccgcuaaccauuguggcacaauugccaauggggugcuccaaaccuucaugcggauggcguggggaggcucuuacaucgcccuggauuccgggaagggaagcugggacugcaucaugacaucuuaccaguaucuuauuauccagaacaccacgugggaagaucacugucaguuuucccgccccagcccuauuggcuaccuggggcuccugucccaaagaacacgggacaucuauauuucucgcagacggcgcggaaccuucacauggacccuuagcgauuccgagagcaacgaaacccccggcggcuacugccugacaagauggaugcucaucgaggcugagcugaaauguuuugggaauacggccguugcuaagugcaacgaaaaacaugacgaggaguucugcgauaugcugcggcucuuugacuucuguaagcaggccauccgcagacugaaagcgccugcccagaugucuauucagcuuaucaauaaggcugugaacgcccugauuaaugaucaacucaucaugaagaaccaucugcgggacauuaugggaauccccuauugcaauuacuccaaauauugguaccuuaaccacaccgucacaggccgcaccagccugccuagauguuggcucgugucuaaugggagcuaccugaacgaaacacacuucuccgacgauaucgaacagcaggcugacaauaugauuaccgagcugcuccaaaaggaguauauggaucggcagggaaaaacgccgcugggccuuguggaccuguuugucuucucuaccagcuuuuaccucaucuccauuuuccugcaccugguuaagauccccacacaucgccacgugauugggaaaccuugccccaagccucauagacuuaaccacaugggaaucuguagcugcggccucuauaaacaccccggcgugccggucaaguggaagcggugaggacuagucccuguucccagagcccacuuuuuuuucuuuuuuugaaauaaaauagccugucuuucagaucucaaaggcucuuuucagagccaccaaaaaaaaaaaaaaaaaaaaaaaaaaaaaaaaaaaaaaaaaaaaaaaaaaaaaaaaaaaaaaaaaaaaaaaaaaaaaaaaaaaaaaaaaaaaaaaaaaaaa

SEQ ID NO: 23348 - RNA, 1745 nt, Artificial Sequence
  mRNA product Design a-1 (hSL-A100) comprising derived and/or modified sequence from LASV(LASV035-NIG-2009;Clade II)__AIT17588__GPCmut2 (opt5)
aggagagucccgcagucggcguccagcggcucugcuuguucgugugugugucguugcaggccuuauucaagcuuaccaugggccagaucauuaccuucuuucaagaggugccccacgucaucgaagagguuaugaacauugugcugaucgcccucagccugcuugcuauucugaaggggaucuacaauguggccacaugcggacucuucggccuggucuccuuucuucugcucugugggagaucuugcagcacgaccuauaaaggaguguacgaacugcagacacuggagcucgacauggcgucccugaacauguguaugccucuuucuugcaccaagaauaacagccaucacuauaucaugguuggcaaugaaacagggcuggagcucacccugacaaacaccuccauuaucaaucauaaauucuguaaccuuucugaugcucacaagaaaaaucuguacgaccaugcccucaugagcauuaucuccacguuucaccugagcauuccgaacuucaaucaguaugaggccaugucuugcgauuuuaacggaggcaagaucuccgugcaguacaaucugagccacgcuuaugccgucgacgcugccaaccauuguggcaccauugcgaauggggugcuccaaacauucaugcggauggccuggggaggcucuuacaucgcucuggauuccgggaagggaagcugggacugcaucaugaccucuuaccaguaucuuauuauccagaacacaaccugggaagaucacugucaguuuucccgccccagcccuauuggcuaccuggggcuccugucccaaagaacgcgggacaucuauauuucucgcagacggcgcggaacauucaccuggacacuuagcgauuccgagggcaacgaaacccccggcggguacugccugaccagauggaugcucaucgaggccgagcugaaauguuuuggaaauacagcuguugccaagugcaacgaaaaacaugacgaggaguucugcgauaugcugcggcucuuugacuucuguaagcaggcgauccgcagacugaaagccccugcucagaugagcauucagcuuaucaauaaggccgugaacgcucugauuaaugaucaacucaucaugaagaaccaucugcgggacauuaugggcauccccuauugcaauuacucuaaauauugguaccuuaaccacacggucaccgggaagacaucccugccucgcuguuggcucgugagcaauggaucuuaccugaacgaaacccacuucagcgacgauaucgaacagcaggccgacaauaugauuacagagcugcuccaaaaagaguauaucgauagacagggcaagaccccgcuggggcuuguggaccuguuugucuucuccacgucuuuuuaccucauuagcaucuuccugcaccugguuaaaauucccacacaucggcacgugaucggaaagccuugccccaaaccucaucgccuuaaccacaugggcauuuguuccugcggccucuauaagcaccccggggugccggucaaguggaaaagaugaggacuagucccuguucccagagcccacuuuuuuuucuuuuuuugaaauaaaauagccugucuuucagaucucaaaggcucuuuucagagccaccaaaaaaaaaaaaaaaaaaaaaaaaaaaaaaaaaaaaaaaaaaaaaaaaaaaaaaaaaaaaaaaaaaaaaaaaaaaaaaaaaaaaaaaaaaaaaaaaaaaaa

SEQ ID NO: 23349 - RNA, 1745 nt, Artificial Sequence
  mRNA product Design a-1 (hSL-A100) comprising derived and/or modified sequence from LASV(LASV1000-NIG-2009;Clade II)__AIT17782__GPCmut2 (opt5)
aggagagucccgcagucggcguccagcggcucugcuuguucgugugugugucguugcaggccuuauucaagcuuaccaugggccagaucauuaccuucuuucaagaggugccccacgucaucgaagagguuaugaacauugugcugaucgcccucagccugcuugcuauucugaaggggaucuacaauguggccacaugcggacucuucggccuggucuccuuucuucugcucugugggagaucuugcagcacgaccuauaaaggaguguacgaacugcagacacuggagcucgacauggcgucccugaacauguguaugccucuuucuugcaccaagaauaacagccaucacuauaucaugguuggcaaugaaacagggcuggagcucacccugacaaacaccuccauuaucaaucauaaauucuguaaccuuucugaugcucacaagaaaaaucuguacgaccaugcccucaugagcauuaucuccacguuucaccugagcauuccgaacuucaaucaguaugaggccaugucuugcgauuuuaacggaggcaagaucuccgugcaguacaaucugagccacaccuaugcugucgacgccgcuaaccauuguggcacaauugccaauggggugcuccaaaccuucaugcggauggcguggggaggcucuuacaucgcccuggauuccgggaagggaagcugggacugcaucaugacaucuuaccaguaucuuauuauccagaacaccacgugggaagaucacugucaguuuucccgccccagcccuauuggcuaccuggggcuccugucccaaagaacacgggacaucuauauuucucgcagacggcgcggaaccuucacauggacccuuagcgauuccgagggcaacgaaacccccggcggguacugccugacaagauggaugcucaucgaggcugagcugaaauguuuuggaaauacggccguugcuaagugcaacgaaaaacaugacgaggaguucugcgauaugcugcggcucuuugacuucuguaagcaggccaucaaacgccugaagaccccugcgcagaugagcauucagcuuaucaauaaggccgugaacgcucugauuaaugaucaacucaucaugaaaaaccaccugagagacauuaugggcauccccuauugcaauuacucuaaguauugguaccuuaaccacacagucaccgggaaaacaucccugccucgguguuggcucgugagcaauggaucuuaccugaacgaaacccauuucagcgacgauaucgaacagcaggccgacaauaugauuacggagcugcuccaaaaggaguauaucgaucgccagggcaaaacaccgcuggggcuuguggaccuguuugucuucuccaccucuuuuuaccucauuagcaucuuccugcaccugguuaagauucccacccauagacacguggugggaaaaccuugccccaagccucaucggcuuaaccacaugggcaucuguuccugcggccucuauaagcaccccggggucccggugaaauggaagcgcugaggacuagucccuguucccagagcccacuuuuuuuucuuuuuuugaaauaaaauagccugucuuucagaucucaaaggcucuuuucagagccaccaaaaaaaaaaaaaaaaaaaaaaaaaaaaaaaaaaaaaaaaaaaaaaaaaaaaaaaaaaaaaaaaaaaaaaaaaaaaaaaaaaaaaaaaaaaaaaaaaaaaa

SEQ ID NO: 23350 - RNA, 1745 nt, Artificial Sequence
  mRNA product Design a-1 (hSL-A100) comprising derived and/or modified sequence from LASV(LASV221-NIG-2010;Clade II)__AIT17624__GPCmut2 (opt5)
aggagagucccgcagucggcguccagcggcucugcuuguucgugugugugucguugcaggccuuauucaagcuuaccaugggccagaucauuaccuucuuucaagaggugccccacgucaucgaagagguuaugaacauugugcugaucgcccucagccugcuugcuauucugaaggggaucuacaauguggccacaugcggacucuucggccuggucuccuuucuucugcucugugggagaucuugcagcacgaccuauaaaggaguguacgaacugcagacacuggagcucgacauggcgucccugaacauguguaugccucuuucuugcaccaagaauaacagccaucacuauaucaugguuggcaaugaaacagggcuggagcucacccugacaaacaccuccauuaucaaucauaaauucuguaaccuuucugaugcucacaagaaaaaucuguacgaccaugcccucaugagcauuaucuccacguuucaccugagcauuccgaacuucaaucaguaugaggccaugucuugcgauuuuaacggaggcaagaucuccgugcaguacaaucugagccacaccuaugcuauugacgccgcuaaccauuguggcacaaucgccaaugggguccuccaaaccuucaugcggauggcguggggaggcucuuacaucgcccuggauuccgggaagggaagcugggacugcauuaugacaucuuaccaguaucuuaucauucagaacaccacgugggaagaucacugucaguuuucccgccccagcccuaucggcuaccuggggcuccugucccaaagaacacgggacauuuauaucucucgcagacggcgcggaaccuucacauggacccuuagcgauuccgagggcaacgaaacccccggcggguacugccugacaagauggaugcucaucgaggcugagcugaaauguuuuggaaauacggccguggcuaagugcaacgaaaaacaugacgaggaguucugcgauaugcugcggcucuuugacuucuguaagcaggccauucgcagacugaaaaccccugcgcagaugagcauccagcuuauuaauaaggccguuaacgcucugaucaaugaucaacucauuaugaagaaccaucugcgggacaucaugggcauccccuauugcaauuacucuaaauauugguaccuuaaccacacagugaccgggaagacaucccugccucgcuguuggcucgucagcaauggaucuuaccugaacgaaacccacuucagcgacgauauugaacagcaggccgacaauaugaucacggagaugcugcaaaaagaguauauggauagacagggcaagacaccgcucgggcugguggaccuuuuuguguucuccaccucuuuuuaccugauuagcaucuuccuccaccuggucaaaauucccacccaucggcacguuaucggaaagccuugccccaaaccucaucgccugaaccacaugggcauuuguuccugcggccuuuauaagcaccccggggugccggugaaguggaaaagaugaggacuagucccuguucccagagcccacuuuuuuuucuuuuuuugaaauaaaauagccugucuuucagaucucaaaggcucuuuucagagccaccaaaaaaaaaaaaaaaaaaaaaaaaaaaaaaaaaaaaaaaaaaaaaaaaaaaaaaaaaaaaaaaaaaaaaaaaaaaaaaaaaaaaaaaaaaaaaaaaaaaaa

SEQ ID NO: 23351 - RNA, 1745 nt, Artificial Sequence
  mRNA product Design a-1 (hSL-A100) comprising derived and/or modified sequence from LASV(LASV237-NIG-2010;Clade II)__AIT17638__GPCmut2 (opt5)
aggagagucccgcagucggcguccagcggcucugcuuguucgugugugugucguugcaggccuuauucaagcuuaccaugggccagaucauuaccuucuuucaagaggugccccacgucaucgaagagguuaugaacauugugcugaucgcccucagccugcuugcuauucugaaggggaucuacaauguggccacaugcggacucuucggccuggucuccuuucuucugcucugugggagaucuugcagcacgaccuauaaaggaguguacgaacugcagacacuggagcucgacauggcgucccugaacauguguaugccucuuucuugcaccaagaauaacagccaucacuauaucaugguuggcaaugaaacagggcuggagcucacccugacaaacaccuccauuaucaaucauaaauucuguaaccuuucugaugcucacaagaaagaccuguacgaucaugcccucaugagcauuaucuccacguuucaccugagcauuccgaauuucaaccaguaugaggccaugucuugcgacuuuaauggaggcaagaucuccgugcaguacaaccugagccacaccuaugcugucgaugccgcuaaucauuguggcacaauugccaacggggugcuccaaaccuucaugcggauggcguggggaggcucuuacaucgcccuggacuccgggaagggaagcugggauugcaucaugacaucuuaccaguaucuuauuauccagaauaccacgugggaagaccacugucaguuuucccgccccagcccuauuggcuaccuggggcuccugucccaaagaacacgggauaucuauauuucucgcagacggcgcggaaccuucacauggacccuuagcgacuccgagggcaacgaaacccccggcggguacugccugacaagauggaugcucaucgaggcugagcugaaauguuuuggaaacacggccguugcuaagugcaaugaaaaacaugaugaggaguucugcgacaugcugcggcucuuugauuucuguaagcaggccauccgcagacugaaaaccccugcgcagaugagcauucagcuuaucaacaaggccgugaaugcucugauuaacgaccaacucaucaugaagaaucaucugcgggacauuaugggcauccccuauugcaacuacucuaaauauugguaccuuaaucacacagucaccgggaagacaucccugccucgcuguuggcucgugagcaacggaucuuaccugaaugaaacccacuucagcgaugacaucgaacagcaggccgauaacaugauuacggagcugcuccaaaaagaguauauggacagacagggcaagacaccgcuggggcuuguggaucuguuugucuucuccaccucuuuuuaccucaucagcauuuuccugcaccugaucaaaauucccacccaucggcacaucacaggaaagccuugccccaaaccucaucgccuuaaucacaugggcauuuguuccugcggccucuauaagcaccccgggguuccggugaaguggaaaagaugaggacuagucccuguucccagagcccacuuuuuuuucuuuuuuugaaauaaaauagccugucuuucagaucucaaaggcucuuuucagagccaccaaaaaaaaaaaaaaaaaaaaaaaaaaaaaaaaaaaaaaaaaaaaaaaaaaaaaaaaaaaaaaaaaaaaaaaaaaaaaaaaaaaaaaaaaaaaaaaaaaaaa

SEQ ID NO: 23352 - RNA, 1745 nt, Artificial Sequence
  mRNA product Design a-1 (hSL-A100) comprising derived and/or modified sequence from LASV(LASV253-NIG-2011;Clade II)__AIT17670__GPCmut2 (opt5)
aggagagucccgcagucggcguccagcggcucugcuuguucgugugugugucguugcaggccuuauucaagcuuaccaugggccagaucauuaccuucuuucaagaggugccccacgucaucgaagagguuaugaacauugugcugaucgcccucagccugcuugcuauucugaaggggaucuacaauguggccacaugcggacucuucggccuggucuccuuucuucugcucugugggagaucuugcagcacgaccuauaaaggaguguacgaacugcagacacuggagcucgacauggcgucccugaacauguguaugccucuuucuugcaccaagaauaacagccaucacuauaucaugguuggcaaugaaacagggcuggagcucacccugacaaacaccuccauuaucaaucauaaauucuguaaccuuucugaugcucacaagaaaaaucuguacgaccaugcccucaugagcauuaucuccacguuucaccugagcauuccgaacuucaaucaguaugaggccaugucuugcgauuuuaacggaggcaagaucuccgugcaguacaaucugagccacaccuaugcugucgacgccgcuaaccauuguggcacaauugccaauggggugcuccaaaccuucaugcggauggcguggggaggcucuuacaucgcccuggauuccgggaagggaagcugggacugcaucaugacaucuuaccaguaucuuauuauccagaacaccacgugggaagaucacugucaguuuucccgccccagcccuauuggcuaccuggggcuccugucccaaagaacacgggacaucuauauuucucgcagacggcgcggaaccuucacauggacccuuagcgauuccgagggcaacgaaacccccggcggguacugccugacaagauggaugcucaucgaggcugagcugaaauguuuuggaaauacggccguugcuaagugcaacgaaaaacaugacgaggaguucugcgauaugcugcggcucuuugacuucuguaagcaggccauccgcagacugaaagcgccugcccagaugagcauucagcuuaucaauaaggcugugaacgcccugauuaaugaucaacucaucaugaagaaccaucugcgggacauuaugggcauccccuauugcaauuacucuaaauauugguaccuuaaccacaccgucacagggcgcaccucccugccuagauguuggcucgugagcaauggaucuuaccugaacgaaacacacuucagcgacgauaucgaacagcaggcugacaauaugauuaccgagcugcuccaaaaggaguauaucgaucggcagggcaaaacgccgcuggggcuuguggaccuguuugucuucuccacaucuuuuuaccucauuagcaucuuccugcaccugguuaagauucccacccaucgccacaucauuggaaaaccuugccccaagccucauagacuuaaccacaugggcaucuguuccugcggccucuauaaacaccccggggugccggugaaguggaagcggugaggacuagucccuguucccagagcccacuuuuuuuucuuuuuuugaaauaaaauagccugucuuucagaucucaaaggcucuuuucagagccaccaaaaaaaaaaaaaaaaaaaaaaaaaaaaaaaaaaaaaaaaaaaaaaaaaaaaaaaaaaaaaaaaaaaaaaaaaaaaaaaaaaaaaaaaaaaaaaaaaaaaa

SEQ ID NO: 23353 - RNA, 1745 nt, Artificial Sequence
  mRNA product Design a-1 (hSL-A100) comprising derived and/or modified sequence from LASV(LASV254-NIG-2011;Clade II)__AIT17674__GPCmut2 (opt5)
aggagagucccgcagucggcguccagcggcucugcuuguucgugugugugucguugcaggccuuauucaagcuuaccaugggccagaucauuaccuucuuucaagaggugccccacgucaucgaagagguuaugaacauugugcugaucgcccucagccugcuugcuauucugaaggggaucuacaauguggccacaugcggacucuucggccuggucuccuuucuucugcucugugggagaucuugcagcacgaccuauaaaggaguguacgaacugcagacacuggagcucgacaugaccaaccugaauauguguaugccucuuuccugcacaaagaacaauucucaucacuauaucaugguuggcaacgaaaccgggcuggagcucacacugaccaauacgagcauuaucaaccauaaauucuguaaucuuuccgaugcgcacaagaaaaaccuguacaaucaugcucucaugucuauuaucagcaccuuucaccuguccauuccgaacuucaaucaguaugaggccaugagcugcgacuuuaacggaggcaagaucucugugcaguacaaucugucccacagcuaugccgucgaugcugccaaccauuguggcacaauugcuaacggggugcuccaaaccuucaugcggauggccuggggaggcucuuacaucgcgcuggacuccgggaagggaaauugggauugcaucaugacaagcuaccaguaucuuauuauccagaacaccacgugggaagaccacugucaguuuucucgccccuccccuauuggcuaccuggggcuccugagccaaagaacacgggauaucuauauuucccgcagacggcgcggaaccuucacauggacccuuucugacagcgagggcaaugaaacccccggcggguacugccugacaagauggaugcucaucgaggccgagcugaaauguuuuggaaacacggcuguugccaagugcaaugaaaaacaugaugaggaguucugcgacaugcugcggcucuuugauuucuguaagcaggcuauccgcagacugaaaaccccugcccaggcgaacauucagcuuaucaauaaggccgugaacgcucugauuaaugaccaacucaucaugaagaaccaucugcgggauauuaugggcauccccuauugcaauuacuccaaauauugguaccuuaaccacacagucaccgggaagacaagccugccucgcuguuggcucgugucuaauggauccuaccugaacgaaacccacuucagcgacgacaucgaacagcaggccgauaauaugauuacggagcugcuccaaaaagaguauauggacagacagggcaagacaccgcuggggcuuguggaucuguuugucuucucuaccagcuuuuaccucaucuccauuuuccugcaccugguuaaaauccccacccaucggcacgugauuggaaagccuugccccaaaccucaucgccuuaaccacaugggcaucuguucuugcggccucuauaagcaccccggggugccggucaaguggaaaagaugaggacuagucccuguucccagagcccacuuuuuuuucuuuuuuugaaauaaaauagccugucuuucagaucucaaaggcucuuuucagagccaccaaaaaaaaaaaaaaaaaaaaaaaaaaaaaaaaaaaaaaaaaaaaaaaaaaaaaaaaaaaaaaaaaaaaaaaaaaaaaaaaaaaaaaaaaaaaaaaaaaaaa

SEQ ID NO: 23354 - RNA, 1745 nt, Artificial Sequence
  mRNA product Design a-1 (hSL-A100) comprising derived and/or modified sequence from LASV(Nig08-A19;Clade III)__ADU56618__GPCmut2 (opt5)
aggagagucccgcagucggcguccagcggcucugcuuguucgugugugugucguugcaggccuuauucaagcuuaccaugggccagaucgugaccuucuuucaagaggucccccacguuauugaagaggugaugaacaucgugcugauugcccucagcauccuggcuauucuuaaggggcuguacaauaucgccacaugcggacucaucggccuggucacguuccuucugcucuccgggagaucuuguagcaugaccuauaaaggaguguacgaacugcagacacuggagcucaacaugaauacccugaacaugugcaugccucuuuccuguacaaagaauaacucucaucacuauauuaugguuggcaaugaaaccgggcuggagcucacacugaccaacacgagccuucugcaucacaaauuuugcaaucucuccgacgcgcauaagaaaaaccuguacgaucacacccugaugucuaucauuagcacauuccaccucuccaucccgaauuuuaaccaguaugaggcuaugagcugugacuucaauggaggcaagauuaccgugcaguacaaccugucucauuccuaugccaucgaugccgcuaaucacugcggcacagucgccaacggggugcuucaaaccuuuaugcggauggcuuggggaggcagcuacauugcccuggacucugggcgcggaaagugggauuguaucaugacguccuaccaguaucucaucauucagaacacaaccugggaagaccauugccaguucagcagacccucuccuaucggcuaccuggggcuucugucccaacggacacgcgauauuuauaucagcagacggcgcagaggaaccuuuaccuggacacucuccgacucugagggcaaugaaacgcccggcggguacugucugacccgguggaugcugauugaggcggagcucaaaugcuucggaaacacagccguugcuaaguguaaugaaaaacacgaugaggaauuuugcgacaugcugcgccuuuucgauuuuugcaagcaggccaucagacggcugaaagcuccugcccagaugagcauccagcucauuaacaaggcggugaaugcccugaucaacgaccaacuuauuaugaagaaucaucugcgcgauaucaugggcauucccuauuguaacuacuccaaauauugguaccucaaucacaccagcacagggagaaccucucugccucggugcuggcuggucuccaacggaagcuaccucaaugagacgcacuucucugacgacaucgaacagcaggcugauaacaugaucacagagaugcugcaaaaggaguaucuugaccgccagggcaaaaccccgcuggggcucguggaucuguucguguuuagcaccuccuucuaccugauuucuaucuuucuucaucucgucaagauucccacacacagacauaucguuggaaaaccuugucccaagccucaccggcugaaucacaugggcauuugcagcuguggccuguauaaacagcccggggugccggugagauggaagcgcugaggacuagucccuguucccagagcccacuuuuuuuucuuuuuuugaaauaaaauagccugucuuucagaucucaaaggcucuuuucagagccaccaaaaaaaaaaaaaaaaaaaaaaaaaaaaaaaaaaaaaaaaaaaaaaaaaaaaaaaaaaaaaaaaaaaaaaaaaaaaaaaaaaaaaaaaaaaaaaaaaaaaa

SEQ ID NO: 23355 - RNA, 1748 nt, Artificial Sequence
  mRNA product Design a-1 (hSL-A100) comprising derived and/or modified sequence from LASV(G1180-SLE-2010;Clade IV)__AIT17168__GPCmut2 (opt5)
aggagagucccgcagucggcguccagcggcucugcuuguucgugugugugucguugcaggccuuauucaagcuuaccaugggccagaucgugaccuucuuucaagaggucccccacguuauugaagaggugaugaacaucgugcugauugcccucagcauccuggcuguccuuaaggggcuguacaauuucgccacaugcggacucgugggccugcuuacguuucugcuccugugugggagauccugcaccgcgucucgguauaaaggaguuuacgaacugcagacacucgagcugaacauggaaacccuuaauauguguaugccucugagcugcacaaagaacaauucccaucacuauauuauggugggcaacgagaccgggcucgagcugacacuuaccaauacgucuaucaucaaccauaaauucuguaaucugagcgacgcucacaagaaaaaccucuacgaucaugcccugauguccauuaucucuaccuuucaccugagcauuccgaauuucaaccaguaugaagccauguccugcgacuuuaauggaggcaagaucagcguccaguacaaccucucucacuccuaugcuggcgaugccgcuaaucauugugggacaguggccaacggaguucugcaaaccuucaugcgcauggcguggggcgggagcuacauugcccuugacucuggacacggcuccugggauugcaucaugacaagcuaccaguaucugauuauccagaacaccacgugggaggaccauugucaguuuucuagacccuccccuaucggguaccucggacugcuuagccaacggacacgcgauauuuauaucuccagacggcgcagaggcaccuucacauggacccugucugacagcgaaggcaaggauacccccgggggauacugccucacacgguggaugcugauugaggcugagcugaaauguuuuggcaauacggccguggcuaagugcaacgaaaaacacgacgaggaguucugcgauaugcuccgccuguuugacuucuguaagcaggccauccagagacuuaaagcgccugcccagauguccauucaacugaucaauaaggcugucaacgcccucaucaaugaucagcugauuaugaagaaccaccuucgggacaucauggggauucccuauugcaauuacagcaaauauugguaccugaaccauaccacaaccggaaagacaucucucccuaaauguuggcugguguccaauggcagcuaccugaacgaaacccacuucucugacgauaucgaacagcaagcugacaauaugauuacggagaugcuccagaaggaguauauggaacgccaggggaaaacaccgcugggacuuguggaucuguuugucuucagcaccuccuuuuaccucaucucuaucuuccugcaucugguuaagauucccacccacagacauaucgugggcaaaagcugcccuaagccccaccggcuuaaccacaugggcauuuguuccugcgggcucuauaagcagccuggagugcccgucaaauggaagcgcugaggacuagucccuguucccagagcccacuuuuuuuucuuuuuuugaaauaaaauagccugucuuucagaucucaaaggcucuuuucagagccaccaaaaaaaaaaaaaaaaaaaaaaaaaaaaaaaaaaaaaaaaaaaaaaaaaaaaaaaaaaaaaaaaaaaaaaaaaaaaaaaaaaaaaaaaaaaaaaaaaaaaa

SEQ ID NO: 23356 - RNA, 1748 nt, Artificial Sequence
  mRNA product Design a-1 (hSL-A100) comprising derived and/or modified sequence from LASV(G1442-SLE-2011;Clade IV)__AIT17180__GPCmut2 (opt5)
aggagagucccgcagucggcguccagcggcucugcuuguucgugugugugucguugcaggccuuauucaagcuuaccaugggccagaucgugaccuucuuucaagaggucccccacguuauugaagaggugaugaacaucgugcugauugcccucagcauccuggcuguccuuaaggggcuguacaauguggccacaugcggacucauuggccugguuacguuccuucugcucugugggagauccugcaccacaacccuguauaaaggaguguacgaacugcagacacucgagcugaacauggaaacccuuaauauguguaugccucugucuugcacaaagaacaauagccaucacuauauccgggucggcaacgagaccgggcucgagcugacgcuuaccaauacauccaucauuaaccauaaauuuuguaaucugucugacgcgcacaagaaaaaccucuacgaucaugcucugaugagcaucauuuccaccuuccaccugucuaucccgaauuuuaaccaguaugaagccaugagcugcgacuucaauggaggcaagauuuccgugcaguacaaccucagccacucuuaugccggcgaugcugccaaucauugugggacaguugcuaacggagugcugcaaaccuuuaugcgcauggccuggggcggguccuacaucgcgcuugacagcggaagaggcaacugggauugcauuaugacgucuuaccaguaucugaucauccagaauacaaccugggacgaucacugucaguucucccggcccagcccuauuggguaccucggacugcuuucucaacgcacaagagacgucuauaucucccggcgcagacggggcaccuuuaccuggacacugagcgauuccgagggcaaggacacgcccgggggauacugccucacccgcuggaugcugauugaagccgagcugaaauguuucggcaacacagcuguggccaagugcaaugagaaacaugaugaagaguuuugcgacaugcucagacuguucgauuuuuguaagcaggcuauccagcggcuuaaagccccugcgcagaugucuauucaacugaucaacaaggccgugaaugcucucaucaacgaccagcugauuaugaagaaucaccuucgcgacaucauggggauucccuauugcaacuacagcaaauauugguaccugaauaacaccgccacaggaaagaccucccucccuaaauguuggcugaucagcaauggcucuuaccugaacgaaacgcacuucuccgaugacauugagcaggaagcugauaauaugaucacagagaugcuccaaaaggaguauauggaaagacaggggaaaaccccgcugggacuugucgaccuguucguuuuuagcaccucuuucuaccucaucagcauuuuucugcaucuggugaagauccccacacaccggcauauugugggcaaauccugcccuaagccccaccgccuuaaccauaugggcaucuguucuugcgggcucuauaagcagccuggaguccccgugagauggaaacggugaggacuagucccuguucccagagcccacuuuuuuuucuuuuuuugaaauaaaauagccugucuuucagaucucaaaggcucuuuucagagccaccaaaaaaaaaaaaaaaaaaaaaaaaaaaaaaaaaaaaaaaaaaaaaaaaaaaaaaaaaaaaaaaaaaaaaaaaaaaaaaaaaaaaaaaaaaaaaaaaaaaaa

SEQ ID NO: 23357 - RNA, 1748 nt, Artificial Sequence
  mRNA product Design a-1 (hSL-A100) comprising derived and/or modified sequence from LASV(G3010-SLE-2013;Clade IV)__AIT17344__GPCmut2 (opt5)
aggagagucccgcagucggcguccagcggcucugcuuguucgugugugugucguugcaggccuuauucaagcuuaccaugggccagaucgugaccuucuuucaagaggucccccacguuauugaagaggugaugaacaucgugcugauugcccucagcauccuggcuguccuuaaggggcuguacaauuucgccacaugcggacucgugggccugguuacguuucuucugcucugugggagauccugcaccacaucucuguauaaaggaguguacgaacugcagacccucgagcugaacauggaaacacuuaauauguguaugccucugagcugcaccaagaacaauucccaucacuauauuauggucggcaacgagacagggcucgagcugacccuuacgaauaccucuaucaucaaccauaaauucuguaaucugagcgacgcgcacaagaaaaaccucuacaaucaugcucugauguccauuaucucuacauuucaccugagcauuccgaacuucaaucaguaugaagccauguccugcgauuuuaacggaggcaagaucagcgugcaguacaaucucucucacuccuaugccggcgacgcugccagccauugugggaccguugcuaacggagugcugcaaacauucaugcggauggccuggggcgggucuuacauugcgcuugauuccggauacggcaagugggacugcaucaugaccagcuaucaguaccugauuauccagaacacgacaugggaggaucacugucaguuuucucgccccuccccuaucggguaucucggacugcuuagccaaagaacccgggacauuuacaucucccgcagacggcgcggcacauucaccuggacccugucugauagcgaaggcaaagacacacccgggggauauugccucacgagauggaugcugauugaggccgagcugaaguguuuuggcaauaccgcugucgccaaaugcaacgaaaagcaugaugaggaguucugcgacaugcuccggcuguuugauuucuguaaacaggcuauccagcgccuuaagaccccugcccagauguccauucaacugaucaauaaggcggugaacgcccucaucaaugaccagcugauuaugaaaaaccaccuuagagauaucauggggauucccuacugcaauuauagcaaguacugguaccugaaccacacaacaaccggaaaaacgucucucccuaaguguuggcugguguccaauggcagcuaucugaacgaaacacauuucucugacgacaucgaacagcaagcugauaauaugauuaccgagaugcuccagaaagaguacauggaacggcaggggaagaccccgcugggacuugucgaccuguuuguuuucagcacauccuuuuaucucaucucuaucuuccugcaccuggugaaaauucccacccaucgccacaucgugggcaagagcugcccuaagccccauagacuuaaccacaugggcauuuguuccugcgggcucuacaaacagccuggaguccccgugcgguggaagcgcugaggacuagucccuguucccagagcccacuuuuuuuucuuuuuuugaaauaaaauagccugucuuucagaucucaaaggcucuuuucagagccaccaaaaaaaaaaaaaaaaaaaaaaaaaaaaaaaaaaaaaaaaaaaaaaaaaaaaaaaaaaaaaaaaaaaaaaaaaaaaaaaaaaaaaaaaaaaaaaaaaaaaa

SEQ ID NO: 23358 - RNA, 1748 nt, Artificial Sequence
  mRNA product Design a-1 (hSL-A100) comprising derived and/or modified sequence from LASV(G502-SLE-2009;Clade IV)__AIT17126__GPCmut2 (opt5)
aggagagucccgcagucggcguccagcggcucugcuuguucgugugugugucguugcaggccuuauucaagcuuaccaugggccagaucgugaccuucuuucaagaggucccccacguuauugaagaggugaugaacaucgugcugauugcccucagcauccuggcuguccuuaaggggcuguacaauuucgccacaugcggacucgugggccugcuuacguuucugcuccugugugggagauccugcaccacaggacuguauaaaggcguuuacgaacuccagacccuggagcuuaacauggaaacacugaauauguguaugccucucucuugcaccaagaacaauagccaucacuauauuaugguggggaacgagacaggacuggagcuuacccugacgaauaccuccaucaucaaccauaaauucuguaaucucucugacgcgcacaagaaaaaccuguacgaucaugcucugaugagcauuaucuccacauuucaccucucuauuccgaauuucaaccaguaugaagccaugagcugcgacuuuaauggcggcaagaucuccguccaguacaaccugagccacucuuaugccggggaugcugccgaccauuguggaaccguggcuaauggcguucuucaaacauucaugcggauggccuggggaggguccuacauugcgcuggauagcggccgcgggagaugggacugcaucaugaccucuuaccaguaucucauuauccagaacacgacaugggaggaucacugucaguuuucccggcccagcccuaucggauaccugggccuucugucucaacgcaccagagacauuuauaucucccggcgcagacggggcacauucaccuggacccucagcgauuccgaagggaaggacacacccggaggcuacugccugacgcgcuggaugcugauugaggccgagcucaaauguuuugggaacaccgcuguggccaagugcaaugaaaaacaugaugaggaguucugcgacaugcugagacuuuuugauuucuguaagcaggcuauccagcggcugaaagccccugcgcagaugucuauucaacucaucaacaaggccgucaaugcucugaucaacgaccagcuugugaugaagaaucaucugcgcgacauuaugggaauccccuauugcaacuacagcagauauugguaccucaaucacacaaccacaggccggaccucccugccuaaauguuggcuggugagcaacgggucuuaccucaaugaaacgcacuucuccgaugacauugaacagcaagccgauaacaugaucacagagaugcugcagaaggaguauauggaacgccagggaaaaaccccgcuuggccuggucgaccucuuuguuuucagcaccucuuuuuaccugauuagcaucuuccugcaccuugugaagauccccacacauagacacauugugggcaaauccugcccuaagccccaucggcucaaucacauggggaucuguucuugcggacuguauaaacagccuggcguccccgugaaguggaagagaugaggacuagucccuguucccagagcccacuuuuuuuucuuuuuuugaaauaaaauagccugucuuucagaucucaaaggcucuuuucagagccaccaaaaaaaaaaaaaaaaaaaaaaaaaaaaaaaaaaaaaaaaaaaaaaaaaaaaaaaaaaaaaaaaaaaaaaaaaaaaaaaaaaaaaaaaaaaaaaaaaaaaa

SEQ ID NO: 23359 - RNA, 1748 nt, Artificial Sequence
  mRNA product Design a-1 (hSL-A100) comprising derived and/or modified sequence from LASV(G733-SLE-2010;Clade IV)__AIT17154__GPCmut2 (opt5)
aggagagucccgcagucggcguccagcggcucugcuuguucgugugugugucguugcaggccuuauucaagcuuaccaugggccagaucgugaccuucuuucaagaggucccccacguuauugaagaggugaugaacaucgugcugauugcccucagcauccuggcuguccuuaaggggcuguacaauuucgccacaugcggaauugugggccucguuuccuuucugcuucugugugggagaucuugcacgaccagccucuauaaaggaguguacgaacugcagacacuggagcucaacauggaaacccugaauauguguaugccucuuuccugcacaaagaacaauucucaucacuauaucauggucggcaacgagaccgggcuggagcucacacugaccaauacgagcaucauuaaccauaaauucuguaaucuuuccgacgcgcacaagaaaaaccuguacgaucaugcucucaugucuaucauuagcaccuuucaccuguccaucccgaauuucaaccaguaugaagccaugagcugcgacuuuaauggaggcaagauuucugugcaguacaaccugucccacagcuaugccggcgaugcugccaaucauugugggacaaucgcuaacggaguucuccaaaccuucaugcggauggccuggggcgggucuuacauugcgcuggacuccggacgcgauagaugggacugcaucaugacaagcuaccaguaucuuaucauucagaacaccacgugggaggaucacugucaguuuucucggcccuccccuaucggcuaccuggggcuccugagccaacgcacaagagacauuuauaucucccggcgcagacggggaaccuucacauggacccuuucugauagcgaaggcaaggacacccccggcggguacugccugacacgcuggaugcucauugaggccgagcugaaauguuuuggaaauacggcuguggccaagugcaacgaaaaacaugaugaggaguucugcgacaugcugagacucuuugauuucuguaagcaggcuauccagcggcugaaagccccugcgcagauguccauccaacuuauuaauaaggccgucaacgcucugaucaaugaccagcucauuaugaagaaccaucugcgcgacaucaugggcauucccuauugcaauuacagcaaauauugguaccuuaaccacaccacaaccgggaagacaucucugccuaaauguuggcucguguccaauggaagcuaccugaacgaaacccacuucucugaugacaucgaacagcaagccgauaauaugaucacggagaugcugcagaaggaguauauggaaagacagggcaaaacaccgcucgggcugguggaccuuuuugucuucagcaccuccuuuuaccugauuucuaucuuccuccaccugguuaagauucccacccaucggcacguggugggaaaaagcugcccuaagccccaucgccugaaccacaugggcaucuguuccugcggccuuuaugggcagccuggaguccccgugaaguggaaaagaugaggacuagucccuguucccagagcccacuuuuuuuucuuuuuuugaaauaaaauagccugucuuucagaucucaaaggcucuuuucagagccaccaaaaaaaaaaaaaaaaaaaaaaaaaaaaaaaaaaaaaaaaaaaaaaaaaaaaaaaaaaaaaaaaaaaaaaaaaaaaaaaaaaaaaaaaaaaaaaaaaaaaa

SEQ ID NO: 23360 - RNA, 1748 nt, Artificial Sequence
  mRNA product Design a-1 (hSL-A100) comprising derived and/or modified sequence from MOPV/LASV reassortant(IGS-1;Clade IV)__AFY05576__GPCmut2 (opt5)
aggagagucccgcagucggcguccagcggcucugcuuguucgugugugugucguugcaggccuuauucaagcuuaccaugggccagaucgugaccuucuuucaagaggucccccacguuauugaagaggugaugaacaucgugcugauugcccucagcguccuggcugugcuuaaggggcuguacaauuucgccacaugcggacucguuggccuggugacguuucuucugcucugugggagauccugcaccacaucucuguauaaaggagucuacgaacugcagacccucgagcugaacauggaaacacuuaauauguguaugccucugagcugcaccaagaacaauucccaucacuauaucauggugggcaacgagacagggcucgagcugacccuuacgaauaccucuauuaucaaccauaaauucuguaaucugagcgacgcgcacaagaaaaaccucuacgaucaugcucugauguccaucauuucuacauuucaccugagcaucccgaauuucaaccaguaugaagccauguccugcgacuuuaauggaggcaagauuagcguucaguacaaccucucucacuccuaugccggcgaugcugccaaucauugugggaccguggcuaacggaguccugcaaacauucaugcggauggccuggggcgggagcuacaucgcgcuugacucuggacgcggcaacugggauugcauuaugaccuccuaccaguaucugaucauucagaauacgacaugggaggaccacugucaguuuagcagacccucuccuaucggguaccucggacugcuuucccaacggacccgcgauaucuauauuagcagacggcgcagaggcacauucaccuggacccuguccgacucugaaggcgaggauacacccgggggauacugccucacgcgguggaugcugaucgaggccgaacugaaguguuuuggcaacaccgcuguggccaaaugcaaugagaagcaugacgaagaguucugcgauaugcuccgccuguuugacuucuguaaacaggcuauucagagacuuaaggccccugcgcagaugagcauccaacugauuaacaaagccgugaaugcucucaucaacgaucagcugaucaugaagaaucaccuucgggacauuauggggauccccuauugcaacuacuccaaguauugguaccugaaucacacaaccacaggacgcaccagccucccuaaauguuggcuggucucuaacggcuccuaccugaaugaaacgcauuucagcgacgauauugagcagcaagccgacaacaugaucacagagaugcuccagaaggaauauauggagagacaggggaaaaccccgcugggacuuguugaucuguuuguguucucuaccagcuuuuaccucauuuccaucuuccugcaccuggugaagauccccacacaucggcacauugucggcaaaucuugcccuaagccccaucgccuuaaucacaugggcaucuguagcugcgggcucuauaaacagccuggagugcccguuaaguggaagagaugaggacuagucccuguucccagagcccacuuuuuuuucuuuuuuugaaauaaaauagccugucuuucagaucucaaaggcucuuuucagagccaccaaaaaaaaaaaaaaaaaaaaaaaaaaaaaaaaaaaaaaaaaaaaaaaaaaaaaaaaaaaaaaaaaaaaaaaaaaaaaaaaaaaaaaaaaaaaaaaaaaaaa

SEQ ID NO: 23361 - RNA, 1748 nt, Artificial Sequence
  mRNA product Design a-1 (hSL-A100) comprising derived and/or modified sequence from LASV(LM765-SLE-2012;Clade IV)__AIT17814__GPCmut2 (opt5)
aggagagucccgcagucggcguccagcggcucugcuuguucgugugugugucguugcaggccuuauucaagcuuaccaugggccagaucgugaccuucuuucaagaggucccccacguuauugaagaggugaugaacaucgugcugauugcccucagcauccuggcuguccuuaaggggcuguacaauuucgccacaugcggacucgugggccugguuacguuucuucugcucugugggagauccugcaccacaucucuguauaaaggaguguacgaacugcagacccucgagcugaacauggaaacacuuaauauguguaugccucugagcugcaccaagaacaauucccaucacuauauuauggucggcaacgagacagggcucgagcugacccuuacgaauaccucuaucaucgaccauaaauucuguaaccugagcgaugcgcaccggaagaaucucuacgaccaugcucugauguccauuaucucuacauuucaccugagcauuccgaacuucaaucaguaugaagccauguccugcgauuuuaacggaggcaaaaucagcgugcaguacaaucucucucacuccuaugccaaggacgcugccgaucauuguggcaccguugcuaacggggugcugcaaacauucaugcgcauggccuggggaggcagcuacauugcgcuugacucugggagaggacggugggauugcaucaugaccuccuaccaguaucugauuauccagaauacgacaugggaggaccacugucaguuuagccgccccucuccuaucggcuaccucgggcugcuuucccaaagaacccgggauauuuauaucagccgcagacggcgcggaacauucaccuggacccuguccgacucugaaggcaaggauacacccggcggguacugccucacgagauggaugcugauugaggccgagcugaaauguuuuggaaacaccgcugucgccaagugcaacgaaaaacaugacgaggaguucugcgauaugcuccggcuguuugacuucuguaagcaggcuauccagcgccuuaaagccccugcgcagaugagcauucaacugaucaauaaggccgugaacgcucucaucaaugaccagcugauuaugaagaaccaccuuagagauaucaugggcauucccuauugcaauuacuccaaauauugguaccugaaccacacaaccacagggaagaccagccucccuaaauguuggcuggugucuaauggauccuaccugaacgaaacgcauuucagcgacgauaucgaacagcaagccgacaauaugauuacagagaugcuccagaaggaguauauggaacggcagggcaaaaccccgcuggggcuugucgaucuguuuguuuucucuaccagcuuuuaccucaucuccaucuuccugcaccuggugaagauucccacacaucgccacaucgugggaaaaccuugccccaagccucauagacuuaaccacaugggcauuuguucuugcggccucuauaagcagcccggggucccggugaaauggaagcggugaggacuagucccuguucccagagcccacuuuuuuuucuuuuuuugaaauaaaauagccugucuuucagaucucaaaggcucuuuucagagccaccaaaaaaaaaaaaaaaaaaaaaaaaaaaaaaaaaaaaaaaaaaaaaaaaaaaaaaaaaaaaaaaaaaaaaaaaaaaaaaaaaaaaaaaaaaaaaaaaaaaaa

SEQ ID NO: 23362 - RNA, 1748 nt, Artificial Sequence
  mRNA product Design a-1 (hSL-A100) comprising derived and/or modified sequence from LASV(LM776-SLE-2012;Clade IV)__AIT17824__GPCmut2 (opt5)
aggagagucccgcagucggcguccagcggcucugcuuguucgugugugugucguugcaggccuuauucaagcuuaccaugggccagaucgugaccuucuuucaagaggucccccacguuauugaagaggugaugaacaucgugcugauugcccucagcauccuggcuguccuuaaggggcuguacaauuucgccacaugcggacucgugggccugguuacguuucuucugcucugugggagauccugcaccacaucuguguauaaaggagucuacgaacugcagacccuggagcucaacauggaaacacugaauauguguaugccucuuagcugcaccaagaacaauucccaucacuauauuauggugggcaacgagacagggcuggagcucacccugacgaauaccucuaucaucaaccauaaauucuguaaucuuagcgacgcgcacaagaaaaaccuguacgaucaugcucucauguccauuaucucuacauuucaccugagcauuccgaauuucaaccaguaugaagccauguccugcgacuuuaauggaggcaagaucagcguucaguacaaccugucucacuccuaugccggcgaugcugccaaucauugugggaccguggcuaacggaguccuccaaacauucaugcggauggccuggggcgggagcuacauugcgcuggacucuggacacggcaagugggauugcaucaugaccuccuaccaguaucuuauuauccagaacacgacaugggaggaccauugucaguuuagccgccccucuccuaucggguaccugggacuccugucccaaagaacccgggauauuuauaucagccgcagacggcgcggcacauucaccuggacccuuuccgacucugaaggcaaagauacacccgggggauacugccugacgagauggaugcucauugaggccgagcugaaguguuuuggcaauaccgcuguggccaaaugcaacgaaaagcacgacgaggaguucugcgauaugcugcggcucuuugacuucuguaaacaggcuauccagcgccugaaggccccugcgcagaugagcauucaacuuaucaauaaggccgugaacgcucugaucaaugaucagcucauuaugaaaaaccaccugagagacaucauggggauucccuauugcaauuacuccaaguauugguaccuuaaccauacaaccacaggaaaaaccagccugccuaaguguuggcucgucucuaauggcuccuaccugaacgaaacgcacuucagcgacgauaucgaacagcaagccgacaauaugauuacagagaugcugcagaaagaguauauggaacggcaggggaagaccccgcucggacugguugaucuuuuuguguucucuaccagcuuuuaccugaucuccaucuuccuccaucuggugaaaauucccacacaccgccauaucgucggcaagucuugcccuaagccccacagacugaaccacaugggcauuuguagcugcgggcuuuauaaacagccuggagugcccguucgguggaagcgcugaggacuagucccuguucccagagcccacuuuuuuuucuuuuuuugaaauaaaauagccugucuuucagaucucaaaggcucuuuucagagccaccaaaaaaaaaaaaaaaaaaaaaaaaaaaaaaaaaaaaaaaaaaaaaaaaaaaaaaaaaaaaaaaaaaaaaaaaaaaaaaaaaaaaaaaaaaaaaaaaaaaaa

SEQ ID NO: 23363 - RNA, 1748 nt, Artificial Sequence
  mRNA product Design a-1 (hSL-A100) comprising derived and/or modified sequence from LASV(Mad39;Clade IV)__ANH09722__GPCmut2 (opt5)
aggagagucccgcagucggcguccagcggcucugcuuguucgugugugugucguugcaggccuuauucaagcuuaccaugggccagaucgugaccuucuuucaagaggucccccacguuauugaagaggugaugaacaucgugcugauugcccucagcauccuggcuguccuuaaggggcuguacaauguggccacaugcggacucauuggccugguuacguuccuucugcucugugggagauccugcaccacaacccuguauaaaggaguguacgaacugcaggcgcucgagcugaacauggaaacacuuaauauguguaugccucugucuugcaccaagaacaauagccaucacuauauccgggucggcaacgagacagggcucgagcugacccuuacgaauaccucccugaucaaccauaaauuuuguaaucucucugacgcucacaagaaaaaccuguacgaucaugcccugaugagcauuaucuccacauuccaccucucuauuccgaauuuuaaccaguaugaagccaugagcugcgacuucaaugauggaaagaucuccgugcaguacaaccugagccacaccuaugcuggcgacacagccaaucauuguggcaccguugcuaacggggugcuucaaacguuuaugcgcauggccuggggaggcucuuacauugcgcuggauuccgggagaggaggcugggacugcaucaugacaagcuaccaguaucucauuauccagaacaccacaugggaggaucacugucaguucucucggcccuccccuaucggguaccugggacuucugagccaacgcaccagagacauuuauaucucucggcgcagacggggcaccuuuacauggacgcucuccgauagcgaaggcaaggacacccccgggggauacugccugacacgcuggaugcugauugaggccgagcucaaauguuucggcaauaccgcugucgccaagugcaacgaaaaacaugaugaggaauuuugcgacaugcugagacuuuucgauuuuuguaagcaggcuauccagcggcugaaagccccugcgcagauguccauucaacucaucaauaaggccgugaacgcucugaucaaugaccagcuuauuaugaagaaccaucugcgcgacaucauggggauucccuauugcaauuacucuaaauauugguaccucaaccacacagugaccggaaagacgagccugccuaaauguuggcuggucuccaauggcagcuaccucaacgagacacacuucucugaugacaucgaacagcaagccgauaauaugauuaccgagaugcugcagaaggaguauauggaaagacaggggaaaaccccgcuuggacugguugaccucuucguguuuuccaccagcuucuaccugaucucuaucuuucugcaccuugugaagauucccacacaucggcacgucgugggcaaaccuugccccaagccucaucgccucaaccacaugggcaucuguagcugcggguucuauaagcagcccggaguuccggugagauggaaacggugaggacuagucccuguucccagagcccacuuuuuuuucuuuuuuugaaauaaaauagccugucuuucagaucucaaaggcucuuuucagagccaccaaaaaaaaaaaaaaaaaaaaaaaaaaaaaaaaaaaaaaaaaaaaaaaaaaaaaaaaaaaaaaaaaaaaaaaaaaaaaaaaaaaaaaaaaaaaaaaaaaaaa

SEQ ID NO: 23364 - RNA, 1748 nt, Artificial Sequence
  mRNA product Design a-1 (hSL-A100) comprising derived and/or modified sequence from LASV(Z0947-SLE-2011;Clade IV)__AIT17840__GPCmut2 (opt5)
aggagagucccgcagucggcguccagcggcucugcuuguucgugugugugucguugcaggccuuauucaagcuuaccaugggccagaucgugaccuucuuucaagaggucccccacguuauugaagaggugaugaacaucgugcugauugcccucagcauccuggcuguccuuaaggggcuguacaauuucgccacaugcggacucgugggccugguuacguuucuucugcucugugggagauccugcaccauuucucuguauaaaggaguguacgaacugcagacacucgagcugaacauggaaacccuuaauauguguaugccucugagcugcacaaagaacaauucccaucacuauaucauggucggcaacgagaccgggcucgagcugacacuuaccaauacgucuaucauuaaccauaaauucuguaaucugagcgacgcgcacaagaaaaaccucuacgaucaugcucugauguccaucauuucuaccuuucaccugagcaucccgaauuucaaccaguaugaagccauguccugcgacuuuaauggaggcaagauuagcgugcaguacaaccucucucacuccuaugccggcgaugcugccaaucauugugggacaguugcuaacggagugcugcaaaccuucaugcggauggccuggggcgggagcuacaucgcgcuugacucuggacgcgauagaugggacugcauuaugacauccuaccaguaucugaucauccagaacaccacgugggaggaucacugucaguuuagccggcccucuccuauuggcuaccucgggcugcuuucccaacgcacaagagacaucuauauuagccggcgcagacggggaaccuucacauggacccuguccgauucugaaggcaaggacacccccggcggguacugccucacacgcuggaugcugaucgaggccgagcugaaauguuuuggaaauacggcugucgccaagugcaacgaaaaacaugaugaggaguucugcgacaugcucagacuguuugauuucuguaagcaggcuauucagcggcuuaaagccccugcgcagaugagcauccaacugaucaauaaggccgugaacgcucucauuaaugaccagcugaucaugaagaaccaccuucgcgacauuaugggcauccccuauugcaauuacuccaaauauugguaccugaaccacaccacaaccgggaagacaagccucccuaaauguuggcuggugucuaauggauccuaccugaacgaaacccauuucagcgaugacauugaacagcaagccgauaauaugaucacggagaugcuccagaaggaguauauggaaagacagggcaaaacaccgcuggggcuugucgaccuguuuguuuucucuaccagcuuuuaccucaucuccauuuuccugcaccuggugaagauccccacccaucggcacauugugggaaaaccuugccccaagccucaucgccuuaaccacaugggcaucuguucuugcggccucuauaagcagcccggggucccggugaaauggaagagaugaggacuagucccuguucccagagcccacuuuuuuuucuuuuuuugaaauaaaauagccugucuuucagaucucaaaggcucuuuucagagccaccaaaaaaaaaaaaaaaaaaaaaaaaaaaaaaaaaaaaaaaaaaaaaaaaaaaaaaaaaaaaaaaaaaaaaaaaaaaaaaaaaaaaaaaaaaaaaaaaaaaaa

SEQ ID NO: 23365 - RNA, 1724 nt, Artificial Sequence
  mRNA product Design a-1 (A100) comprising derived and/or modified sequence from LASV(Josiah;Clade IV)__NP_694870__GPCmut2 (opt1)
aggagagucccgcagucggcguccagcggcucugcuuguucgugugugugucguugcaggccuuauucaagcuuaccaugggccagaucgugaccuucuuccaggaggucccccacgugaucgaggaggugaugaacaucguccugaucgcccucagcgugcuggccgugcugaaggggcucuacaacuucgcgaccugcggccuggucgggcuggugacguuccuccugcugugcggccgcuccugcaccaccagccucuacaaggggguguacgagcugcagacccuggagcucaacauggagacgcugaacaugugcaugccgcuguccugcaccaagaacaacagccaccacuacaucauggucggcaacgagaccggccucgagcugacgcugaccaacaccuccaucaucaaccacaaguucugcaaccucagcgacgcccacaagaagaaccuguacgaccacgcccugauguccaucaucagcaccuuccaccucuccauccccaacuucaaccaguacgaggccaugagcugcgacuucaacgggggcaagaucuccgugcaguacaaccugagccacuccuacgccggggacgcggccaaccacugcggcacgguggccaacgggguccugcagaccuucaugcggauggccuggggcggcagcuacaucgcgcucgacuccgggcgcggcaacugggacugcaucaugaccagcuaccaguaccugaucauccagaacaccacgugggaggaccacugccaguucucccggcccagccccaucggguaccugggccuccugucccagcgcacccgggacaucuacaucagccgccggcgccggggcaccuucaccuggacgcugagcgacuccgaggggaaggacaccccgggcggguacugccugacccgcuggaugcucaucgaggccgagcugaagugcuucggcaacaccgccguggccaagugcaacgagaagcacgacgaggaguucugcgacaugcugcggcuguucgacuucugcaagcaggccauccagcgccugaaggcgcccgcccagaugagcauccagcugaucaacaaggccgugaacgcccucaucaacgaccagcugaucaugaagaaccaccuccgggacaucauggggauccccuacugcaacuacuccaaguacugguaccucaaccacacgaccaccggccgcaccagccugcccaagugcuggcuggucuccaacggcagcuaccucaacgagacgcacuucuccgacgacaucgagcagcaggccgacaacaugaucaccgagaugcugcagaaggaguacauggagcggcaggggaagacgccccugggccucguggaccuguucguguucagcaccuccuucuaccugaucagcaucuuccugcaccucgucaagaucccgacccaccgccacaucguggggaaguccugccccaagccccaccggcugaaccacaugggcaucugcagcugcgggcuguacaagcagcccggcgugccggucaaguggaagcgcugaggacuagucccuguucccagagcccacuuuuuuuucuuuuuuugaaauaaaauagccugucuuucagaucuaaaaaaaaaaaaaaaaaaaaaaaaaaaaaaaaaaaaaaaaaaaaaaaaaaaaaaaaaaaaaaaaaaaaaaaaaaaaaaaaaaaaaaaaaaaaaaaaaaaa

SEQ ID NO: 23366 - RNA, 1721 nt, Artificial Sequence
  mRNA product Design a-1 (A100) comprising derived and/or modified sequence from LASV(LP;Clade I)__AAF86701__GPCmut2 (opt1)
aggagagucccgcagucggcguccagcggcucugcuuguucgugugugugucguugcaggccuuauucaagcuuaccaugggccagaucaucaccuucuuccaggaggugccccacgucaucgaggaggugaugaacaucgugcugaucgcccucagccugcuggccauccucaaggggcuguacaacaucgcgaccugcggcaucaucgggcuggucgccuuccucuuccugugcggcaaguccugcagccugacgcucaagggcggguacgagcugcagacccuggagcucaacauggagacccugaacaugugcaugccgcuguccugcacgaagaacagcucccaccacuacauccgcgugggcaacgagaccgggcucgagcugacccugaccaacacgagcaucaucaaccacaaguucugcaaccucuccgacgcccacaagaagaaccuguacgaccacgcccugaugagcaucaucuccaccuuccaccucagcauccccaacuucaaccaguacgaggccauguccugcgacuucaacggcgggaagaucagcgugcaguacaaccugucccacagcuacgcgggcgacgccgccgagcacugcgggaccgucgccaacggcgugcugcagaccuucaugcggauggcguggggcgggcgcuacaucgcccucgacuccggcaaggggaacugggacugcaucaugacgagcuaccaguaccugaucauccagaacaccaccugggaggaccacugccaguucucccggcccagccccaucggcuaccugggccuccugucccagcgcacccgggacaucuacaucagccgccggcgccgggggacguucaccuggacccugagcgacuccgagggcaacgagacccccgggggcuacugccugacgcgcuggaugcucaucgaggccgagcugaagugcuucgggaacaccgccguggccaagugcaacgagaagcacgacgaggaguucugcgacaugcugcggcuguucgacuucugcaagcaggcgauccgccggcugaaggcccccgcccagaugagcauccagcugaucaacaaggccgucaacgcccucaucaacgaccagcugaucaugaagaaccaccuccgcgacaucaugggcauccccuacugcaacuacuccaaguacugguaccucaaccacaccagcuccggccggaccagccugcccaagugcuggcugaucuccaacgggagcuaccucaacgagacgcaguucuccgacgacaucgagcagcaggcggacaacaugaucaccgagaugcugcagaaggaguacaucgagcgccagggcaagaccccgcuggggcucguggacaucuucaucuucagcaccuccuucuaccugaucagcaucuuccugcaccugaucaagaucccgacgcaccggcacaucgugggcaagcccugccccaagccccaccgccucaaccacaugggggucugcuccugcggccuguacaagcacccgggcgugcccaccaaguggaagcggugaggacuagucccuguucccagagcccacuuuuuuuucuuuuuuugaaauaaaauagccugucuuucagaucuaaaaaaaaaaaaaaaaaaaaaaaaaaaaaaaaaaaaaaaaaaaaaaaaaaaaaaaaaaaaaaaaaaaaaaaaaaaaaaaaaaaaaaaaaaaaaaaaaaaa

SEQ ID NO: 23367 - RNA, 1721 nt, Artificial Sequence
  mRNA product Design a-1 (A100) comprising derived and/or modified sequence from LASV(803213;Clade II)__AAF86703__GPCmut2 (opt1)
aggagagucccgcagucggcguccagcggcucugcuuguucgugugugugucguugcaggccuuauucaagcuuaccaugggccagaucaucaccuucuuccaggaggugccccacgucaucgaggaggugaugaacaucgugcugaucgcccucagccugcuggccauccucaaggggaucuacaacgucgcgaccugcggccuguucgggcugaucuccuuccuccugcugugcggccgcagcugcuccgugacguacaaggggguguacgagcuccagacccuggagcugaacauggccaaccucaacaugugcaugccgcugagcugcaccaagaacaacucccaccacuacaucauggucggcaacgagacgggccuggagcucacccugaccaacaccagcaucaucaaccacaaguucugcaaccuguccgacgcccacaagaagaaccucuacgaccacgcccugaugagcaucaucuccacguuccaccugagcauccccaacuucaaccaguacgaggccauguccugcgacuucaacgggggcaagaucagcgugcaguacaaccucucccacagcuucgcgguggacgccgccaaccacugcgggaccaucgccaacggcguccugcagaccuucaugcggauggcguggggcggguccuacaucgcccuggacagcggcaaggggaacugggacugcaucaugaccuccuaccaguaccucaucauccagaacacgaccugggaggaccacugccaguucagccgccccucccccaucggcuaccuggggcugcucagccagcggacccgcgacaucuacaucagccggcgccgccggggcaccuucacguggacccucuccgacagcgagggcaacgaggcccccgggggcuacugccugacccgguggaugcugaucgaggccgagcucaagugcuucgggaacaccgccguggcgaagugcaacgagaagcacgacgaggaguucugcgacaugcugcgccuguucgacuucugcaagcaggccaucaagcggcucaagacgcccgcccagauguccauccagcugaucaacaaggccgugaacgcccugaucaacgaccagcucaucaugaagaaccaccuccgcgacaucaugggcauccccuacugcaacuacagccgguacugguaccugaaccacaccgucaccgggaagaccucccugccccgcugcuggcuggugagcaacggcuccuaccugaacgagacgcacuucagcgacgacaucgagcagcaggcggacaacaugaucaccgagaugcuccagaaggaguacauggaccggcagggcaagaccccgcuggggcugguggaccucuucgucuucuccaccagcuucuaccugaucuccaucuuccugcaccuggugaagaucccgacgcaccgccacaucgugggcaagcccugccccaagccccaccggcucaaccacauggggaucugcagcugcggccuguacaagcacccggggguccccgugaaguggaagcgcugaggacuagucccuguucccagagcccacuuuuuuuucuuuuuuugaaauaaaauagccugucuuucagaucuaaaaaaaaaaaaaaaaaaaaaaaaaaaaaaaaaaaaaaaaaaaaaaaaaaaaaaaaaaaaaaaaaaaaaaaaaaaaaaaaaaaaaaaaaaaaaaaaaaaa

SEQ ID NO: 23368 - RNA, 1721 nt, Artificial Sequence
  mRNA product Design a-1 (A100) comprising derived and/or modified sequence from LASV(GA391;Clade III)__CAA36645__GPCmut2 (opt1)
aggagagucccgcagucggcguccagcggcucugcuuguucgugugugugucguugcaggccuuauucaagcuuaccaugggccagaucgugaccuucuuccaggaggucccccacgugaucgaggaggugaugaacaucguccugaucgcccucagcauccuggccauccugaaggggcucuacaacguggcgaccugcggccugaucgggcuggugacguuccuccugcuguccggccgcagcugcucccucaucuacaaggggaccuacgagcugcagacccuggagcucaacauggagacccugaacaugugcaugccgcugagcugcaccaagaacaacucccaccacuacauccgggucggcaacgagaccggccucgagcugacccugacgaacaccagcauccucaaccacaaguucugcaaccuguccgacgcccacaagcgcaaccuguacgaccacagccucauguccaucaucagcaccuuccaccuguccauccccaacuucaaccaguacgaggccaugagcugcgacuucaacgggggcaagaucaccgugcaguacaaccugucccacagcuucgccguggacgccgcggggcacugcggcacgcucgccaacgggguccugcagaccuucaugcggauggccuggggcggcuccuacaucgcccuggacagcgggcgcggcaacugggacugcaucaugaccuccuaccaguaccucaucauccagaacaccacgugggacgaccacugccaguucagccggcccucccccaucggguaccugggccugcucagccagcgcacccgggacaucuacaucagccgccggcgccggggcaccuucaccuggacgcucuccgacagcgaggggaacgagaccccgggcggguacugccugacccgcuggaugcugaucgaggcggagcucaagugcuucggcaacaccgccguggccaagugcaacgagaagcacgacgaggaguucugcgacaugcugcggcuguucgacuucugcaagcaggccauccgccggcucaagacgcccgcccagauguccauccagcugaucaacaaggcggugaacgcccugaucaacgaccagcucaucaugaagaaccaccuccgcgacaucauggggauccccuacugcaacuacagccgguacugguaccugaaccacaccuccaccggcaagaccagccugccccgcugcuggcugaucuccaacggcagcuaccugaacgagacgaaguucuccgacgacaucgagcagcaggccgacaacaugaucaccgagaugcuccagaaggaguacaucgaccggcaggggaagacgccccugggccuggucgaccuguucguguucagcaccuccuucuaccucaucagcaucuuccugcaccuggugaagaucccgacccaccgccacaucgucgggaagcccugccccaagccccaccggcucaaccacaugggcaucugcuccugcgggcuguacaagcagccgggcgugcccgugcgcuggaagcggugaggacuagucccuguucccagagcccacuuuuuuuucuuuuuuugaaauaaaauagccugucuuucagaucuaaaaaaaaaaaaaaaaaaaaaaaaaaaaaaaaaaaaaaaaaaaaaaaaaaaaaaaaaaaaaaaaaaaaaaaaaaaaaaaaaaaaaaaaaaaaaaaaaaaa

SEQ ID NO: 23369 - RNA, 1724 nt, Artificial Sequence
  mRNA product Design a-1 (A100) comprising derived and/or modified sequence from LASV(AV;Clade V)__CCA30314__GPCmut2 (opt1)
aggagagucccgcagucggcguccagcggcucugcuuguucgugugugugucguugcaggccuuauucaagcuuaccaugggccagaucgugaccuucuuccaggaggucccccacgugaucgaggaggugaugaacaucguccugaucgcccucagcauccuggccgugcugaaggggcucuacaacaucgcgaccugcggccugaucgggcugaucacguuccuccugcugugcggccgcuccugcagcuccaaccucuacaaggggguguacgagcugcagagccuggaccucaacauggagacccugaacaugugcaugccgcuguccugcaccaagaacaacagccaccacuacauccgggucggcaacgacacgggccucgagcugacccugaccaacaccuccauccucaaccacaaguucugcaaccugagcgacgcccacaagaaggaccuguacgaccacgcccucauguccaucaucagcacguuccaccuguccauccccaacuucaaccaguacgaggccaugagcugcgacuucaacgggggcaagaucuccgugcaguacaaccugagccacuccuacgccaucgacgcggccaaccacugcgggaccguggccaacggcauccuccagaccuucaugcgcauggccuggggcgggagcuacaucgcgcuggacuccggccgggggaacugggacugcaucaugaccagcuaccaguaccugaucauccagaacacgaccugggagaaccacugccaguucucccgccccagccccaucggcuaccucgggcugcugagccagcggacccgcgacaucuacaucucccggcgccgccggggcaccuucacguggacccugagcgacuccgagggcaacgccacccccgggggcuacugccucacccgguggaugcugaucgaggccgagcugaagugcuucgggaacacggccgucgccaagugcaacgagaagcacgacgaggaguucugcgacaugcuccgccuguucgacuucugcaagcaggcgaucagccggcugaagucccccgcccagaugagcauccagcucaucaacaaggccgugaacgcccugaucaacgaccagcugaucaugaagaaccaccuccgcgacaucaugggcauccccuacugcaacuacuccaaguacugguaccugaaccacaccaucaccgggaagaccagccugcccaagugcuggcucguguccaacggcagcuaccugaacgagacgcacuucuccgacgacaucgagcagcaggccgacaacaugaucaccgagaugcugcagaaggaguacauggagcggcagggcaagaccccgcucgggcuggucgaccuguucguguucagcaccuccuucuaccugaucagcaucuuccuccgccuggugaagaucccgacgcaccggcacaucgucggcaagcccugccccaagccccaccgccugaaccacauggggaucugcuccugcggccucuacaagcagccgggggugcccgugcgguggaagcgcugaggacuagucccuguucccagagcccacuuuuuuuucuuuuuuugaaauaaaauagccugucuuucagaucuaaaaaaaaaaaaaaaaaaaaaaaaaaaaaaaaaaaaaaaaaaaaaaaaaaaaaaaaaaaaaaaaaaaaaaaaaaaaaaaaaaaaaaaaaaaaaaaaaaaa

SEQ ID NO: 23370 - RNA, 1721 nt, Artificial Sequence
  mRNA product Design a-1 (A100) comprising derived and/or modified sequence from LASV(Togo/2016/7082;Clade VI)__AMR44577__GPCmut2 (opt1)
aggagagucccgcagucggcguccagcggcucugcuuguucgugugugugucguugcaggccuuauucaagcuuaccaugggccagaucaucaccuucuuccaggaggugccccacgucaucgaggaggugaugaacaucgugcugaucgcccucagccugcuggccauccucaagggggucuacaacguggcgaccugcggcaucaucgggcuggugacguuccuguuccucugcggccgcuccugcagccugaucuacaagggguccuacgagcugcagacccucgagcugaacauggagacccugaacaugugcaugccgcucagcugcacgaagaacuccagccaccacuacauccgggucggcaacgagaccggccuggagcugacccucaccaacacguccaucaucaaccacaaguucugcaaccugagcgacgcccacaagcgcaaccuguacgaccacgcccucauguccauccugagcaccuuccaccuguccauccccaacuucaaccaguacgaggccaugagcugcgacuucaacgggggcaagaucuccgugcaguacaaccucagccacgccuacgcgguggacgccgccgagcacugcgggaccgucgccaacggcgugcugcagaccuucaugcggauggcguggggcggguccuacaucgcccuggacagcggccgcgggaacugggacugcaucaugacguccuaccaguaccucaucauccagaacaccaccugggaggaccacugccaguucagccggcccucccccaucggcuaccuggggcugcucagccagcgcacccgggacaucuacaucagccgccggcgccggggcacguucaccuggacccucuccgacagcgagggcaacgagacccccgggggcuacugccugacgcgcuggaugcugaucgaggccgagcucaagugcuucgggaacaccgccguggccaagugcaacgagaagcacgacgaggaguucugcgacaugcugcggcuguucgacuucugcaagcaggcgauccagcgccucaagucccccgcccagaugagcauccagcugaucaacaaggccgucaacgcccugaucaacgaccagcucaucaugaagaaccaccuccgggacaugaugggcauccccuacugcaacuacuccaaguacugguaccugaaccacaccagcuccgggcgcaccagccugcccaagugcuggcugguguccaacggcagcuaccugaacgagacgcacuucuccgacgacaucgagcagcaggccgacaacaugaucaccgagaugcuccagaaggaguacaucgaccggcagggcaagaccccgcuggggcugguggaccucuucgucuucagcaccuccuucuaccugaucagcaucuuccugcaccugaucaagaucccgacgcaccgccacaucgugggcaagcccugccccaagccccaccggcucaaccacauggggaucugcuccugcggccuguacaagcagccgggggugcccacccgcuggaagcggugaggacuagucccuguucccagagcccacuuuuuuuucuuuuuuugaaauaaaauagccugucuuucagaucuaaaaaaaaaaaaaaaaaaaaaaaaaaaaaaaaaaaaaaaaaaaaaaaaaaaaaaaaaaaaaaaaaaaaaaaaaaaaaaaaaaaaaaaaaaaaaaaaaaaa

SEQ ID NO: 23371 - RNA, 1721 nt, Artificial Sequence
  mRNA product Design a-1 (A100) comprising derived and/or modified sequence from LASV(KAK-428;Clade n.d. (VII))__ANH09740__GPCmut2 (opt1)
aggagagucccgcagucggcguccagcggcucugcuuguucgugugugugucguugcaggccuuauucaagcuuaccaugggccagaucgugaccuucuuccaggaggucccccacgugaucgaggaggugaugaacaucguccugaucgcccucagccugcuggccauccucaaggggcuguacaacuucgcgaccugcggcgugaucgggcugaucacguuccuccugcugugcggccgcuccugcagcgccaccuacaaggggcaguacgagcuccagacccuggagcugaacauggagucccucaacaugugcaugccgcugagcugcacgaagaacaacucccaccacuacauccgggccggcaacaacaccggccuggagcucacccugaccaacacgagcaucaucucccacaaguucugcaaccugagcgacgcccacaagaagaaccucuacgaccacacccugauguccaucaucaccaccuuccaccugagcauccccaacuucaaccaguacgaggccauguccugcgacuucaacgggggcaagaucagcauccaguacaaccucucccacagcuacgcgggggacgccgcccagcacugcggcacgguggccaacgggguccugcagaccuucaugcgcauggcguggggcggcuccuaccuggcccucgacagcgggcggcgcggcugggacugcaucaucuccagcuaccaguaccugaucauccagaacaccaccugggacgaccacugccaguucucccggcccagccccaucggguaccugggcuucgugagccagaagacgcgcgacaucuacaucucccggcgccgccggggcaccuucaccuggacccugagcgacuccgaggggcacgacaugccgggcggguacugccucacgcgguggaugcugaucgaggccgaccugaagugcuucggcaacaccgccguggccaagugcaacgagaagcacgacgaggaguucugcgacauguggcgccucuucgacuucugcaagcaggcgauccagcggcugaaggcccccgcccagaugaacauccagcugaucaacaaggccgucaacgcccucaucaacgaccagcugaugaugaagaaccaccuccgcgacaucauggggauccccuacugcaacuacagcaaguucugguaccugaacaacaccaccacgggccggaccucccugccccgcugcuggcugaucagcaacggcuccuaccucaacgagacccacuucagcgacgacaucgagcagcaggcggacaacaugaucaccgagaugcugcagaaggaguacauggaccggcaggggaagacgccccugggccucguggaccuguucguguucuccaccagcuucuaccugaucaccaucuuccuccaccuggucaagaucccgacccaccgccacaucguggggaagcccugccccaagccccaccggcugaaccacaugggcaucugcuccugcgggcuguacaagcagccgggcgugcccguccgcuggaagcggugaggacuagucccuguucccagagcccacuuuuuuuucuuuuuuugaaauaaaauagccugucuuucagaucuaaaaaaaaaaaaaaaaaaaaaaaaaaaaaaaaaaaaaaaaaaaaaaaaaaaaaaaaaaaaaaaaaaaaaaaaaaaaaaaaaaaaaaaaaaaaaaaaaaaa

SEQ ID NO: 23372 - RNA, 1721 nt, Artificial Sequence; identical to SEQ ID NO: 23366
  mRNA product Design a-1 (A100) comprising derived and/or modified sequence from LASV(Pinneo-NIG-1969;Clade I)__AIT17836__GPCmut2 (opt1)

SEQ ID NO: 23373 - RNA, 1721 nt, Artificial Sequence
  mRNA product Design a-1 (A100) comprising derived and/or modified sequence from LASV(ISTH0009-NIG-2011;Clade II)__AIT17404__GPCmut2 (opt1)
aggagagucccgcagucggcguccagcggcucugcuuguucgugugugugucguugcaggccuuauucaagcuuaccaugggccagaucaucaccuucuuccaggaggugccccacgucaucgaggaggugaugaacaucgugcugaucgcccucagccugcuggccauccucaaggggaucuacaacgucgcgaccugcggccuguucgggcugguguccuuccuccugcugugcggccgcagcugcuccacgaccuacaaggggguguacgagcuccagacccuggagcuggacauggccagccucaacaugugcaugccgcuguccugcacgaagaacaacagccaccacuacaucauggucggcaacgagaccggccuggagcucacccugaccaacacguccaucaucaaccacaaguucugcaaccugagcgacgcccacaagaagaaccucuacgaccacgcccugauguccaucaucagcaccuuccaccuguccauccccaacuucaaccaguacgaggccaugagcugcgacuucaacgggggcaagaucuccgugcaguacaaccucagccacgcguacgccguggacgccgccaaccacugcgggaccaucgcgaacggcguccugcagaccuucaugcggauggccuggggcggguccuacaucgcccuggacagcggcaagggguccugggacugcaucaugacgagcuaccaguaccucaucauccagaacaccaccugggaggaccacugccaguucucccgccccagccccaucggcuaccuggggcugcucagccagcggacccgcgacaucuacaucucccggcgccgccggggcacguucaccuggacccucagcgacuccgagggcaacgagacccccgggggcuacugccugacgcgguggaugcugaucgaggccgagcucaagugcuucgggaacaccgccguggcgaagugcaacgagaagcacgacgaggaguucugcgacaugcugcgccuguucgacuucugcaagcaggccauccggcgccucaagacccccgcccagaugagcauccagcugaucaacaaggccgugaacgcccugaucaacgaccagcucaucaugaagaaccaccuccgggacaucaugggcaucccguacugcaacuacuccaaguacugguaccugaaccacaccgucacggggaagaccagccugccccgcugcuggcugguguccaacggcagcuaccugaacgagacccacuucuccgacgacaucgagcagcaggcggacaacaugaucaccgagcuccugcagaaggaguacauggaccggcagggcaagacgccccuggggcucguggaccuguucgucuucagcaccuccuucuaccugaucagcaucuuccugcaccucaucaagaucccgacccaccgccacaucaccggcaagcccugccccaagccccaccggcugaaccacauggggaucugcuccugcggccuguacaagcacccgggggugcccgugaaguggaagcgcugaggacuagucccuguucccagagcccacuuuuuuuucuuuuuuugaaauaaaauagccugucuuucagaucuaaaaaaaaaaaaaaaaaaaaaaaaaaaaaaaaaaaaaaaaaaaaaaaaaaaaaaaaaaaaaaaaaaaaaaaaaaaaaaaaaaaaaaaaaaaaaaaaaaaa

SEQ ID NO: 23374 - RNA, 1721 nt, Artificial Sequence
  mRNA product Design a-1 (A100) comprising derived and/or modified sequence from LASV(ISTH2010-NIG-2012;Clade II)__AIT17482__GPCmut2 (opt1)
aggagagucccgcagucggcguccagcggcucugcuuguucgugugugugucguugcaggccuuauucaagcuuaccaugggccagaucaucaccuucuuccaggaggugccccacgucaucgaggaggugaugaacaucgugcugaucgcccucagccugcuggccauccucaaggggaucuacaacgucgcgaccugcggccuguucgggcugguguccuuccuccugcugugcggccgcagcugcuccacgaccuacaaggggguguacgagcuccagacccuggagcuggacauggccagccucaacaugugcaugccgcuguccugcacgaagaacaacagccaccacuacaucauggucggcaacgagaccggccuggagcucacccugaccaacacguccaucaucaaccacaaguucugcaaccugagcgacgcccacaagaagaaccucuacgaccacgcccugauguccaucaucagcaccuuccaccuguccauccccaacuucaaccaguacgaggccaugagcugcgacuucaacgggggcaagaucuccgugcaguacaaccucagccacgcguacgccguggacgccgccaaccacugcgggaccaucgcgaacggcguccugcagaccuucaugcggauggccuggggcggguccuacaucgcccuggacagcggcaagggguccugggacugcaucaugacgagcuaccaguaccucaucauccagaacaucaccugggaggaccacugccaguucucccgccccagccccaucggcuaccuggggcugcucagccagcggacccgcgacaucuacaucucccggcgccgccggggcaccuucacguggacccucagcgacuccgagggcaacgagacccccgggggcuacugccugacccgguggaugcugaucgaggccgagcucaagugcuucgggaacacggccguggcgaagugcaacgagaagcacgacgaggaguucugcgacaugcugcgccuguucgacuucugcaagcaggccauccggcgccucaagacccccgcccagaugagcauccagcugaucaacaaggccgugaacgcccugaucaacgaccagcucaucaugaagaaccaccuccgggacaucaugggcauccccuacugcaacuacuccaaguacugguaccugaaccacaccgucaccgggaagacgagccugccccgcugcuggcugguguccaacggcagcuaccugaacgagacccacuucuccgacgacaucgagcagcaggcggacaacaugaucaccgagcuccugcagaaggaguacaucgaccggcagggcaagaccccgcuggggcucguggaccuguucgucuucagcacguccuucuaccugaucagcaucuuccugcaccucgugaagaucccgacccaccgccacguggucggcaagcccugccccaagccccaccggcugaaccacauggggaucugcuccugcggccuguacaagcacccgggggugcccgugaaguggaagcgcugaggacuagucccuguucccagagcccacuuuuuuuucuuuuuuugaaauaaaauagccugucuuucagaucuaaaaaaaaaaaaaaaaaaaaaaaaaaaaaaaaaaaaaaaaaaaaaaaaaaaaaaaaaaaaaaaaaaaaaaaaaaaaaaaaaaaaaaaaaaaaaaaaaaaa

SEQ ID NO: 23375 - RNA, 1721 nt, Artificial Sequence
  mRNA product Design a-1 (A100) comprising derived and/or modified sequence from LASV(Lassa virus/H.sapiens-wt/NGA/2015/ISTH_0543;Clade II)__AVO03639__GPCmut2 (opt1)
aggagagucccgcagucggcguccagcggcucugcuuguucgugugugugucguugcaggccuuauucaagcuuaccaugggccagaucaucaccuucuuccaggaggugccccacgucaucgaggaggugaugaacaucgugcugaucgcccucagccugcuggccauccucaaggggaucuacaacgucgcgaccugcggccuguucgggcugguguccuuccuccugcugugcggccgcagcugcuccacgaccuacaaggggguguacgagcuccagacccuggagcuggacauggccaaccucaacaugugcaugccgcugagcugcacgaagaacaacucccaccacuacaucauggucggcaacgagaccggccuggagcucacccugaccaacacgagcaucaucaaccacaaguucugcaaccuguccgacgcccacaagaagaaccucuacgaccacgcccugaugagcaucaucuccaccuuccaccugagcauccccaacuucaaccaguacgaggccauguccugcgacuucaacgggggcaagaucagcgugcaguacaaccucucccacaccuacgcgguggacgccgccaaccacugcgggaccaucgccaacggcguccugcagacguucaugcggauggcguggggcgggagcuacaucgcccuggacuccggcaaggggagcugggacugcaucaugaccuccuaccaguaccucgugauccagaacaccaccugggaggaccacugccaguucagccgccccucccccaucggcuaccuggggcugcucagccagcggacgcgcgacaucuacaucagccggcgccgccggggcaccuucaccuggacccucuccgacagcgagggcaacgagacgcccgggggcuacugccugacccgguggaugcugaucgaggccgagcucaagugcuucgggaacaccgccguggccaagugcaacgagaagcacgacgaggaguucugcgacaugcugcgccuguucgacuucugcaagcaggcgauccggcgccucaagacccccgcccagauguccauccagcugaucaacaaggccgucaacgcccugaucaacgaccagcucaucaugaagaaccaccuccgggacaucaugggcauccccuacugcaacuacagcaaguacugguaccugaaccacacggugaccgggaagaccucccugccccgcugcuggcuggugagcaacggcuccuaccugaacgagacccacuucagcgacgacaucgagcagcaggccgacaacaugaucacggagcuccugcagaaggaguacaucgaccggcagggcaagaccccgcuggggcucgucgaccuguucguguucuccaccagcuucuaccugaucuccaucuuccugcaccucgugaagaucccgacccaccgccacaucacgggcaagcccugccccaagccccaccggcugaaccacauggggaucugcagcugcggccuguacaagcacccggggguccccgugaaguggaagcgcugaggacuagucccuguucccagagcccacuuuuuuuucuuuuuuugaaauaaaauagccugucuuucagaucuaaaaaaaaaaaaaaaaaaaaaaaaaaaaaaaaaaaaaaaaaaaaaaaaaaaaaaaaaaaaaaaaaaaaaaaaaaaaaaaaaaaaaaaaaaaaaaaaaaaa

SEQ ID NO: 23376 - RNA, 1721 nt, Artificial Sequence
  mRNA product Design a-1 (A100) comprising derived and/or modified sequence from LASV(Lassa virus/H.sapiens-wt/NGA/2016/ISTH_0009;Clade II)__AVO03571__GPCmut2 (opt1)
aggagagucccgcagucggcguccagcggcucugcuuguucgugugugugucguugcaggccuuauucaagcuuaccaugggccagaucaucaccuucuuccaggaggugccccacgucaucgaggaggugaugaacaucgugcugaucgcccucagccugcuggccauccucaaggggaucuacaacgucgcgaccugcggccugcuggggcucguguccuuccugcugcucugcggccgcagcugcuccacgaccuacaaggggguguacgagcugcagacccuggagcucgacauggccagccugaacaugugcaugccgcuguccugcacgaagaacaacagccaccacuacaucauggucggcaacgagaccggccucgagcugacccugaccaacacguccaucaucaaccacaaguucugcaaccucagcgacgcccacaagaagaaccuguacgaccacgcccugauguccaucaucagcaccuuccaccucuccauccccaacuucaaccaguacgaggccaugagcugcgacuucaacgggggccggaucuccgugcaguacaaccugagccacuccuacgcgguggacgccgccaaccacugcgggaccaucgccaacggcguccugcagaccuucaugcgcauggcguggggcgggagcuacaucgcccucgacuccggcaaggggagcugggacugcaucaugacguccuaccaguaccugaucauccagaacaccaccugggaggaccacugccaguucagccggcccagccccaucggcuaccuggggcuccugucccagcgcacccgggacaucuacaucagccgccggcgccggggcacguucaccuggacccuguccgacagcgagggcaacgagacccccgggggcuacugccugacgcgcuggaugcucaucgaggccgagcugaagugcuucgggaacaccgccguggccaagugcaacgagaagcacgacgaggaguucugcgacaugcugcggcuguucgacuucugcaagcaggcgauccgccggcugaagacccccgcccagauguccauccagcugaucaacaaggccgugaacgcccucaucaacgaccagcugaucaugaagaaccaccuccgcgacaucaugggcaucccguacugcaacuacagcaaguacugguaccucaaccacaccgucacggggaagaccucccugccccggugcuggcuggugagcaacggcuccuaccucaacgagacccacuucagcgacgacaucgagcagcaggccgacaacaugaucaccgagcugcugcagaaggaguacaucgaccgccagggcaagacgccccucgggcugguggaccuguucgucuucuccaccagcuucuaccugaucuccaucuuccuccaccuggugaagaucccgacccaccggcacaucaccggcaagcccugccccaagccccaccgccugaaccacauggggaucugcagcugcggccucuacaaccacccgggggugcccgucaaguggaagcggugaggacuagucccuguucccagagcccacuuuuuuuucuuuuuuugaaauaaaauagccugucuuucagaucuaaaaaaaaaaaaaaaaaaaaaaaaaaaaaaaaaaaaaaaaaaaaaaaaaaaaaaaaaaaaaaaaaaaaaaaaaaaaaaaaaaaaaaaaaaaaaaaaaaaa

SEQ ID NO: 23377 - RNA, 1721 nt, Artificial Sequence
  mRNA product Design a-1 (A100) comprising derived and/or modified sequence from LASV(Lassa virus/H.sapiens-wt/NGA/2016/ISTH_0017;Clade II)__AVO03567__GPCmut2 (opt1)
aggagagucccgcagucggcguccagcggcucugcuuguucgugugugugucguugcaggccuuauucaagcuuaccaugggccagaucaucaccuucuuccaggaggugccccacgucaucgaggaggugaugaacaucgugcugaucgcccucagccugcuggccauccucaaggggaucuacaacgucgcgaccugcggccuguucgggcugguguccuuccuccugcugugcggccgcagcugcuccacgaccuacaaggggguguacgagcuccagacccuggagcuggacauggccagccucaacaugugcaugccgcuguccugcacgaagaacaacagccaccacuacaucauggucggcaacgagaccggccuggagcucacccugaccaacacguccaucaucaaccacaaguucugcaaccugagcgacgcccacaagaagaaccucuacgaccacgcccugauguccaucaucagcaccuuccaccuguccauccccaacuucaaccaguacgaggccaugagcugcgacuucaacgggggcaagaucuccgugcaguacaaccucagccacaccuacgcgaucgacgccgccaaccacugcgggaccaucgccaacggcgugcugcagacguucaugcggauggcguggggcggguccuacaucgcccuggacagcggcaagggguccugggacugcaucaugaccagcuaccaguaccucaucauccagaacaccaccugggaggaccacugccaguucucccgccccagccccaucggcuaccuggggcugcucagccagcggacgcgcgacaucuacaucucccggcgccgccggggcaccuucaccuggacccucagcgacuccgagggcaacgagacgcccgggggcuacugccugacccgguggaugcugaucgaggccgagcucaagugcuucgggaacaccgccgucgccaagugcaacgagaagcacgacgaggaguucugcgacaugcugcgccuguucgacuucugcaagcaggcgauccggcgccucaagacccccgcccagaugagcauccagcugaucaacaaggccgugaacgcccugaucaacgaccagcucaucaugaagaaccaccuccgggacaucaugggcauccccuacugcaacuacuccaaguacugguaccugaaccacacggugaccgggaagaccagccugccccgcugcuggcuggucuccaacggcagcuaccugaacgagacccacuucuccgacgacaucgagcagcaggccgacaacaugaucacggagcuccugcagaaggaguacauggaccggcagggcaagaccccgcuggggcucguggaccuguucguguucagcaccuccuucuaccugaucagcaucuuccugcaccucguccgcaucccgacccaccggcacgugaucggcaagcccugccccaagccccaccgccugaaccacauggggaucugcuccugcggccuguacaagcacccgggggugcccgucaaguggaagcggugaggacuagucccuguucccagagcccacuuuuuuuucuuuuuuugaaauaaaauagccugucuuucagaucuaaaaaaaaaaaaaaaaaaaaaaaaaaaaaaaaaaaaaaaaaaaaaaaaaaaaaaaaaaaaaaaaaaaaaaaaaaaaaaaaaaaaaaaaaaaaaaaaaaaa

SEQ ID NO: 23378 - RNA, 1721 nt, Artificial Sequence
  mRNA product Design a-1 (A100) comprising derived and/or modified sequence from LASV(Lassa virus/H.sapiens-wt/NGA/2018/ISTH_0959;Clade II)__AVV65099__GPCmut2 (opt1)
aggagagucccgcagucggcguccagcggcucugcuuguucgugugugugucguugcaggccuuauucaagcuuaccaugggccagaucaucaccuucuuccaggaggugccccacgucaucgaggaggugaugaacaucgugcugaucgcccucagccugcuggccauccucaaggggaucuacaacgucgugaccugcggccuguucgggcugguguccuuccuccugcugugcggccgcagcugcuccacgaccuacaagggggucuacgagcuccagacccuggagcuggacauggcgagccucaacaugugcaugccgcuguccugcacgaagaacaacagccaccacuacaucauggugggcaacgagaccggccuggagcucacccugaccaacacguccaucaucaaccacaaguucugcaaccugagcgacgcccacaagaagaaccucuacgaccacgcccugauguccaucaucagcaccuuccaccuguccauccccaacuucaaccaguacgaggccaugagcugcgacuucaacgggggcaagaucuccgugcaguacaaccucagccacgccuacgcgaucgacgccgccaaccacugcgggaccaucgccaacggcguccugcagaccuucaugcggauggcguggggcggguccuacaucgcccuggacagcggcaagggguccugggacugcaucaugacgagcuaccaguaccucaucauccagaacaccaccugggaggaccacugccaguucucccgccccagccccaucggcuaccuggggcugcucagccagcggacccgcgacaucuacaucucccggcgccgccggggcacguucaccuggacccucagcgacuccgagggcaacgagacccccgggggcuacugccugacgcgguggaugcugaucgaggccgagcucaagugcuucgggaacaccgccguggccaagugcaacgagaagcacgacgaggaguucugcgacaugcugcgccuguucgacuucugcaagcaggcgauccggcgccucaagacccccgcccagaugagcauccagcugaucaacaaggccgugaacgcccugaucaacgaccagcucaucaugaagaaccaccuccgggacaucaugggcaucccguacugcaacuacuccaaguacugguaccugaaccacaccgucacggggaagaccagccugccccgcugcuggcugguguccaacggcagcuaccugaacgagacccacuucuccgacgacaucgagcagcaggccgacaacaugaucaccgagcuccugcagaaggaguacaucgaccggcagggcaagacgccccuggggcucguggaccuguucgucuucagcaccuccuucuaccugaucagcaucuuccugcaccucgugaagaucccgacccaccgccacgugaucggcaagcccugccccaagccccaccggcugaaccacauggggaucugcuccugcggccuguacaagcacccggggguccccgugaaguggaagcgcugaggacuagucccuguucccagagcccacuuuuuuuucuuuuuuugaaauaaaauagccugucuuucagaucuaaaaaaaaaaaaaaaaaaaaaaaaaaaaaaaaaaaaaaaaaaaaaaaaaaaaaaaaaaaaaaaaaaaaaaaaaaaaaaaaaaaaaaaaaaaaaaaaaaaa

SEQ ID NO: 23379 - RNA, 1721 nt, Artificial Sequence
  mRNA product Design a-1 (A100) comprising derived and/or modified sequence from LASV(LASV003-NIG-2008;Clade II)__AIT17580__GPCmut2 (opt1)
aggagagucccgcagucggcguccagcggcucugcuuguucgugugugugucguugcaggccuuauucaagcuuaccaugggccagaucaucaccuucuuccaggaggugccccacgucaucgaggaggugaugaacaucgugcugaucgcccucagccugcuggccauccucaaggggaucuacaacgucgcgaccugcggccuguucgggcugguguccuuccuccugcugugcggccgcagcugcuccacgaccuacaaggggguguacgagcuccagacccuggagcuggacauggccagccucaacaugugcaugccgcuguccugcacgaagaacaacagccaccacuacaucauggucggcaacgagaccggccuggagcucacccugaccaacacguccaucaucaaccacaaguucugcaaccugagcgacgcccacaagaagaaccucuacgaccacgcccugauguccaucaucagcaccuuccaccuguccauccccaacuucaaccaguacgaggccaugagcugcgacuucaacgggggcaagaucuccgugcaguacaaccucagccacaccuacgcgguggacgccgccaaccacugcgggaccaucgccaacggcguccugcagacguucaugcggauggcguggggcggguccuacaucgcccuggacagcggcaagggguccugggacugcaucaugaccagcuaccaguaccucaucauccagaacaccaccugggaggaccacugccaguucucccgccccagccccaucggcuaccuggggcugcucagccagcggacgcgcgacaucuacaucucccggcgccgccggggcaccuucaccuggacccucagcgacuccgagagcaacgagacgccgggcggguacugccugacccgguggaugcugaucgaggccgagcucaagugcuucggcaacaccgccguggccaagugcaacgagaagcacgacgaggaguucugcgacaugcugcgccuguucgacuucugcaagcaggcgauccggcgccucaaggcccccgcccagauguccauccagcugaucaacaaggccgugaacgcccugaucaacgaccagcucaucaugaagaaccaccuccgggacaucauggggauccccuacugcaacuacagcaaguacugguaccugaaccacaccgucacgggccgcaccucccugccccggugcuggcuggugagcaacggguccuaccugaacgagacccacuucagcgacgacaucgagcagcaggcggacaacaugaucaccgagcuccugcagaaggaguacauggaccgccagggcaagacgccccugggccucguggaccuguucgucuucuccaccagcuucuaccugaucuccaucuuccugcaccucgugaagaucccgacccaccggcacgugaucgggaagcccugccccaagccccaccgccugaaccacaugggcaucugcagcugcgggcuguacaagcacccgggcguccccgugaaguggaagcggugaggacuagucccuguucccagagcccacuuuuuuuucuuuuuuugaaauaaaauagccugucuuucagaucuaaaaaaaaaaaaaaaaaaaaaaaaaaaaaaaaaaaaaaaaaaaaaaaaaaaaaaaaaaaaaaaaaaaaaaaaaaaaaaaaaaaaaaaaaaaaaaaaaaaa

SEQ ID NO: 23380 - RNA, 1721 nt, Artificial Sequence
  mRNA product Design a-1 (A100) comprising derived and/or modified sequence from LASV(LASV035-NIG-2009;Clade II)__AIT17588__GPCmut2 (opt1)
aggagagucccgcagucggcguccagcggcucugcuuguucgugugugugucguugcaggccuuauucaagcuuaccaugggccagaucaucaccuucuuccaggaggugccccacgucaucgaggaggugaugaacaucgugcugaucgcccucagccugcuggccauccucaaggggaucuacaacgucgcgaccugcggccuguucgggcugguguccuuccuccugcugugcggccgcagcugcuccacgaccuacaaggggguguacgagcuccagacccuggagcuggacauggccagccucaacaugugcaugccgcuguccugcacgaagaacaacagccaccacuacaucauggucggcaacgagaccggccuggagcucacccugaccaacacguccaucaucaaccacaaguucugcaaccugagcgacgcccacaagaagaaccucuacgaccacgcccugauguccaucaucagcaccuuccaccuguccauccccaacuucaaccaguacgaggccaugagcugcgacuucaacgggggcaagaucuccgugcaguacaaccucagccacgcguacgccguggacgccgccaaccacugcgggaccaucgcgaacggcguccugcagaccuucaugcggauggccuggggcggguccuacaucgcccuggacagcggcaagggguccugggacugcaucaugacgagcuaccaguaccucaucauccagaacaccaccugggaggaccacugccaguucucccgccccagccccaucggcuaccuggggcugcucagccagcggacccgcgacaucuacaucucccggcgccgccggggcacguucaccuggacccucagcgacuccgagggcaacgagacccccgggggcuacugccugacgcgguggaugcugaucgaggccgagcucaagugcuucgggaacaccgccguggcgaagugcaacgagaagcacgacgaggaguucugcgacaugcugcgccuguucgacuucugcaagcaggccauccggcgccucaaggcccccgcccagaugagcauccagcugaucaacaaggccgugaacgcgcugaucaacgaccagcucaucaugaagaaccaccuccgggacaucaugggcauccccuacugcaacuacuccaaguacugguaccugaaccacaccgucaccgggaagacgagccugccccgcugcuggcugguguccaacggcagcuaccugaacgagacccacuucuccgacgacaucgagcagcaggccgacaacaugaucaccgagcuccugcagaaggaguacaucgaccggcagggcaagaccccgcuggggcucguggaccuguucgucuucagcacguccuucuaccugaucagcaucuuccugcaccucgugaagaucccgacccaccgccacgugaucggcaagcccugccccaagccccaccggcugaaccacauggggaucugcuccugcggccuguacaagcacccggggguccccgugaaguggaagcgcugaggacuagucccuguucccagagcccacuuuuuuuucuuuuuuugaaauaaaauagccugucuuucagaucuaaaaaaaaaaaaaaaaaaaaaaaaaaaaaaaaaaaaaaaaaaaaaaaaaaaaaaaaaaaaaaaaaaaaaaaaaaaaaaaaaaaaaaaaaaaaaaaaaaaa

SEQ ID NO: 23381 - RNA, 1721 nt, Artificial Sequence
  mRNA product Design a-1 (A100) comprising derived and/or modified sequence from LASV(LASV1000-NIG-2009;Clade II)__AIT17782__GPCmut2 (opt1)
aggagagucccgcagucggcguccagcggcucugcuuguucgugugugugucguugcaggccuuauucaagcuuaccaugggccagaucaucaccuucuuccaggaggugccccacgucaucgaggaggugaugaacaucgugcugaucgcccucagccugcuggccauccucaaggggaucuacaacgucgcgaccugcggccuguucgggcugguguccuuccuccugcugugcggccgcagcugcuccacgaccuacaaggggguguacgagcuccagacccuggagcuggacauggccagccucaacaugugcaugccgcuguccugcacgaagaacaacagccaccacuacaucauggucggcaacgagaccggccuggagcucacccugaccaacacguccaucaucaaccacaaguucugcaaccugagcgacgcccacaagaagaaccucuacgaccacgcccugauguccaucaucagcaccuuccaccuguccauccccaacuucaaccaguacgaggccaugagcugcgacuucaacgggggcaagaucuccgugcaguacaaccucagccacaccuacgcgguggacgccgccaaccacugcgggaccaucgccaacggcguccugcagacguucaugcggauggcguggggcggguccuacaucgcccuggacagcggcaagggguccugggacugcaucaugaccagcuaccaguaccucaucauccagaacaccaccugggaggaccacugccaguucucccgccccagccccaucggcuaccuggggcugcucagccagcggacgcgcgacaucuacaucucccggcgccgccggggcaccuucaccuggacccucagcgacuccgagggcaacgagacgcccgggggcuacugccugacccgguggaugcugaucgaggccgagcucaagugcuucgggaacaccgccguggccaagugcaacgagaagcacgacgaggaguucugcgacaugcugcgccuguucgacuucugcaagcaggcgaucaagcggcucaagacccccgcccagaugagcauccagcugaucaacaaggccgugaacgcccugaucaacgaccagcucaucaugaagaaccaccuccgcgacaucaugggcauccccuacugcaacuacuccaaguacugguaccugaaccacacggucaccgggaagaccagccugccccggugcuggcugguguccaacggcagcuaccugaacgagacccacuucuccgacgacaucgagcagcaggccgacaacaugaucacggagcuccugcagaaggaguacaucgaccgccagggcaagaccccgcuggggcucguggaccuguucgucuucagcaccuccuucuaccugaucagcaucuuccugcaccucgugaagaucccgacccaccggcacguggucggcaagcccugccccaagccccaccgccugaaccacauggggaucugcuccugcggccuguacaagcacccgggggugcccgugaaguggaagcggugaggacuagucccuguucccagagcccacuuuuuuuucuuuuuuugaaauaaaauagccugucuuucagaucuaaaaaaaaaaaaaaaaaaaaaaaaaaaaaaaaaaaaaaaaaaaaaaaaaaaaaaaaaaaaaaaaaaaaaaaaaaaaaaaaaaaaaaaaaaaaaaaaaaaa

SEQ ID NO: 23382 - RNA, 1721 nt, Artificial Sequence
  mRNA product Design a-1 (A100) comprising derived and/or modified sequence from LASV(LASV221-NIG-2010;Clade II)__AIT17624__GPCmut2 (opt1)
aggagagucccgcagucggcguccagcggcucugcuuguucgugugugugucguugcaggccuuauucaagcuuaccaugggccagaucaucaccuucuuccaggaggugccccacgucaucgaggaggugaugaacaucgugcugaucgcccucagccugcuggccauccucaaggggaucuacaacgucgcgaccugcggccuguucgggcugguguccuuccuccugcugugcggccgcagcugcuccacgaccuacaaggggguguacgagcuccagacccuggagcuggacauggccagccucaacaugugcaugccgcuguccugcacgaagaacaacagccaccacuacaucauggucggcaacgagaccggccuggagcucacccugaccaacacguccaucaucaaccacaaguucugcaaccugagcgacgcccacaagaagaaccucuacgaccacgcccugauguccaucaucagcaccuuccaccuguccauccccaacuucaaccaguacgaggccaugagcugcgacuucaacgggggcaagaucuccgugcaguacaaccucagccacaccuacgcgaucgacgccgccaaccacugcgggaccaucgccaacggcgugcugcagacguucaugcggauggcguggggcggguccuacaucgcccuggacagcggcaagggguccugggacugcaucaugaccagcuaccaguaccucaucauccagaacaccaccugggaggaccacugccaguucucccgccccagccccaucggcuaccuggggcugcucagccagcggacgcgcgacaucuacaucucccggcgccgccggggcaccuucaccuggacccucagcgacuccgagggcaacgagacgcccgggggcuacugccugacccgguggaugcugaucgaggccgagcucaagugcuucgggaacaccgccgucgccaagugcaacgagaagcacgacgaggaguucugcgacaugcugcgccuguucgacuucugcaagcaggcgauccggcgccucaagacccccgcccagaugagcauccagcugaucaacaaggccgugaacgcccugaucaacgaccagcucaucaugaagaaccaccuccgggacaucaugggcauccccuacugcaacuacuccaaguacugguaccugaaccacacggugaccgggaagaccagccugccccgcugcuggcuggucuccaacggcagcuaccugaacgagacccacuucuccgacgacaucgagcagcaggccgacaacaugaucacggagaugcuccagaaggaguacauggaccggcagggcaagaccccgcuggggcugguggaccucuucguguucagcaccuccuucuaccugaucagcaucuuccugcaccuggucaagaucccgacccaccgccacgugaucggcaagcccugccccaagccccaccggcucaaccacauggggaucugcuccugcggccuguacaagcacccgggggugcccgucaaguggaagcgcugaggacuagucccuguucccagagcccacuuuuuuuucuuuuuuugaaauaaaauagccugucuuucagaucuaaaaaaaaaaaaaaaaaaaaaaaaaaaaaaaaaaaaaaaaaaaaaaaaaaaaaaaaaaaaaaaaaaaaaaaaaaaaaaaaaaaaaaaaaaaaaaaaaaaa

SEQ ID NO: 23383 - RNA, 1721 nt, Artificial Sequence
  mRNA product Design a-1 (A100) comprising derived and/or modified sequence from LASV(LASV237-NIG-2010;Clade II)__AIT17638__GPCmut2 (opt1)
aggagagucccgcagucggcguccagcggcucugcuuguucgugugugugucguugcaggccuuauucaagcuuaccaugggccagaucaucaccuucuuccaggaggugccccacgucaucgaggaggugaugaacaucgugcugaucgcccucagccugcuggccauccucaaggggaucuacaacgucgcgaccugcggccuguucgggcugguguccuuccuccugcugugcggccgcagcugcuccacgaccuacaaggggguguacgagcuccagacccuggagcuggacauggccagccucaacaugugcaugccgcuguccugcacgaagaacaacagccaccacuacaucauggucggcaacgagaccggccuggagcucacccugaccaacacguccaucaucaaccacaaguucugcaaccugagcgacgcccacaagaaggaccucuacgaccacgcccugauguccaucaucagcaccuuccaccuguccauccccaacuucaaccaguacgaggccaugagcugcgacuucaacgggggcaagaucuccgugcaguacaaccucagccacaccuacgcgguggacgccgccaaccacugcgggaccaucgccaacggcguccugcagacguucaugcggauggcguggggcggguccuacaucgcccuggacagcggcaagggguccugggacugcaucaugaccagcuaccaguaccucaucauccagaacaccaccugggaggaccacugccaguucucccgccccagccccaucggcuaccuggggcugcucagccagcggacgcgcgacaucuacaucucccggcgccgccggggcaccuucaccuggacccucagcgacuccgagggcaacgagacgcccgggggcuacugccugacccgguggaugcugaucgaggccgagcucaagugcuucgggaacaccgccguggccaagugcaacgagaagcacgacgaggaguucugcgacaugcugcgccuguucgacuucugcaagcaggcgauccggcgccucaagacccccgcccagaugagcauccagcugaucaacaaggccgugaacgcccugaucaacgaccagcucaucaugaagaaccaccuccgggacaucaugggcauccccuacugcaacuacuccaaguacugguaccugaaccacacggucaccgggaagaccagccugccccgcugcuggcugguguccaacggcagcuaccugaacgagacccacuucuccgacgacaucgagcagcaggccgacaacaugaucacggagcuccugcagaaggaguacauggaccggcagggcaagaccccgcuggggcucguggaccuguucgucuucagcaccuccuucuaccugaucagcaucuuccugcaccucaucaagaucccgacccaccgccacaucacgggcaagcccugccccaagccccaccggcugaaccacauggggaucugcuccugcggccuguacaagcacccgggggugcccgugaaguggaagcgcugaggacuagucccuguucccagagcccacuuuuuuuucuuuuuuugaaauaaaauagccugucuuucagaucuaaaaaaaaaaaaaaaaaaaaaaaaaaaaaaaaaaaaaaaaaaaaaaaaaaaaaaaaaaaaaaaaaaaaaaaaaaaaaaaaaaaaaaaaaaaaaaaaaaaa

SEQ ID NO: 23384 - RNA, 1721 nt, Artificial Sequence
  mRNA product Design a-1 (A100) comprising derived and/or modified sequence from LASV(LASV253-NIG-2011;Clade II)__AIT17670__GPCmut2 (opt1)
aggagagucccgcagucggcguccagcggcucugcuuguucgugugugugucguugcaggccuuauucaagcuuaccaugggccagaucaucaccuucuuccaggaggugccccacgucaucgaggaggugaugaacaucgugcugaucgcccucagccugcuggccauccucaaggggaucuacaacgucgcgaccugcggccuguucgggcugguguccuuccuccugcugugcggccgcagcugcuccacgaccuacaaggggguguacgagcuccagacccuggagcuggacauggccagccucaacaugugcaugccgcuguccugcacgaagaacaacagccaccacuacaucauggucggcaacgagaccggccuggagcucacccugaccaacacguccaucaucaaccacaaguucugcaaccugagcgacgcccacaagaagaaccucuacgaccacgcccugauguccaucaucagcaccuuccaccuguccauccccaacuucaaccaguacgaggccaugagcugcgacuucaacgggggcaagaucuccgugcaguacaaccucagccacaccuacgcgguggacgccgccaaccacugcgggaccaucgccaacggcguccugcagacguucaugcggauggcguggggcggguccuacaucgcccuggacagcggcaagggguccugggacugcaucaugaccagcuaccaguaccucaucauccagaacaccaccugggaggaccacugccaguucucccgccccagccccaucggcuaccuggggcugcucagccagcggacgcgcgacaucuacaucucccggcgccgccggggcaccuucaccuggacccucagcgacuccgagggcaacgagacgcccgggggcuacugccugacccgguggaugcugaucgaggccgagcucaagugcuucgggaacaccgccguggccaagugcaacgagaagcacgacgaggaguucugcgacaugcugcgccuguucgacuucugcaagcaggcgauccggcgccucaaggcccccgcccagaugagcauccagcugaucaacaaggccgugaacgcccugaucaacgaccagcucaucaugaagaaccaccuccgggacaucaugggcaucccguacugcaacuacuccaaguacugguaccugaaccacaccgucacggggcgcaccagccugccccggugcuggcugguguccaacggcagcuaccugaacgagacccacuucuccgacgacaucgagcagcaggcggacaacaugaucaccgagcuccugcagaaggaguacaucgaccgccagggcaagacgccccuggggcucguggaccuguucgucuucagcaccuccuucuaccugaucagcaucuuccugcaccucgugaagaucccgacccaccggcacaucaucggcaagcccugccccaagccccaccgccugaaccacauggggaucugcuccugcggccuguacaagcacccgggggugcccgucaaguggaagcggugaggacuagucccuguucccagagcccacuuuuuuuucuuuuuuugaaauaaaauagccugucuuucagaucuaaaaaaaaaaaaaaaaaaaaaaaaaaaaaaaaaaaaaaaaaaaaaaaaaaaaaaaaaaaaaaaaaaaaaaaaaaaaaaaaaaaaaaaaaaaaaaaaaaaa

SEQ ID NO: 23385 - RNA, 1721 nt, Artificial Sequence
  mRNA product Design a-1 (A100) comprising derived and/or modified sequence from LASV(LASV254-NIG-2011;Clade II)__AIT17674__GPCmut2 (opt1)
aggagagucccgcagucggcguccagcggcucugcuuguucgugugugugucguugcaggccuuauucaagcuuaccaugggccagaucaucaccuucuuccaggaggugccccacgucaucgaggaggugaugaacaucgugcugaucgcccucagccugcuggccauccucaaggggaucuacaacgucgcgaccugcggccuguucgggcugguguccuuccuccugcugugcggccgcagcugcuccacgaccuacaaggggguguacgagcuccagacccuggagcuggacaugaccaaccucaacaugugcaugccgcugagcugcaccaagaacaacucccaccacuacaucauggucggcaacgagaccggccuggagcucacccugacgaacaccagcaucaucaaccacaaguucugcaaccuguccgacgcccacaagaagaaccucuacaaccacgcccugaugagcaucaucuccaccuuccaccugagcauccccaacuucaaccaguacgaggccauguccugcgacuucaacgggggcaagaucagcgugcaguacaaccucucccacagcuacgccguggacgcggccaaccacugcgggaccaucgccaacggcguccugcagacguucaugcggauggccuggggcggguccuacaucgcgcuggacagcggcaaggggaacugggacugcaucaugaccuccuaccaguaccucaucauccagaacaccaccugggaggaccacugccaguucagccgccccucccccaucggcuaccuggggcugcucagccagcggacgcgcgacaucuacaucagccggcgccgccggggcaccuucaccuggacccucuccgacagcgagggcaacgagacgcccgggggcuacugccugacccgguggaugcugaucgaggccgagcucaagugcuucgggaacaccgccguggccaagugcaacgagaagcacgacgaggaguucugcgacaugcugcgccuguucgacuucugcaagcaggccauccggcgccucaagacccccgcgcaggccaacauccagcugaucaacaaggccgugaacgcccugaucaacgaccagcucaucaugaagaaccaccuccgggacaucaugggcauccccuacugcaacuacuccaaguacugguaccugaaccacacggucaccgggaagaccagccugccccgcugcuggcugguguccaacggcagcuaccugaacgagacccacuucuccgacgacaucgagcagcaggccgacaacaugaucacggagcuccugcagaaggaguacauggaccggcagggcaagaccccgcuggggcucguggaccuguucgucuucagcaccuccuucuaccugaucagcaucuuccugcaccucgugaagaucccgacccaccgccacgugaucggcaagcccugccccaagccccaccggcugaaccacauggggaucugcuccugcggccuguacaagcacccggggguccccgugaaguggaagcgcugaggacuagucccuguucccagagcccacuuuuuuuucuuuuuuugaaauaaaauagccugucuuucagaucuaaaaaaaaaaaaaaaaaaaaaaaaaaaaaaaaaaaaaaaaaaaaaaaaaaaaaaaaaaaaaaaaaaaaaaaaaaaaaaaaaaaaaaaaaaaaaaaaaaaa

SEQ ID NO: 23386 - RNA, 1721 nt, Artificial Sequence
  mRNA product Design a-1 (A100) comprising derived and/or modified sequence from LASV(Nig08-A19;Clade III)__ADU56618__GPCmut2 (opt1)
aggagagucccgcagucggcguccagcggcucugcuuguucgugugugugucguugcaggccuuauucaagcuuaccaugggccagaucgugaccuucuuccaggaggucccccacgugaucgaggaggugaugaacaucguccugaucgcccucagcauccuggccauccugaaggggcucuacaacaucgcgaccugcggccugaucgggcuggugacguuccuccugcuguccggccgcagcugcuccaugaccuacaaggggguguacgagcuccagacccuggagcugaacaugaacacccucaacaugugcaugccgcugagcugcaccaagaacaacucccaccacuacaucauggucggcaacgagaccggccuggagcucacccugacgaacaccagccugcuccaccacaaguucugcaaccuguccgacgcccacaagaagaaccuguacgaccacacccucaugagcaucaucuccaccuuccaccugagcauccccaacuucaaccaguacgaggccauguccugcgacuucaacgggggcaagaucacggugcaguacaaccugagccacuccuacgccaucgacgccgcgaaccacugcgggaccguggccaacggcguccuccagaccuucaugcggauggccuggggcgggagcuacaucgcccuggacuccggccgcgggaagugggacugcaucaugaccagcuaccaguaccugaucauccagaacacgaccugggaggaccacugccaguucucccggcccagccccaucggcuaccucgggcugcugucccagcgcacccgggacaucuacaucagccgccggcgccggggcaccuucacguggacccugagcgacuccgagggcaacgagacccccgggggcuacugccucacccgcuggaugcugaucgaggcggagcugaagugcuucgggaacacggccguggccaagugcaacgagaagcacgacgaggaguucugcgacaugcuccggcuguucgacuucugcaagcaggccauccgccggcugaaggcccccgcgcagaugagcauccagcucaucaacaaggccgugaacgcccugaucaacgaccagcugaucaugaagaaccaccuccgcgacaucaugggcauccccuacugcaacuacuccaaguacugguaccugaaccacaccagcaccgggcggaccucccugccccgcugcuggcucgucagcaacggcuccuaccugaacgagacgcacuucagcgacgacaucgagcagcaggccgacaacaugaucaccgagaugcugcagaaggaguaccucgaccggcagggcaagaccccgcuggggcugguggaccuguucguguucuccaccagcuucuaccucaucuccaucuuccugcaccuggucaagaucccgacgcaccgccacaucgugggcaagcccugccccaagccccaccggcucaaccacauggggaucugcagcugcggccuguacaagcagccgggggugcccguccgcuggaagcggugaggacuagucccuguucccagagcccacuuuuuuuucuuuuuuugaaauaaaauagccugucuuucagaucuaaaaaaaaaaaaaaaaaaaaaaaaaaaaaaaaaaaaaaaaaaaaaaaaaaaaaaaaaaaaaaaaaaaaaaaaaaaaaaaaaaaaaaaaaaaaaaaaaaaa

SEQ ID NO: 23387 - RNA, 1724 nt, Artificial Sequence
  mRNA product Design a-1 (A100) comprising derived and/or modified sequence from LASV(G1180-SLE-2010;Clade IV)__AIT17168__GPCmut2 (opt1)
aggagagucccgcagucggcguccagcggcucugcuuguucgugugugugucguugcaggccuuauucaagcuuaccaugggccagaucgugaccuucuuccaggaggucccccacgugaucgaggaggugaugaacaucguccugaucgcccucagcauccuggccgugcugaaggggcucuacaacuucgcgaccugcggccugguggggcugcucaccuuccugcugcucugcggccgcuccugcaccgccagccgguacaagggggucuacgagcugcagacccuggagcucaacauggagacccugaacaugugcaugccgcuguccugcaccaagaacaacagccaccacuacaucauggugggcaacgagaccggccucgagcugacccugacgaacaccuccaucaucaaccacaaguucugcaaccucagcgacgcccacaagaagaaccuguacgaccacgcccugauguccaucaucagcaccuuccaccucuccauccccaacuucaaccaguacgaggccaugagcugcgacuucaacgggggcaagaucuccgugcaguacaaccugagccacuccuacgcgggggacgccgccaaccacugcggcaccgucgccaacggggugcugcagacguucaugcgcauggcguggggcggcagcuacaucgcccucgacuccgggcacggcagcugggacugcaucaugaccuccuaccaguaccugaucauccagaacaccaccugggaggaccacugccaguucagccggcccucccccaucggguaccugggccuccugagccagcgcacgcgggacaucuacaucagccgccggcgccggggcaccuucaccuggacccuguccgacagcgaggggaaggacacgccgggcggguacugccugacccgcuggaugcucaucgaggccgagcugaagugcuucggcaacaccgccguggccaagugcaacgagaagcacgacgaggaguucugcgacaugcugcggcuguucgacuucugcaagcaggcgauccagcgccugaaggcccccgcccagauguccauccagcugaucaacaaggccgucaacgcccucaucaacgaccagcugaucaugaagaaccaccuccgggacaucauggggauccccuacugcaacuacagcaaguacugguaccucaaccacaccacgaccggcaagaccucccugcccaagugcuggcuggugagcaacggcuccuaccucaacgagacccacuucagcgacgacaucgagcagcaggcggacaacaugaucacggagaugcugcagaaggaguacauggagcgccaggggaagacgccccugggccucguggaccuguucgucuucuccaccagcuucuaccugaucuccaucuuccugcaccucgugaagaucccgacccaccggcacaucgugggcaagagcugccccaagccccaccgccugaaccacauggggaucugcuccugcgggcuguacaagcagcccggcgucccggugaaguggaagcggugaggacuagucccuguucccagagcccacuuuuuuuucuuuuuuugaaauaaaauagccugucuuucagaucuaaaaaaaaaaaaaaaaaaaaaaaaaaaaaaaaaaaaaaaaaaaaaaaaaaaaaaaaaaaaaaaaaaaaaaaaaaaaaaaaaaaaaaaaaaaaaaaaaaaa

SEQ ID NO: 23388 - RNA, 1724 nt, Artificial Sequence
  mRNA product Design a-1 (A100) comprising derived and/or modified sequence from LASV(G1442-SLE-2011;Clade IV)__AIT17180__GPCmut2 (opt1)
aggagagucccgcagucggcguccagcggcucugcuuguucgugugugugucguugcaggccuuauucaagcuuaccaugggccagaucgugaccuucuuccaggaggucccccacgugaucgaggaggugaugaacaucguccugaucgcccucagcauccuggccgugcugaaggggcucuacaacguggcgaccugcggccugaucgggcuggucacguuccuccugcugugcggccgcuccugcaccaccacccucuacaaggggguguacgagcugcagacgcuggagcucaacauggagacccugaacaugugcaugccgcugagcugcaccaagaacaacucccaccacuacauccgggugggcaacgagacgggccucgagcugacccugaccaacaccagcaucaucaaccacaaguucugcaaccucuccgacgcccacaagaagaaccuguacgaccacgcccugaugagcaucaucuccacguuccaccucagcauccccaacuucaaccaguacgaggccauguccugcgacuucaacgggggcaagaucagcguccaguacaaccugucccacagcuacgccggggacgcggccaaccacugcggcaccguggccaacggggugcugcagaccuucaugcgcauggccuggggcggcuccuacaucgcgcucgacagcgggcggggcaacugggacugcaucaugaccuccuaccaguaccugaucauccagaacacgaccugggacgaccacugccaguucagccgccccucccccaucggguaccugggccuccugagccagcggacccgcgacgucuacaucucccggcgccgccggggcaccuucacguggacccugagcgacagcgaggggaaggacaccccgggcggguacugccugacccgguggaugcucaucgaggccgagcugaagugcuucggcaacacggccguggccaagugcaacgagaagcacgacgaggaguucugcgacaugcugcgccucuucgacuucugcaagcaggccauccagcggcugaaggcgcccgcccagauguccauccagcugaucaacaaggccgugaacgcccucaucaacgaccagcugaucaugaagaaccaccuccgcgacaucauggggauccccuacugcaacuacagcaaguacugguaccugaacaacaccgccaccggcaagaccucccugcccaagugcuggcugaucagcaacggcuccuaccucaacgagacgcacuucagcgacgacaucgagcaggaggcggacaacaugaucaccgagaugcugcagaaggaguacauggagcggcaggggaagacgccccugggccucgucgaccuguucguguucuccaccagcuucuaccugaucuccaucuuccugcaccucgugaagaucccgacccaccgccacaucgucggcaagagcugccccaagccccaccggcugaaccacauggggaucugcuccugcgggcuguacaagcagcccggcgugccggugcgcuggaagcggugaggacuagucccuguucccagagcccacuuuuuuuucuuuuuuugaaauaaaauagccugucuuucagaucuaaaaaaaaaaaaaaaaaaaaaaaaaaaaaaaaaaaaaaaaaaaaaaaaaaaaaaaaaaaaaaaaaaaaaaaaaaaaaaaaaaaaaaaaaaaaaaaaaaaa

SEQ ID NO: 23389 - RNA, 1724 nt, Artificial Sequence
  mRNA product Design a-1 (A100) comprising derived and/or modified sequence from LASV(G3010-SLE-2013;Clade IV)__AIT17344__GPCmut2 (opt1)
aggagagucccgcagucggcguccagcggcucugcuuguucgugugugugucguugcaggccuuauucaagcuuaccaugggccagaucgugaccuucuuccaggaggucccccacgugaucgaggaggugaugaacaucguccugaucgcccucagcauccuggccgugcugaaggggcucuacaacuucgcgaccugcggccugguggggcuggucacguuccuccugcugugcggccgcuccugcaccaccagccucuacaaggggguguacgagcugcagacccuggagcucaacauggagacgcugaacaugugcaugccgcuguccugcaccaagaacaacagccaccacuacaucauggugggcaacgagaccggccucgagcugacgcugaccaacaccuccaucaucaaccacaaguucugcaaccucagcgacgcccacaagaagaaccuguacaaccacgcccugauguccaucaucagcaccuuccaccucuccauccccaacuucaaccaguacgaggccaugagcugcgacuucaacgggggcaagaucuccguccaguacaaccugagccacuccuacgccggggacgcggccagccacugcggcacgguggccaacggggugcugcagaccuucaugcggauggccuggggcggcuccuacaucgcgcucgacagcggguacggcaagugggacugcaucaugaccuccuaccaguaccugaucauccagaacaccacgugggaggaccacugccaguucagccgccccucccccaucggguaccugggccuccugagccagcggacccgcgacaucuacaucagccggcgccgccggggcaccuucaccuggacgcuguccgacagcgaggggaaggacaccccgggcggguacugccugacccgguggaugcucaucgaggccgagcugaagugcuucggcaacaccgccgucgccaagugcaacgagaagcacgacgaggaguucugcgacaugcugcgccucuucgacuucugcaagcaggccauccagcggcugaagacgcccgcgcagauguccauccagcugaucaacaaggccgugaacgcccucaucaacgaccagcugaucaugaagaaccaccuccgcgacaucauggggauccccuacugcaacuacagcaaguacugguaccugaaccacaccaccaccggcaagacgucccugcccaagugcuggcuggugagcaacggcuccuaccucaacgagacccacuucagcgacgacaucgagcagcaggccgacaacaugaucaccgagaugcugcagaaggaguacauggagcggcaggggaagacgccccugggccucgucgaccuguucguguucuccaccagcuucuaccugaucuccaucuuccugcaccucgugaagaucccgacccaccgccacaucgucggcaagagcugccccaagccccaccggcugaaccacauggggaucugcuccugcgggcuguacaagcagcccggcgugccggugcgcuggaagcggugaggacuagucccuguucccagagcccacuuuuuuuucuuuuuuugaaauaaaauagccugucuuucagaucuaaaaaaaaaaaaaaaaaaaaaaaaaaaaaaaaaaaaaaaaaaaaaaaaaaaaaaaaaaaaaaaaaaaaaaaaaaaaaaaaaaaaaaaaaaaaaaaaaaaa

SEQ ID NO: 23390 - RNA, 1724 nt, Artificial Sequence
  mRNA product Design a-1 (A100) comprising derived and/or modified sequence from LASV(G502-SLE-2009;Clade IV)__AIT17126__GPCmut2 (opt1)
aggagagucccgcagucggcguccagcggcucugcuuguucgugugugugucguugcaggccuuauucaagcuuaccaugggccagaucgugaccuucuuccaggaggucccccacgugaucgaggaggugaugaacaucguccugaucgcccucagcauccuggccgugcugaaggggcucuacaacuucgcgaccugcggccugguggggcugcucacguuccugcugcucugcggccgcuccugcaccaccgggcuguacaagggcgucuacgagcugcagacccucgagcugaacauggagacgcugaacaugugcaugccgcucagcugcaccaagaacaacucccaccacuacaucauggugggcaacgagaccgggcuggagcugacgcucaccaacaccagcaucaucaaccacaaguucugcaaccuguccgacgcccacaagaagaaccuguacgaccacgcccucaugagcaucaucuccaccuuccaccugagcauccccaacuucaaccaguacgaggccauguccugcgacuucaacggcgggaagaucagcgugcaguacaaccugucccacagcuacgccggcgacgcggccgaccacugcgggacggucgccaacggcgugcuccagaccuucaugcggauggccuggggcggguccuacaucgcgcuggacagcggccgcgggcggugggacugcaucaugaccuccuaccaguaccugaucauccagaacaccacgugggaggaccacugccaguucagccgccccucccccaucggcuaccucggccugcugagccagcggacccgcgacaucuacaucucccggcgccgccgggggaccuucaccuggacgcugagcgacagcgagggcaaggacacccccgggggcuacugccucacccgguggaugcugaucgaggccgagcugaagugcuucgggaacaccgccguggccaagugcaacgagaagcacgacgaggaguucugcgacaugcuccgccuguucgacuucugcaagcaggccauccagcggcugaaggcgcccgcccagauguccauccagcucaucaacaaggccgucaacgcccugaucaacgaccagcuggugaugaagaaccaccuccgcgacaucaugggcauccccuacugcaacuacagccgguacugguaccugaaccacacgaccaccggccgcaccucccugcccaagugcuggcucgugagcaacggguccuaccugaacgagacgcacuucagcgacgacaucgagcagcaggccgacaacaugaucaccgagaugcugcagaaggaguacauggagcggcagggcaagaccccgcucgggcuggucgaccuguucguguucuccaccagcuucuaccugaucuccaucuuccuccaccuggugaagaucccgacgcaccgccacaucgucggcaagagcugccccaagccccaccggcugaaccacauggggaucugcuccugcggccucuacaagcagcccggcgugccggugaaguggaagcgcugaggacuagucccuguucccagagcccacuuuuuuuucuuuuuuugaaauaaaauagccugucuuucagaucuaaaaaaaaaaaaaaaaaaaaaaaaaaaaaaaaaaaaaaaaaaaaaaaaaaaaaaaaaaaaaaaaaaaaaaaaaaaaaaaaaaaaaaaaaaaaaaaaaaaa

SEQ ID NO: 23391 - RNA, 1724 nt, Artificial Sequence
  mRNA product Design a-1 (A100) comprising derived and/or modified sequence from LASV(G733-SLE-2010;Clade IV)__AIT17154__GPCmut2 (opt1)
aggagagucccgcagucggcguccagcggcucugcuuguucgugugugugucguugcaggccuuauucaagcuuaccaugggccagaucgugaccuucuuccaggaggucccccacgugaucgaggaggugaugaacaucguccugaucgcccucagcauccuggccgugcugaaggggcucuacaacuucgcgaccugcggcaucguggggcuggucuccuuccugcuccugugcggccgcagcugcacgaccucccuguacaaggggguguacgagcuccagacccuggagcugaacauggagacccucaacaugugcaugccgcugagcugcaccaagaacaacucccaccacuacaucauggugggcaacgagaccggccuggagcucacccugacgaacaccagcaucaucaaccacaaguucugcaaccuguccgacgcccacaagaagaaccucuacgaccacgcccugaugagcaucaucuccaccuuccaccugagcauccccaacuucaaccaguacgaggccauguccugcgacuucaacgggggcaagaucagcguccaguacaaccucucccacagcuacgccggggacgcggccaaccacugcggcaccaucgccaacggggugcugcagacguucaugcggauggccuggggcggcuccuacaucgcgcuggacagcgggcgcgaccggugggacugcaucaugaccuccuaccaguaccucaucauccagaacaccaccugggaggaccacugccaguucagccgccccucccccaucggcuaccuggggcugcucagccagcggacgcgcgacaucuacaucagccggcgccgccggggcaccuucaccuggacccucuccgacagcgagggcaaggacacgcccgggggcuacugccugacccgguggaugcugaucgaggccgagcucaagugcuucgggaacaccgccguggccaagugcaacgagaagcacgacgaggaguucugcgacaugcugcgccuguucgacuucugcaagcaggccauccagcggcucaaggcgcccgcccagauguccauccagcugaucaacaaggccgucaacgcccugaucaacgaccagcucaucaugaagaaccaccuccgcgacaucaugggcauccccuacugcaacuacagcaaguacugguaccugaaccacaccacgaccgggaagaccucccugcccaagugcuggcuggugagcaacggcuccuaccugaacgagacccacuucagcgacgacaucgagcagcaggccgacaacaugaucacggagaugcuccagaaggaguacauggagcggcagggcaagaccccgcuggggcugguggaccucuucgucuucuccaccagcuucuaccugaucuccaucuuccugcaccuggugaagaucccgacccaccgccacguggucggcaagagcugccccaagccccaccggcucaaccacauggggaucugcuccugcggccuguacgggcagcccggcgugccggugaaguggaagcgcugaggacuagucccuguucccagagcccacuuuuuuuucuuuuuuugaaauaaaauagccugucuuucagaucuaaaaaaaaaaaaaaaaaaaaaaaaaaaaaaaaaaaaaaaaaaaaaaaaaaaaaaaaaaaaaaaaaaaaaaaaaaaaaaaaaaaaaaaaaaaaaaaaaaaa

SEQ ID NO: 23392 - RNA, 1724 nt, Artificial Sequence
  mRNA product Design a-1 (A100) comprising derived and/or modified sequence from MOPV/LASV reassortant(IGS-1;Clade IV)__AFY05576__GPCmut2 (opt1)
aggagagucccgcagucggcguccagcggcucugcuuguucgugugugugucguugcaggccuuauucaagcuuaccaugggccagaucgugaccuucuuccaggaggucccccacgugaucgaggaggugaugaacaucguccugaucgcccucagcgugcuggccgugcugaaggggcucuacaacuucgcgaccugcggccuggucgggcuggugacguuccuccugcugugcggccgcuccugcaccaccagccucuacaaggggguguacgagcugcagacccuggagcucaacauggagacgcugaacaugugcaugccgcuguccugcaccaagaacaacagccaccacuacaucauggucggcaacgagaccggccucgagcugacgcugaccaacaccuccaucaucaaccacaaguucugcaaccucagcgacgcccacaagaagaaccuguacgaccacgcccugauguccaucaucagcaccuuccaccucuccauccccaacuucaaccaguacgaggccaugagcugcgacuucaacgggggcaagaucuccgugcaguacaaccugagccacuccuacgccggggacgcggccaaccacugcggcacgguggccaacgggguccugcagaccuucaugcggauggccuggggcggcagcuacaucgcgcucgacuccgggcgcggcaacugggacugcaucaugaccagcuaccaguaccugaucauccagaacaccacgugggaggaccacugccaguucucccggcccagccccaucggguaccugggccuccugucccagcgcacccgggacaucuacaucagccgccggcgccggggcaccuucaccuggacgcugagcgacuccgagggggaggacaccccgggcggguacugccugacccgcuggaugcucaucgaggccgagcugaagugcuucggcaacaccgccguggccaagugcaacgagaagcacgacgaggaguucugcgacaugcugcggcuguucgacuucugcaagcaggccauccagcgccugaaggcgcccgcccagaugagcauccagcugaucaacaaggccgugaacgcccucaucaacgaccagcugaucaugaagaaccaccuccgggacaucauggggauccccuacugcaacuacuccaaguacugguaccucaaccacacgaccaccggccgcaccagccugcccaagugcuggcuggucuccaacggcagcuaccucaacgagacgcacuucuccgacgacaucgagcagcaggccgacaacaugaucaccgagaugcugcagaaggaguacauggagcggcaggggaagacgccccugggccucguggaccuguucguguucagcaccuccuucuaccugaucagcaucuuccugcaccucgucaagaucccgacccaccgccacaucguggggaaguccugccccaagccccaccggcugaaccacaugggcaucugcagcugcgggcuguacaagcagcccggcgugccggucaaguggaagcgcugaggacuagucccuguucccagagcccacuuuuuuuucuuuuuuugaaauaaaauagccugucuuucagaucuaaaaaaaaaaaaaaaaaaaaaaaaaaaaaaaaaaaaaaaaaaaaaaaaaaaaaaaaaaaaaaaaaaaaaaaaaaaaaaaaaaaaaaaaaaaaaaaaaaaa

SEQ ID NO: 23393 - RNA, 1724 nt, Artificial Sequence
  mRNA product Design a-1 (A100) comprising derived and/or modified sequence from LASV(LM765-SLE-2012;Clade IV)__AIT17814__GPCmut2 (opt1)
aggagagucccgcagucggcguccagcggcucugcuuguucgugugugugucguugcaggccuuauucaagcuuaccaugggccagaucgugaccuucuuccaggaggucccccacgugaucgaggaggugaugaacaucguccugaucgcccucagcauccuggccgugcugaaggggcucuacaacuucgcgaccugcggccugguggggcuggucacguuccuccugcugugcggccgcuccugcaccaccagccucuacaaggggguguacgagcugcagacccuggagcucaacauggagacgcugaacaugugcaugccgcuguccugcaccaagaacaacagccaccacuacaucauggugggcaacgagaccggccucgagcugacgcugaccaacaccuccaucaucgaccacaaguucugcaaccucagcgacgcccaccggaagaaccuguacgaccacgcccugauguccaucaucagcaccuuccaccucuccauccccaacuucaaccaguacgaggccaugagcugcgacuucaacgggggcaagaucuccguccaguacaaccugagccacuccuacgccaaggacgcggccgaccacugcgggacgguggccaacggcgugcugcagaccuucaugcgcauggccuggggcgggagcuacaucgcgcucgacuccggccgggggcgcugggacugcaucaugaccagcuaccaguaccugaucauccagaacaccacgugggaggaccacugccaguucucccggcccagccccaucggcuaccuggggcuccugucccagcgcacccgggacaucuacaucagccgccggcgccggggcaccuucaccuggacgcugagcgacuccgagggcaaggacacccccgggggcuacugccugacccgcuggaugcucaucgaggccgagcugaagugcuucgggaacaccgccgucgccaagugcaacgagaagcacgacgaggaguucugcgacaugcugcggcuguucgacuucugcaagcaggccauccagcgccugaaggcgcccgcccagaugagcauccagcugaucaacaaggccgugaacgcccucaucaacgaccagcugaucaugaagaaccaccuccgggacaucaugggcauccccuacugcaacuacuccaaguacugguaccucaaccacacgaccaccgggaagaccagccugcccaagugcuggcugguguccaacggcagcuaccucaacgagacgcacuucuccgacgacaucgagcagcaggccgacaacaugaucaccgagaugcugcagaaggaguacauggagcgccagggcaagaccccgcuggggcucgucgaccuguucguguucagcaccuccuucuaccugaucagcaucuuccugcaccucgugaagaucccgacgcaccggcacaucgucggcaagcccugccccaagccccaccgccugaaccacauggggaucugcuccugcggccuguacaagcagccgggggugcccgugaaguggaagcggugaggacuagucccuguucccagagcccacuuuuuuuucuuuuuuugaaauaaaauagccugucuuucagaucuaaaaaaaaaaaaaaaaaaaaaaaaaaaaaaaaaaaaaaaaaaaaaaaaaaaaaaaaaaaaaaaaaaaaaaaaaaaaaaaaaaaaaaaaaaaaaaaaaaaa

SEQ ID NO: 23394 - RNA, 1724 nt, Artificial Sequence
  mRNA product Design a-1 (A100) comprising derived and/or modified sequence from LASV(LM776-SLE-2012;Clade IV)__AIT17824__GPCmut2 (opt1)
aggagagucccgcagucggcguccagcggcucugcuuguucgugugugugucguugcaggccuuauucaagcuuaccaugggccagaucgugaccuucuuccaggaggucccccacgugaucgaggaggugaugaacaucguccugaucgcccucagcauccuggccgugcugaaggggcucuacaacuucgcgaccugcggccugguggggcuggucacguuccuccugcugugcggccgcuccugcaccaccagcguguacaaggggguguacgagcuccagacccuggagcugaacauggagacgcucaacaugugcaugccgcuguccugcaccaagaacaacagccaccacuacaucauggucggcaacgagaccggccuggagcucacgcugaccaacaccuccaucaucaaccacaaguucugcaaccugagcgacgcccacaagaagaaccucuacgaccacgcccugauguccaucaucagcaccuuccaccuguccauccccaacuucaaccaguacgaggccaugagcugcgacuucaacgggggcaagaucuccgugcaguacaaccucagccacuccuacgccggggacgcggccaaccacugcggcacgguggccaacgggguccugcagaccuucaugcggauggccuggggcggcagcuacaucgcgcuggacuccgggcacggcaagugggacugcaucaugaccagcuaccaguaccucaucauccagaacaccacgugggaggaccacugccaguucucccgccccagccccaucggguaccugggccugcucucccagcggacccgcgacaucuacaucagccggcgccgccggggcaccuucaccuggacgcucagcgacuccgaggggaaggacaccccgggcggguacugccugacccgguggaugcugaucgaggccgagcucaagugcuucggcaacaccgccguggccaagugcaacgagaagcacgacgaggaguucugcgacaugcugcgccuguucgacuucugcaagcaggccauccagcggcucaaggcgcccgcccagaugagcauccagcugaucaacaaggccgugaacgcccugaucaacgaccagcucaucaugaagaaccaccuccgcgacaucauggggauccccuacugcaacuacuccaaguacugguaccugaaccacacgaccaccggcaagaccagccugcccaagugcuggcuggucuccaacggcagcuaccugaacgagacgcacuucuccgacgacaucgagcagcaggccgacaacaugaucaccgagaugcuccagaaggaguacauggagcggcaggggaagacgccccugggccugguggaccucuucguguucagcaccuccuucuaccugaucagcaucuuccugcaccuggucaagaucccgacccaccgccacaucguggggaaguccugccccaagccccaccggcucaaccacaugggcaucugcagcugcgggcuguacaagcagcccggcgugccgguccgcuggaagcggugaggacuagucccuguucccagagcccacuuuuuuuucuuuuuuugaaauaaaauagccugucuuucagaucuaaaaaaaaaaaaaaaaaaaaaaaaaaaaaaaaaaaaaaaaaaaaaaaaaaaaaaaaaaaaaaaaaaaaaaaaaaaaaaaaaaaaaaaaaaaaaaaaaaaa

SEQ ID NO: 23395 - RNA, 1724 nt, Artificial Sequence
  mRNA product Design a-1 (A100) comprising derived and/or modified sequence from LASV(Mad39;Clade IV)__ANH09722__GPCmut2 (opt1)
aggagagucccgcagucggcguccagcggcucugcuuguucgugugugugucguugcaggccuuauucaagcuuaccaugggccagaucgugaccuucuuccaggaggucccccacgugaucgaggaggugaugaacaucguccugaucgcccucagcauccuggccgugcugaaggggcucuacaacguggcgaccugcggccugaucgggcuggucacguuccuccugcugugcggccgcuccugcaccaccacccucuacaaggggguguacgagcugcaggcccuggagcucaacauggagacgcugaacaugugcaugccgcugagcugcaccaagaacaacucccaccacuacauccgggugggcaacgagaccggccucgagcugacgcugaccaacaccagccucaucaaccacaaguucugcaaccuguccgacgcccacaagaagaaccuguacgaccacgcccucaugagcaucaucuccaccuuccaccugagcauccccaacuucaaccaguacgaggccauguccugcgacuucaacgacgggaagaucagcguccaguacaaccugucccacacguacgcgggcgacaccgccaaccacugcgggaccguggccaacggcgugcuccagaccuucaugcgcauggccuggggcgggagcuacaucgcgcuggacuccggccgcgggggcugggacugcaucaugacgagcuaccaguaccugaucauccagaacaccaccugggaggaccacugccaguucucccggcccagccccaucggguaccucggccugcugucccagcggacccgcgacaucuacaucagccggcgccgccggggcacguucaccuggacccuguccgacagcgaggggaaggacaccccgggcggguacugccucacgcgguggaugcugaucgaggccgagcugaagugcuucggcaacaccgccgucgccaagugcaacgagaagcacgacgaggaguucugcgacaugcuccgccuguucgacuucugcaagcaggccauccagcggcugaaggcgcccgcccagaugagcauccagcucaucaacaaggccgugaacgcccugaucaacgaccagcugaucaugaagaaccaccuccgcgacaucauggggauccccuacugcaacuacuccaaguacugguaccugaaccacaccgugaccggcaagacgagccugcccaagugcuggcucgucuccaacggcagcuaccugaacgagacccacuucuccgacgacaucgagcagcaggccgacaacaugaucaccgagaugcugcagaaggaguacauggagcggcaggggaagacgccccucggccugguggaccuguucguguucagcaccuccuucuaccugaucagcaucuuccuccaccuggucaagaucccgacccaccgccacgugguggggaagcccugccccaagccccaccggcugaaccacaugggcaucugcuccugcggguucuacaagcagccgggcguccccgugcgcuggaagcggugaggacuagucccuguucccagagcccacuuuuuuuucuuuuuuugaaauaaaauagccugucuuucagaucuaaaaaaaaaaaaaaaaaaaaaaaaaaaaaaaaaaaaaaaaaaaaaaaaaaaaaaaaaaaaaaaaaaaaaaaaaaaaaaaaaaaaaaaaaaaaaaaaaaaa

SEQ ID NO: 23396 - RNA, 1724 nt, Artificial Sequence
  mRNA product Design a-1 (A100) comprising derived and/or modified sequence from LASV(Z0947-SLE-2011;Clade IV)__AIT17840__GPCmut2 (opt1)
aggagagucccgcagucggcguccagcggcucugcuuguucgugugugugucguugcaggccuuauucaagcuuaccaugggccagaucgugaccuucuuccaggaggucccccacgugaucgaggaggugaugaacaucguccugaucgcccucagcauccuggccgugcugaaggggcucuacaacuucgcgaccugcggccugguggggcuggucacguuccuccugcugugcggccgcuccugcaccaucagccucuacaaggggguguacgagcugcagacccuggagcucaacauggagacccugaacaugugcaugccgcuguccugcaccaagaacaacagccaccacuacaucauggugggcaacgagaccggccucgagcugacccugacgaacaccuccaucaucaaccacaaguucugcaaccucagcgacgcccacaagaagaaccuguacgaccacgcccugauguccaucaucagcaccuuccaccucuccauccccaacuucaaccaguacgaggccaugagcugcgacuucaacgggggcaagaucuccguccaguacaaccugagccacuccuacgccggggacgcggccaaccacugcggcaccguggccaacggggugcugcagacguucaugcggauggccuggggcggcagcuacaucgcgcucgacuccgggcgcgaccggugggacugcaucaugaccagcuaccaguaccugaucauccagaacaccaccugggaggaccacugccaguucucccgccccagccccaucggcuaccuggggcuccugucccagcggacgcgcgacaucuacaucagccggcgccgccggggcaccuucaccuggacccugagcgacuccgagggcaaggacacgcccgggggcuacugccugacccgguggaugcucaucgaggccgagcugaagugcuucgggaacaccgccgucgccaagugcaacgagaagcacgacgaggaguucugcgacaugcugcgccucuucgacuucugcaagcaggccauccagcggcugaaggcgcccgcccagaugagcauccagcugaucaacaaggccgugaacgcccucaucaacgaccagcugaucaugaagaaccaccuccgcgacaucaugggcauccccuacugcaacuacuccaaguacugguaccugaaccacaccacgaccgggaagaccagccugcccaagugcuggcugguguccaacggcagcuaccucaacgagacccacuucuccgacgacaucgagcagcaggccgacaacaugaucacggagaugcugcagaaggaguacauggagcggcagggcaagaccccgcuggggcucgucgaccuguucguguucagcaccuccuucuaccugaucagcaucuuccugcaccucgugaagaucccgacccaccgccacaucgucggcaagcccugccccaagccccaccggcugaaccacauggggaucugcuccugcggccuguacaagcagccgggggugcccgugaaguggaagcgcugaggacuagucccuguucccagagcccacuuuuuuuucuuuuuuugaaauaaaauagccugucuuucagaucuaaaaaaaaaaaaaaaaaaaaaaaaaaaaaaaaaaaaaaaaaaaaaaaaaaaaaaaaaaaaaaaaaaaaaaaaaaaaaaaaaaaaaaaaaaaaaaaaaaaa

SEQ ID NO: 23397 - RNA, 1724 nt, Artificial Sequence
  mRNA product Design a-1 (A100) comprising derived and/or modified sequence from LASV(Josiah;Clade IV)__NP_694870__GPCmut2 (opt1)
aggagagucccgcagucggcguccagcggcucugcuuguucgugugugugucguugcaggccuuauucaagcuuaccaugggccagaucgugaccuucuuccaggaggucccccacgugaucgaggaggugaugaacaucguccugaucgcccucagcgugcuggccgugcugaaggggcucuacaacuucgcgaccugcggccuggucgggcuggugacguuccuccugcugugcggccgcuccugcaccaccagccucuacaaggggguguacgagcugcagacccuggagcucaacauggagacgcugaacaugugcaugccgcuguccugcaccaagaacaacagccaccacuacaucauggucggcaacgagaccggccucgagcugacccugacgaacaccuccaucaucaaccacaaguucugcaaccucagcgacgcccacaagaagaaccuguacgaccacgcccugauguccaucaucagcaccuuccaccucuccauccccaacuucaaccaguacgaggccaugagcugcgacuucaacgggggcaagaucuccgugcaguacaaccugagccacuccuacgccggggacgcggccaaccacugcggcaccguggccaacgggguccugcagacguucaugcggauggccuggggcggcagcuacaucgcgcucgacuccgggcgcggcaacugggacugcaucaugaccagcuaccaguaccugaucauccagaacaccaccugggaggaccacugccaguucucccggcccagccccaucggguaccugggccuccugucccagcgcacgcgggacaucuacaucagccgccggcgccggggcaccuucaccuggacccugagcgacuccgaggggaaggacacgccgggcggguacugccucacccgcuggaugcugaucgaggccgagcugaagugcuucggcaacaccgccguggccaagugcaacgagaagcacgacgaggaguucugcgacaugcuccggcuguucgacuucugcaagcaggccauccagcgccugaaggcgcccgcccagaugagcauccagcucaucaacaaggccgugaacgcccugaucaacgaccagcugaucaugaagaaccaccuccgggacaucauggggauccccuacugcaacuacuccaaguacugguaccugaaccacaccacgaccggccgcaccagccugcccaagugcuggcucgucuccaacggcagcuaccugaacgagacccacuucuccgacgacaucgagcagcaggccgacaacaugaucacggagaugcugcagaaggaguacauggagcggcaggggaagaccccgcucggccugguggaccuguucguguucagcaccuccuucuaccugaucagcaucuuccuccaccuggucaagauccccacccaccgccacaucguggggaaguccugccccaagccccaccggcugaaccacaugggcaucugcagcugcgggcucuacaagcagccgggcgugcccgucaaguggaagcgcugaggacuagucccuguucccagagcccacuuuuuuuucuuuuuuugaaauaaaauagccugucuuucagaucuaaaaaaaaaaaaaaaaaaaaaaaaaaaaaaaaaaaaaaaaaaaaaaaaaaaaaaaaaaaaaaaaaaaaaaaaaaaaaaaaaaaaaaaaaaaaaaaaaaaa

SEQ ID NO: 23398 - RNA, 1721 nt, Artificial Sequence
  mRNA product Design a-1 (A100) comprising derived and/or modified sequence from LASV(LP;Clade I)__AAF86701__GPCmut2 (opt1)
aggagagucccgcagucggcguccagcggcucugcuuguucgugugugugucguugcaggccuuauucaagcuuaccaugggccagaucaucaccuucuuccaggaggugccccacgucaucgaggaggugaugaacaucgugcugaucgcccucagccugcuggccauccucaaggggcuguacaacaucgcgaccugcggcaucaucgggcuggucgccuuccucuuccugugcggcaaguccugcagccugacgcucaagggcggguacgagcugcagacccuggagcucaacauggagacccugaacaugugcaugccgcuguccugcaccaagaacagcucccaccacuacauccgcgugggcaacgagacggggcucgagcugacccugaccaacaccagcaucaucaaccacaaguucugcaaccucuccgacgcccacaagaagaaccuguacgaccacgcccugaugagcaucaucuccacguuccaccucagcauccccaacuucaaccaguacgaggccauguccugcgacuucaacggcgggaagaucagcgugcaguacaaccugucccacagcuacgcgggcgacgccgccgagcacugcgggaccgucgccaacggcgugcugcagaccuucaugcggauggcguggggcgggcgcuacaucgcccucgacuccggcaaggggaacugggacugcaucaugaccagcuaccaguaccugaucauccagaacacgaccugggaggaccacugccaguucucccggcccagccccaucggcuaccugggccuccugucccagcgcacccgggacaucuacaucagccgccggcgccgggggaccuucacguggacccugagcgacuccgagggcaacgagacccccgggggcuacugccucacccgcuggaugcugaucgaggccgagcugaagugcuucgggaacacggccguggccaagugcaacgagaagcacgacgaggaguucugcgacaugcuccggcuguucgacuucugcaagcaggcgauccgccggcugaaggccccggcccagaugagcauccagcucaucaacaaggccgucaacgcccugaucaacgaccagcugaucaugaagaaccaccuccgcgacaucaugggcauccccuacugcaacuacuccaaguacugguaccugaaccacaccagcuccggccggaccagccugcccaagugcuggcucaucuccaacgggagcuaccugaacgagacccaguucuccgacgacaucgagcagcaggcggacaacaugaucacggagaugcugcagaaggaguacaucgagcgccagggcaagaccccgcucgggcugguggacaucuucaucuucagcaccuccuucuaccugaucagcaucuuccugcaccucaucaagauccccacccaccggcacaucgugggcaagcccugccccaagccgcaccgccugaaccacaugggggucugcuccugcggccuguacaagcaccccggcgugcccacgaaguggaagcggugaggacuagucccuguucccagagcccacuuuuuuuucuuuuuuugaaauaaaauagccugucuuucagaucuaaaaaaaaaaaaaaaaaaaaaaaaaaaaaaaaaaaaaaaaaaaaaaaaaaaaaaaaaaaaaaaaaaaaaaaaaaaaaaaaaaaaaaaaaaaaaaaaaaaa

SEQ ID NO: 23399 - RNA, 1721 nt, Artificial Sequence
  mRNA product Design a-1 (A100) comprising derived and/or modified sequence from LASV(803213;Clade II)__AAF86703__GPCmut2 (opt1)
aggagagucccgcagucggcguccagcggcucugcuuguucgugugugugucguugcaggccuuauucaagcuuaccaugggccagaucaucaccuucuuccaggaggugccccacgucaucgaggaggugaugaacaucgugcugaucgcccucagccugcuggccauccucaaggggaucuacaacgucgcgaccugcggccuguucgggcugaucuccuuccuccugcugugcggccgcagcugcuccgugacguacaaggggguguacgagcuccagacccuggagcugaacauggccaaccucaacaugugcaugccgcugagcugcaccaagaacaacucccaccacuacaucauggucggcaacgagaccggccuggagcucacgcugaccaacaccagcaucaucaaccacaaguucugcaaccuguccgacgcccacaagaagaaccucuacgaccacgcccugaugagcaucaucuccaccuuccaccugagcauccccaacuucaaccaguacgaggccauguccugcgacuucaacgggggcaagaucagcgugcaguacaaccucucccacagcuucgcgguggacgccgccaaccacugcgggacgaucgccaacggcguccugcagaccuucaugcggauggcguggggcggguccuacaucgcccuggacagcggcaaggggaacugggacugcaucaugaccuccuaccaguaccucaucauccagaacaccacgugggaggaccacugccaguucagccgccccucccccaucggcuaccuggggcugcucagccagcggacccgcgacaucuacaucagccggcgccggcgcggcaccuucaccuggacgcuguccgacagcgagggcaacgaggcccccgggggcuacugccugacccgguggaugcucaucgaggccgagcugaagugcuucgggaacaccgccguggcgaagugcaacgagaagcacgacgaggaguucugcgacaugcugcgccucuucgacuucugcaagcaggccaucaagcggcugaagaccccggcccagauguccauccagcugaucaacaaggccgugaacgcccucaucaacgaccagcugaucaugaagaaccaccuccgcgacaucaugggcauccccuacugcaacuacagccgguacugguaccugaaccacacggucaccgggaagaccucccugccccgcugcuggcuggugagcaacggcuccuaccucaacgagacccacuucagcgacgacaucgagcagcaggcggacaacaugaucacggagaugcugcagaaggaguacauggaccggcagggcaagaccccgcuggggcucguggaccuguucgucuucuccaccagcuucuaccugaucuccaucuuccugcaccucgugaagauccccacccaccgccacaucgugggcaagcccugccccaagccgcaccggcugaaccacauggggaucugcagcugcggccuguacaagcaccccgggguccccgugaaguggaagcgcugaggacuagucccuguucccagagcccacuuuuuuuucuuuuuuugaaauaaaauagccugucuuucagaucuaaaaaaaaaaaaaaaaaaaaaaaaaaaaaaaaaaaaaaaaaaaaaaaaaaaaaaaaaaaaaaaaaaaaaaaaaaaaaaaaaaaaaaaaaaaaaaaaaaaa

SEQ ID NO: 23400 - RNA, 1721 nt, Artificial Sequence
  mRNA product Design a-1 (A100) comprising derived and/or modified sequence from LASV(GA391;Clade III)__CAA36645__GPCmut2 (opt1)
aggagagucccgcagucggcguccagcggcucugcuuguucgugugugugucguugcaggccuuauucaagcuuaccaugggccagaucgugaccuucuuccaggaggucccccacgugaucgaggaggugaugaacaucguccugaucgcccucagcauccuggccauccugaaggggcucuacaacguggcgaccugcggccugaucgggcuggugacguuccuccugcuguccggccgcagcugcucccucaucuacaaggggaccuacgagcugcagacccuggagcucaacauggagacccugaacaugugcaugccgcugagcugcacgaagaacaacucccaccacuacauccgggucggcaacgagaccggccucgagcugacccugaccaacacgagcauccucaaccacaaguucugcaaccuguccgacgcccacaagcgcaaccuguacgaccacagccucauguccaucaucagcaccuuccaccuguccauccccaacuucaaccaguacgaggccaugagcugcgacuucaacgggggcaagaucaccgugcaguacaaccugucccacagcuucgccguggacgccgcggggcacugcggcacccucgccaacgggguccugcagacguucaugcggauggccuggggcggcuccuacaucgcccuggacagcgggcgcggcaacugggacugcaucaugaccuccuaccaguaccucaucauccagaacaccaccugggacgaccacugccaguucagccggcccucccccaucggguaccugggccugcucagccagcgcacgcgggacaucuacaucagccgccggcgccggggcaccuucaccuggacccuguccgacagcgaggggaacgagacgccgggcggguacugccugacccgcuggaugcucaucgaggcggagcugaagugcuucggcaacaccgccguggccaagugcaacgagaagcacgacgaggaguucugcgacaugcugcggcuguucgacuucugcaagcaggccauccgccggcugaagacccccgcccagauguccauccagcugaucaacaaggcggugaacgcccucaucaacgaccagcugaucaugaagaaccaccuccgcgacaucauggggauccccuacugcaacuacagccgguacugguaccucaaccacacguccaccggcaagaccagccugccccgcugcuggcugaucuccaacggcagcuaccucaacgagaccaaguucuccgacgacaucgagcagcaggccgacaacaugaucacggagaugcugcagaaggaguacaucgaccggcaggggaagaccccgcugggccuggucgaccucuucguguucagcaccuccuucuaccugaucagcaucuuccugcaccucgugaagauccccacccaccgccacaucgucgggaagcccugccccaagccgcaccggcugaaccacaugggcaucugcuccugcgggcuguacaagcagcccggcgugcccgugcgcuggaagcgcugaggacuagucccuguucccagagcccacuuuuuuuucuuuuuuugaaauaaaauagccugucuuucagaucuaaaaaaaaaaaaaaaaaaaaaaaaaaaaaaaaaaaaaaaaaaaaaaaaaaaaaaaaaaaaaaaaaaaaaaaaaaaaaaaaaaaaaaaaaaaaaaaaaaaa

SEQ ID NO: 23401 - RNA, 1724 nt, Artificial Sequence
  mRNA product Design a-1 (A100) comprising derived and/or modified sequence from LASV(AV;Clade V)__CCA30314__GPCmut2 (opt1)
aggagagucccgcagucggcguccagcggcucugcuuguucgugugugugucguugcaggccuuauucaagcuuaccaugggccagaucgugaccuucuuccaggaggucccccacgugaucgaggaggugaugaacaucguccugaucgcccucagcauccuggccgugcugaaggggcucuacaacaucgcgaccugcggccugaucgggcugaucacguuccuccugcugugcggccgcuccugcagcuccaaccucuacaaggggguguacgagcugcagagccuggaccucaacauggagacccugaacaugugcaugccgcuguccugcaccaagaacaacagccaccacuacauccgggucggcaacgacaccggccucgagcugacgcugaccaacaccuccauccucaaccacaaguucugcaaccugagcgacgcccacaagaaggaccuguacgaccacgcccucauguccaucaucagcaccuuccaccuguccauccccaacuucaaccaguacgaggccaugagcugcgacuucaacgggggcaagaucuccgugcaguacaaccugagccacuccuacgccaucgacgcggccaaccacugcgggacgguggccaacggcauccuccagaccuucaugcgcauggccuggggcgggagcuacaucgcgcuggacuccggccgggggaacugggacugcaucaugaccagcuaccaguaccugaucauccagaacaccacgugggagaaccacugccaguucucccgccccagccccaucggcuaccucgggcugcugagccagcggacccgcgacaucuacaucucccggcgccggcgcggcaccuucaccuggacgcucagcgacuccgagggcaacgccacccccgggggcuacugccugacccgguggaugcugaucgaggccgagcucaagugcuucgggaacaccgccgucgccaagugcaacgagaagcacgacgaggaguucugcgacaugcugcgccuguucgacuucugcaagcaggcgaucagccggcucaaguccccggcccagaugagcauccagcugaucaacaaggccgugaacgcccugaucaacgaccagcucaucaugaagaaccaccuccgcgacaucaugggcauccccuacugcaacuacuccaaguacugguaccugaaccacacgaucaccgggaagaccagccugcccaagugcuggcugguguccaacggcagcuaccugaacgagacccacuucuccgacgacaucgagcagcaggccgacaacaugaucacggagaugcuccagaaggaguacauggagcggcagggcaagaccccgcuggggcuggucgaccuguucguguucagcaccuccuucuaccucaucagcaucuuccugcgccuggugaagauccccacccaccggcacaucgucggcaagcccugccccaagccgcaccgccucaaccacauggggaucugcuccugcggccuguacaagcagcccggggugcccgugcgguggaagcgcugaggacuagucccuguucccagagcccacuuuuuuuucuuuuuuugaaauaaaauagccugucuuucagaucuaaaaaaaaaaaaaaaaaaaaaaaaaaaaaaaaaaaaaaaaaaaaaaaaaaaaaaaaaaaaaaaaaaaaaaaaaaaaaaaaaaaaaaaaaaaaaaaaaaaa

SEQ ID NO: 23402 - RNA, 1721 nt, Artificial Sequence
  mRNA product Design a-1 (A100) comprising derived and/or modified sequence from LASV(Togo/2016/7082;Clade VI)__AMR44577__GPCmut2 (opt1)
aggagagucccgcagucggcguccagcggcucugcuuguucgugugugugucguugcaggccuuauucaagcuuaccaugggccagaucaucaccuucuuccaggaggugccccacgucaucgaggaggugaugaacaucgugcugaucgcccucagccugcuggccauccucaagggggucuacaacguggcgaccugcggcaucaucgggcuggugacguuccuguuccucugcggccgcuccugcagccugaucuacaagggguccuacgagcugcagacccucgagcugaacauggagacccugaacaugugcaugccgcucagcugcaccaagaacuccagccaccacuacauccgggucggcaacgagacgggccuggagcugacccucaccaacaccuccaucaucaaccacaaguucugcaaccugagcgacgcccacaagcgcaaccuguacgaccacgcccucauguccauccugagcacguuccaccuguccauccccaacuucaaccaguacgaggccaugagcugcgacuucaacgggggcaagaucuccgugcaguacaaccucagccacgccuacgcgguggacgccgccgagcacugcgggaccgucgccaacggcgugcugcagaccuucaugcggauggcguggggcggguccuacaucgcccuggacagcggccgcgggaacugggacugcaucaugaccuccuaccaguaccucaucauccagaacacgaccugggaggaccacugccaguucagccggcccucccccaucggcuaccuggggcugcucagccagcgcacccgggacaucuacaucagccgccggcgccggggcaccuucacguggacccuguccgacagcgagggcaacgagacccccgggggcuacugccugacccgcuggaugcucaucgaggccgagcugaagugcuucgggaacacggccguggccaagugcaacgagaagcacgacgaggaguucugcgacaugcugcggcuguucgacuucugcaagcaggcgauccagcgccugaaguccccggcccagaugagcauccagcugaucaacaaggccgucaacgcccucaucaacgaccagcugaucaugaagaaccaccuccgggacaugaugggcauccccuacugcaacuacuccaaguacugguaccucaaccacaccagcuccgggcgcaccagccugcccaagugcuggcugguguccaacggcagcuaccucaacgagacccacuucuccgacgacaucgagcagcaggccgacaacaugaucacggagaugcugcagaaggaguacaucgaccggcagggcaagaccccgcuggggcucguggaccuguucgucuucagcaccuccuucuaccugaucagcaucuuccugcaccucaucaagauccccacccaccgccacaucgugggcaagcccugccccaagccgcaccggcugaaccacauggggaucugcuccugcggccuguacaagcagcccggggugcccacgcgcuggaagcggugaggacuagucccuguucccagagcccacuuuuuuuucuuuuuuugaaauaaaauagccugucuuucagaucuaaaaaaaaaaaaaaaaaaaaaaaaaaaaaaaaaaaaaaaaaaaaaaaaaaaaaaaaaaaaaaaaaaaaaaaaaaaaaaaaaaaaaaaaaaaaaaaaaaaa

SEQ ID NO: 23403 - RNA, 1721 nt, Artificial Sequence
  mRNA product Design a-1 (A100) comprising derived and/or modified sequence from LASV(KAK-428;Clade n.d. (VII))__ANH09740__GPCmut2 (opt1)
aggagagucccgcagucggcguccagcggcucugcuuguucgugugugugucguugcaggccuuauucaagcuuaccaugggccagaucgugaccuucuuccaggaggucccccacgugaucgaggaggugaugaacaucguccugaucgcccucagccugcuggccauccucaaggggcuguacaacuucgcgaccugcggcgugaucgggcugaucacguuccuccugcugugcggccgcuccugcagcgccaccuacaaggggcaguacgagcuccagacccuggagcugaacauggagucccucaacaugugcaugccgcugagcugcaccaagaacaacucccaccacuacauccgggccggcaacaacacgggccuggagcucacccugaccaacaccagcaucaucucccacaaguucugcaaccugagcgacgcccacaagaagaaccucuacgaccacacgcugauguccaucaucaccaccuuccaccugagcauccccaacuucaaccaguacgaggccauguccugcgacuucaacgggggcaagaucagcauccaguacaaccucucccacagcuacgcgggggacgccgcccagcacugcggcaccguggccaacgggguccugcagacguucaugcgcauggcguggggcggcuccuaccuggcccucgacagcgggcggcgcggcugggacugcaucaucuccagcuaccaguaccugaucauccagaacaccaccugggacgaccacugccaguucucccggcccagccccaucggguaccugggcuucgugagccagaagacccgcgacaucuacaucucccggcgccggcgcggcacguucaccuggacccucagcgacuccgaggggcacgacaugccgggcggguacugccugacccgguggaugcugaucgaggccgaccucaagugcuucggcaacacggccguggccaagugcaacgagaagcacgacgaggaguucugcgacauguggcgccuguucgacuucugcaagcaggcgauccagcggcugaaggcccccgcccagaugaacauccagcucaucaacaaggccgucaacgcccugaucaacgaccagcugaugaugaagaaccaccuccgcgacaucauggggauccccuacugcaacuacagcaaguucugguaccugaacaacaccaccaccggccggacgucccugccccgcugcuggcucaucagcaacggcuccuaccugaacgagacccacuucagcgacgacaucgagcagcaggcggacaacaugaucaccgagaugcugcagaaggaguacauggaccggcaggggaagaccccgcucggccugguggaccuguucguguucuccacgagcuucuaccucaucaccaucuuccugcaccuggucaagauccccacccaccgccacaucguggggaagcccugccccaagccgcaccggcugaaccacaugggcaucugcuccugcgggcucuacaagcagcccggcgugcccguccgcuggaagcggugaggacuagucccuguucccagagcccacuuuuuuuucuuuuuuugaaauaaaauagccugucuuucagaucuaaaaaaaaaaaaaaaaaaaaaaaaaaaaaaaaaaaaaaaaaaaaaaaaaaaaaaaaaaaaaaaaaaaaaaaaaaaaaaaaaaaaaaaaaaaaaaaaaaaa

SEQ ID NO: 23404 - RNA, 1721 nt, Artificial Sequence; identical to SEQ ID NO: 23398
  mRNA product Design a-1 (A100) comprising derived and/or modified sequence from LASV(Pinneo-NIG-1969;Clade I)__AIT17836__GPCmut2 (opt1)

SEQ ID NO: 23405 - RNA, 1721 nt, Artificial Sequence
  mRNA product Design a-1 (A100) comprising derived and/or modified sequence from LASV(ISTH0009-NIG-2011;Clade II)__AIT17404__GPCmut2 (opt1)
aggagagucccgcagucggcguccagcggcucugcuuguucgugugugugucguugcaggccuuauucaagcuuaccaugggccagaucaucaccuucuuccaggaggugccccacgucaucgaggaggugaugaacaucgugcugaucgcccucagccugcuggccauccucaaggggaucuacaacgucgcgaccugcggccuguucgggcugguguccuuccuccugcugugcggccgcagcugcuccacgaccuacaaggggguguacgagcuccagacccuggagcuggacauggccagccucaacaugugcaugccgcuguccugcaccaagaacaacagccaccacuacaucauggucggcaacgagacgggccuggagcucacccugaccaacaccuccaucaucaaccacaaguucugcaaccugagcgacgcccacaagaagaaccucuacgaccacgcccugauguccaucaucagcacguuccaccuguccauccccaacuucaaccaguacgaggccaugagcugcgacuucaacgggggcaagaucuccgugcaguacaaccucagccacgcguacgccguggacgccgccaaccacugcgggaccaucgcgaacggcguccugcagaccuucaugcggauggccuggggcggguccuacaucgcccuggacagcggcaagggguccugggacugcaucaugaccagcuaccaguaccucaucauccagaacacgaccugggaggaccacugccaguucucccgccccagccccaucggcuaccuggggcugcucagccagcggacccgcgacaucuacaucucccggcgccggcgcggcaccuucacguggacccugagcgacuccgagggcaacgagacccccgggggcuacugccugacccgguggaugcucaucgaggccgagcugaagugcuucgggaacacggccguggcgaagugcaacgagaagcacgacgaggaguucugcgacaugcugcgccucuucgacuucugcaagcaggccauccggcgccugaagaccccggcccagaugagcauccagcugaucaacaaggccgugaacgcccucaucaacgaccagcugaucaugaagaaccaccuccgggacaucaugggcauccccuacugcaacuacuccaaguacugguaccugaaccacaccgucaccgggaagacgagccugccccgcugcuggcugguguccaacggcagcuaccucaacgagacccacuucuccgacgacaucgagcagcaggcggacaacaugaucaccgagcugcugcagaaggaguacauggaccggcagggcaagaccccgcucgggcugguggaccuguucgucuucagcacguccuucuaccugaucagcaucuuccuccaccugaucaagauccccacccaccgccacaucaccggcaagcccugccccaagccgcaccggcugaaccacauggggaucugcuccugcggccucuacaagcaccccggggugcccgugaaguggaagcgcugaggacuagucccuguucccagagcccacuuuuuuuucuuuuuuugaaauaaaauagccugucuuucagaucuaaaaaaaaaaaaaaaaaaaaaaaaaaaaaaaaaaaaaaaaaaaaaaaaaaaaaaaaaaaaaaaaaaaaaaaaaaaaaaaaaaaaaaaaaaaaaaaaaaaa

SEQ ID NO: 23406 - RNA, 1721 nt, Artificial Sequence
  mRNA product Design a-1 (A100) comprising derived and/or modified sequence from LASV(ISTH2010-NIG-2012;Clade II)__AIT17482__GPCmut2 (opt1)
aggagagucccgcagucggcguccagcggcucugcuuguucgugugugugucguugcaggccuuauucaagcuuaccaugggccagaucaucaccuucuuccaggaggugccccacgucaucgaggaggugaugaacaucgugcugaucgcccucagccugcuggccauccucaaggggaucuacaacgucgcgaccugcggccuguucgggcugguguccuuccuccugcugugcggccgcagcugcuccacgaccuacaaggggguguacgagcuccagacccuggagcuggacauggccagccucaacaugugcaugccgcuguccugcaccaagaacaacagccaccacuacaucauggucggcaacgagacgggccuggagcucacccugaccaacaccuccaucaucaaccacaaguucugcaaccugagcgacgcccacaagaagaaccucuacgaccacgcccugauguccaucaucagcacguuccaccuguccauccccaacuucaaccaguacgaggccaugagcugcgacuucaacgggggcaagaucuccgugcaguacaaccucagccacgcguacgccguggacgccgccaaccacugcgggaccaucgcgaacggcguccugcagaccuucaugcggauggccuggggcggguccuacaucgcccuggacagcggcaagggguccugggacugcaucaugaccagcuaccaguaccucaucauccagaacaucacgugggaggaccacugccaguucucccgccccagccccaucggcuaccuggggcugcucagccagcggacccgcgacaucuacaucucccggcgccggcgcggcaccuucaccuggacgcugagcgacuccgagggcaacgagacccccgggggcuacugccugacccgguggaugcucaucgaggccgagcugaagugcuucgggaacaccgccguggcgaagugcaacgagaagcacgacgaggaguucugcgacaugcugcgccucuucgacuucugcaagcaggccauccggcgccugaagacgccggcccagaugagcauccagcugaucaacaaggccgugaacgcccucaucaacgaccagcugaucaugaagaaccaccuccgggacaucaugggcauccccuacugcaacuacuccaaguacugguaccugaaccacaccgucaccgggaagaccagccugccccgcugcuggcugguguccaacggcagcuaccucaacgagacgcacuucuccgacgacaucgagcagcaggcggacaacaugaucaccgagcugcugcagaaggaguacaucgaccggcagggcaagaccccgcucgggcugguggaccuguucgucuucagcaccuccuucuaccugaucagcaucuuccuccaccuggugaagauccccacgcaccgccacguggucggcaagcccugccccaagccgcaccggcugaaccacauggggaucugcuccugcggccucuacaagcaccccggggugcccgugaaguggaagcgcugaggacuagucccuguucccagagcccacuuuuuuuucuuuuuuugaaauaaaauagccugucuuucagaucuaaaaaaaaaaaaaaaaaaaaaaaaaaaaaaaaaaaaaaaaaaaaaaaaaaaaaaaaaaaaaaaaaaaaaaaaaaaaaaaaaaaaaaaaaaaaaaaaaaaa

SEQ ID NO: 23407 - RNA, 1721 nt, Artificial Sequence
  mRNA product Design a-1 (A100) comprising derived and/or modified sequence from LASV(Lassa virus/H.sapiens-wt/NGA/2015/ISTH_0543;Clade II)__AVO03639__GPCmut2 (opt1)
aggagagucccgcagucggcguccagcggcucugcuuguucgugugugugucguugcaggccuuauucaagcuuaccaugggccagaucaucaccuucuuccaggaggugccccacgucaucgaggaggugaugaacaucgugcugaucgcccucagccugcuggccauccucaaggggaucuacaacgucgcgaccugcggccuguucgggcugguguccuuccuccugcugugcggccgcagcugcuccacgaccuacaaggggguguacgagcuccagacccuggagcuggacauggccaaccucaacaugugcaugccgcugagcugcaccaagaacaacucccaccacuacaucauggucggcaacgagacgggccuggagcucacccugaccaacaccagcaucaucaaccacaaguucugcaaccuguccgacgcccacaagaagaaccucuacgaccacgcccugaugagcaucaucuccacguuccaccugagcauccccaacuucaaccaguacgaggccauguccugcgacuucaacgggggcaagaucagcgugcaguacaaccucucccacaccuacgcgguggacgccgccaaccacugcgggaccaucgccaacggcguccugcagaccuucaugcggauggcguggggcgggagcuacaucgcccuggacuccggcaaggggagcugggacugcaucaugacguccuaccaguaccucgugauccagaacaccaccugggaggaccacugccaguucagccgccccucccccaucggcuaccuggggcugcucagccagcggacccgcgacaucuacaucagccggcgccggcgcggcacguucaccuggacccuguccgacagcgagggcaacgagacccccgggggcuacugccugacgcgguggaugcucaucgaggccgagcugaagugcuucgggaacaccgccguggccaagugcaacgagaagcacgacgaggaguucugcgacaugcugcgccucuucgacuucugcaagcaggcgauccggcgccugaagaccccggcccagauguccauccagcugaucaacaaggccgucaacgcccucaucaacgaccagcugaucaugaagaaccaccuccgggacaucaugggcauccccuacugcaacuacagcaaguacugguaccugaaccacaccgugacggggaagaccucccugccccgcugcuggcuggugagcaacggcuccuaccucaacgagacccacuucagcgacgacaucgagcagcaggccgacaacaugaucaccgagcugcugcagaaggaguacaucgaccggcagggcaagacgccgcucgggcuggucgaccuguucguguucuccaccagcuucuaccugaucuccaucuuccuccaccuggugaagauccccacccaccgccacaucaccggcaagcccugccccaagccgcaccggcugaaccacauggggaucugcagcugcggccucuacaagcaccccgggguccccgugaaguggaagcgcugaggacuagucccuguucccagagcccacuuuuuuuucuuuuuuugaaauaaaauagccugucuuucagaucuaaaaaaaaaaaaaaaaaaaaaaaaaaaaaaaaaaaaaaaaaaaaaaaaaaaaaaaaaaaaaaaaaaaaaaaaaaaaaaaaaaaaaaaaaaaaaaaaaaaa

SEQ ID NO: 23408 - RNA, 1721 nt, Artificial Sequence
  mRNA product Design a-1 (A100) comprising derived and/or modified sequence from LASV(Lassa virus/H.sapiens-wt/NGA/2016/ISTH_0009;Clade II)__AVO03571__GPCmut2 (opt1)
aggagagucccgcagucggcguccagcggcucugcuuguucgugugugugucguugcaggccuuauucaagcuuaccaugggccagaucaucaccuucuuccaggaggugccccacgucaucgaggaggugaugaacaucgugcugaucgcccucagccugcuggccauccucaaggggaucuacaacgucgcgaccugcggccugcuggggcucguguccuuccugcugcucugcggccgcagcugcuccacgaccuacaaggggguguacgagcugcagacccuggagcucgacauggccagccugaacaugugcaugccgcuguccugcaccaagaacaacagccaccacuacaucauggucggcaacgagacgggccucgagcugacccugaccaacaccuccaucaucaaccacaaguucugcaaccucagcgacgcccacaagaagaaccuguacgaccacgcccugauguccaucaucagcacguuccaccucuccauccccaacuucaaccaguacgaggccaugagcugcgacuucaacgggggccggaucuccgugcaguacaaccugagccacuccuacgcgguggacgccgccaaccacugcgggaccaucgccaacggcguccugcagaccuucaugcgcauggcguggggcgggagcuacaucgcccucgacuccggcaaggggagcugggacugcaucaugaccuccuaccaguaccugaucauccagaacacgaccugggaggaccacugccaguucagccggcccagccccaucggcuaccuggggcuccugucccagcgcacccgggacaucuacaucagccgccggcgccggggcaccuucacguggacccuguccgacagcgagggcaacgagacccccgggggcuacugccucacccgcuggaugcugaucgaggccgagcugaagugcuucgggaacacggccguggccaagugcaacgagaagcacgacgaggaguucugcgacaugcuccggcuguucgacuucugcaagcaggcgauccgccggcugaagaccccggcccagauguccauccagcucaucaacaaggccgugaacgcccugaucaacgaccagcugaucaugaagaaccaccuccgcgacaucaugggcauccccuacugcaacuacagcaaguacugguaccugaaccacaccgucaccgggaagacgucccugccccggugcuggcucgugagcaacggcuccuaccugaacgagacccacuucagcgacgacaucgagcagcaggccgacaacaugaucaccgagcugcuccagaaggaguacaucgaccgccagggcaagaccccgcuggggcugguggaccuguucgucuucuccacgagcuucuaccucaucuccaucuuccugcaccuggugaagauccccacccaccggcacaucaccggcaagcccugccccaagccgcaccgccucaaccacauggggaucugcagcugcggccuguacaaccaccccggggugcccgucaaguggaagcggugaggacuagucccuguucccagagcccacuuuuuuuucuuuuuuugaaauaaaauagccugucuuucagaucuaaaaaaaaaaaaaaaaaaaaaaaaaaaaaaaaaaaaaaaaaaaaaaaaaaaaaaaaaaaaaaaaaaaaaaaaaaaaaaaaaaaaaaaaaaaaaaaaaaaa

SEQ ID NO: 23409 - RNA, 1721 nt, Artificial Sequence
  mRNA product Design a-1 (A100) comprising derived and/or modified sequence from LASV(Lassa virus/H.sapiens-wt/NGA/2016/ISTH_0017;Clade II)__AVO03567__GPCmut2 (opt1)
aggagagucccgcagucggcguccagcggcucugcuuguucgugugugugucguugcaggccuuauucaagcuuaccaugggccagaucaucaccuucuuccaggaggugccccacgucaucgaggaggugaugaacaucgugcugaucgcccucagccugcuggccauccucaaggggaucuacaacgucgcgaccugcggccuguucgggcugguguccuuccuccugcugugcggccgcagcugcuccacgaccuacaaggggguguacgagcuccagacccuggagcuggacauggccagccucaacaugugcaugccgcuguccugcaccaagaacaacagccaccacuacaucauggucggcaacgagacgggccuggagcucacccugaccaacaccuccaucaucaaccacaaguucugcaaccugagcgacgcccacaagaagaaccucuacgaccacgcccugauguccaucaucagcacguuccaccuguccauccccaacuucaaccaguacgaggccaugagcugcgacuucaacgggggcaagaucuccgugcaguacaaccucagccacaccuacgcgaucgacgccgccaaccacugcgggaccaucgccaacggcgugcugcagaccuucaugcggauggcguggggcggguccuacaucgcccuggacagcggcaagggguccugggacugcaucaugacgagcuaccaguaccucaucauccagaacaccaccugggaggaccacugccaguucucccgccccagccccaucggcuaccuggggcugcucagccagcggacccgcgacaucuacaucucccggcgccggcgcggcacguucaccuggacccugagcgacuccgagggcaacgagacccccgggggcuacugccugacgcgguggaugcucaucgaggccgagcugaagugcuucgggaacaccgccgucgccaagugcaacgagaagcacgacgaggaguucugcgacaugcugcgccucuucgacuucugcaagcaggcgauccggcgccugaagaccccggcccagaugagcauccagcugaucaacaaggccgugaacgcccucaucaacgaccagcugaucaugaagaaccaccuccgggacaucaugggcauccccuacugcaacuacuccaaguacugguaccugaaccacaccgugacggggaagaccagccugccccgcugcuggcuggucuccaacggcagcuaccucaacgagacccacuucuccgacgacaucgagcagcaggccgacaacaugaucaccgagcugcugcagaaggaguacauggaccggcagggcaagacgccgcucgggcugguggaccuguucguguucagcaccuccuucuaccugaucagcaucuuccuccaccugguccgcauccccacccaccggcacgugaucggcaagcccugccccaagccgcaccgccugaaccacauggggaucugcuccugcggccucuacaagcaccccggggugcccgucaaguggaagcggugaggacuagucccuguucccagagcccacuuuuuuuucuuuuuuugaaauaaaauagccugucuuucagaucuaaaaaaaaaaaaaaaaaaaaaaaaaaaaaaaaaaaaaaaaaaaaaaaaaaaaaaaaaaaaaaaaaaaaaaaaaaaaaaaaaaaaaaaaaaaaaaaaaaaa

SEQ ID NO: 23410 - RNA, 1721 nt, Artificial Sequence
  mRNA product Design a-1 (A100) comprising derived and/or modified sequence from LASV(Lassa virus/H.sapiens-wt/NGA/2018/ISTH_0959;Clade II)__AVV65099__GPCmut2 (opt1)
aggagagucccgcagucggcguccagcggcucugcuuguucgugugugugucguugcaggccuuauucaagcuuaccaugggccagaucaucaccuucuuccaggaggugccccacgucaucgaggaggugaugaacaucgugcugaucgcccucagccugcuggccauccucaaggggaucuacaacgucgugaccugcggccuguucgggcugguguccuuccuccugcugugcggccgcagcugcuccacgaccuacaagggggucuacgagcuccagacccuggagcuggacauggcgagccucaacaugugcaugccgcuguccugcaccaagaacaacagccaccacuacaucauggugggcaacgagacgggccuggagcucacccugaccaacaccuccaucaucaaccacaaguucugcaaccugagcgacgcccacaagaagaaccucuacgaccacgcccugauguccaucaucagcacguuccaccuguccauccccaacuucaaccaguacgaggccaugagcugcgacuucaacgggggcaagaucuccgugcaguacaaccucagccacgccuacgcgaucgacgccgccaaccacugcgggaccaucgccaacggcguccugcagaccuucaugcggauggcguggggcggguccuacaucgcccuggacagcggcaagggguccugggacugcaucaugaccagcuaccaguaccucaucauccagaacacgaccugggaggaccacugccaguucucccgccccagccccaucggcuaccuggggcugcucagccagcggacccgcgacaucuacaucucccggcgccggcgcggcaccuucacguggacccugagcgacuccgagggcaacgagacccccgggggcuacugccugacccgguggaugcucaucgaggccgagcugaagugcuucgggaacacggccguggccaagugcaacgagaagcacgacgaggaguucugcgacaugcugcgccucuucgacuucugcaagcaggcgauccggcgccugaagaccccggcccagaugagcauccagcugaucaacaaggccgugaacgcccucaucaacgaccagcugaucaugaagaaccaccuccgggacaucaugggcauccccuacugcaacuacuccaaguacugguaccugaaccacaccgucaccgggaagacgagccugccccgcugcuggcugguguccaacggcagcuaccucaacgagacccacuucuccgacgacaucgagcagcaggccgacaacaugaucaccgagcugcugcagaaggaguacaucgaccggcagggcaagaccccgcucgggcugguggaccuguucgucuucagcacguccuucuaccugaucagcaucuuccuccaccuggugaagauccccacccaccgccacgugaucggcaagcccugccccaagccgcaccggcugaaccacauggggaucugcuccugcggccucuacaagcaccccgggguccccgugaaguggaagcgcugaggacuagucccuguucccagagcccacuuuuuuuucuuuuuuugaaauaaaauagccugucuuucagaucuaaaaaaaaaaaaaaaaaaaaaaaaaaaaaaaaaaaaaaaaaaaaaaaaaaaaaaaaaaaaaaaaaaaaaaaaaaaaaaaaaaaaaaaaaaaaaaaaaaaa

SEQ ID NO: 23411 - RNA, 1721 nt, Artificial Sequence
  mRNA product Design a-1 (A100) comprising derived and/or modified sequence from LASV(LASV003-NIG-2008;Clade II)__AIT17580__GPCmut2 (opt1)
aggagagucccgcagucggcguccagcggcucugcuuguucgugugugugucguugcaggccuuauucaagcuuaccaugggccagaucaucaccuucuuccaggaggugccccacgucaucgaggaggugaugaacaucgugcugaucgcccucagccugcuggccauccucaaggggaucuacaacgucgcgaccugcggccuguucgggcugguguccuuccuccugcugugcggccgcagcugcuccacgaccuacaaggggguguacgagcuccagacccuggagcuggacauggccagccucaacaugugcaugccgcuguccugcaccaagaacaacagccaccacuacaucauggucggcaacgagacgggccuggagcucacccugaccaacaccuccaucaucaaccacaaguucugcaaccugagcgacgcccacaagaagaaccucuacgaccacgcccugauguccaucaucagcacguuccaccuguccauccccaacuucaaccaguacgaggccaugagcugcgacuucaacgggggcaagaucuccgugcaguacaaccucagccacaccuacgcgguggacgccgccaaccacugcgggaccaucgccaacggcguccugcagaccuucaugcggauggcguggggcggguccuacaucgcccuggacagcggcaagggguccugggacugcaucaugacgagcuaccaguaccucaucauccagaacaccaccugggaggaccacugccaguucucccgccccagccccaucggcuaccuggggcugcucagccagcggacccgcgacaucuacaucucccggcgccggcgcggcacguucaccuggacccugagcgacuccgagagcaacgagaccccgggcggguacugccugacgcgguggaugcucaucgaggccgagcugaagugcuucggcaacaccgccguggccaagugcaacgagaagcacgacgaggaguucugcgacaugcugcgccucuucgacuucugcaagcaggcgauccggcgccugaaggcccccgcccagauguccauccagcugaucaacaaggccgugaacgcccucaucaacgaccagcugaucaugaagaaccaccuccgggacaucauggggauccccuacugcaacuacagcaaguacugguaccugaaccacaccgucaccggccgcacgucccugccccggugcuggcuggugagcaacggguccuaccucaacgagacccacuucagcgacgacaucgagcagcaggcggacaacaugaucaccgagcugcugcagaaggaguacauggaccgccagggcaagaccccgcucggccugguggaccuguucgucuucuccacgagcuucuaccugaucuccaucuuccuccaccuggugaagauccccacccaccggcacgugaucgggaagcccugccccaagccgcaccgccugaaccacaugggcaucugcagcugcgggcucuacaagcaccccggcguccccgugaaguggaagcggugaggacuagucccuguucccagagcccacuuuuuuuucuuuuuuugaaauaaaauagccugucuuucagaucuaaaaaaaaaaaaaaaaaaaaaaaaaaaaaaaaaaaaaaaaaaaaaaaaaaaaaaaaaaaaaaaaaaaaaaaaaaaaaaaaaaaaaaaaaaaaaaaaaaaa

SEQ ID NO: 23412 - RNA, 1721 nt, Artificial Sequence
  mRNA product Design a-1 (A100) comprising derived and/or modified sequence from LASV(LASV035-NIG-2009;Clade II)__AIT17588__GPCmut2 (opt1)
aggagagucccgcagucggcguccagcggcucugcuuguucgugugugugucguugcaggccuuauucaagcuuaccaugggccagaucaucaccuucuuccaggaggugccccacgucaucgaggaggugaugaacaucgugcugaucgcccucagccugcuggccauccucaaggggaucuacaacgucgcgaccugcggccuguucgggcugguguccuuccuccugcugugcggccgcagcugcuccacgaccuacaaggggguguacgagcuccagacccuggagcuggacauggccagccucaacaugugcaugccgcuguccugcaccaagaacaacagccaccacuacaucauggucggcaacgagacgggccuggagcucacccugaccaacaccuccaucaucaaccacaaguucugcaaccugagcgacgcccacaagaagaaccucuacgaccacgcccugauguccaucaucagcacguuccaccuguccauccccaacuucaaccaguacgaggccaugagcugcgacuucaacgggggcaagaucuccgugcaguacaaccucagccacgcguacgccguggacgccgccaaccacugcgggaccaucgcgaacggcguccugcagaccuucaugcggauggccuggggcggguccuacaucgcccuggacagcggcaagggguccugggacugcaucaugaccagcuaccaguaccucaucauccagaacacgaccugggaggaccacugccaguucucccgccccagccccaucggcuaccuggggcugcucagccagcggacccgcgacaucuacaucucccggcgccggcgcggcaccuucacguggacccugagcgacuccgagggcaacgagacccccgggggcuacugccugacccgguggaugcucaucgaggccgagcugaagugcuucgggaacacggccguggcgaagugcaacgagaagcacgacgaggaguucugcgacaugcugcgccucuucgacuucugcaagcaggccauccggcgccugaaggccccggcccagaugagcauccagcugaucaacaaggccgugaacgcgcucaucaacgaccagcugaucaugaagaaccaccuccgggacaucaugggcauccccuacugcaacuacuccaaguacugguaccugaaccacaccgucaccgggaagaccagccugccccgcugcuggcugguguccaacggcagcuaccucaacgagacgcacuucuccgacgacaucgagcagcaggccgacaacaugaucaccgagcugcugcagaaggaguacaucgaccggcagggcaagaccccgcucgggcugguggaccuguucgucuucagcaccuccuucuaccugaucagcaucuuccuccaccuggugaagauccccacgcaccgccacgugaucggcaagcccugccccaagccgcaccggcugaaccacauggggaucugcuccugcggccucuacaagcaccccgggguccccgugaaguggaagcgcugaggacuagucccuguucccagagcccacuuuuuuuucuuuuuuugaaauaaaauagccugucuuucagaucuaaaaaaaaaaaaaaaaaaaaaaaaaaaaaaaaaaaaaaaaaaaaaaaaaaaaaaaaaaaaaaaaaaaaaaaaaaaaaaaaaaaaaaaaaaaaaaaaaaaa

SEQ ID NO: 23413 - RNA, 1721 nt, Artificial Sequence
  mRNA product Design a-1 (A100) comprising derived and/or modified sequence from LASV(LASV1000-NIG-2009;Clade II)__AIT17782__GPCmut2 (opt1)
aggagagucccgcagucggcguccagcggcucugcuuguucgugugugugucguugcaggccuuauucaagcuuaccaugggccagaucaucaccuucuuccaggaggugccccacgucaucgaggaggugaugaacaucgugcugaucgcccucagccugcuggccauccucaaggggaucuacaacgucgcgaccugcggccuguucgggcugguguccuuccuccugcugugcggccgcagcugcuccacgaccuacaaggggguguacgagcuccagacccuggagcuggacauggccagccucaacaugugcaugccgcuguccugcaccaagaacaacagccaccacuacaucauggucggcaacgagacgggccuggagcucacccugaccaacaccuccaucaucaaccacaaguucugcaaccugagcgacgcccacaagaagaaccucuacgaccacgcccugauguccaucaucagcacguuccaccuguccauccccaacuucaaccaguacgaggccaugagcugcgacuucaacgggggcaagaucuccgugcaguacaaccucagccacaccuacgcgguggacgccgccaaccacugcgggaccaucgccaacggcguccugcagaccuucaugcggauggcguggggcggguccuacaucgcccuggacagcggcaagggguccugggacugcaucaugacgagcuaccaguaccucaucauccagaacaccaccugggaggaccacugccaguucucccgccccagccccaucggcuaccuggggcugcucagccagcggacccgcgacaucuacaucucccggcgccggcgcggcacguucaccuggacccugagcgacuccgagggcaacgagacccccgggggcuacugccugacgcgguggaugcucaucgaggccgagcugaagugcuucgggaacaccgccguggccaagugcaacgagaagcacgacgaggaguucugcgacaugcugcgccucuucgacuucugcaagcaggcgaucaagcggcugaagaccccggcccagaugagcauccagcugaucaacaaggccgugaacgcccucaucaacgaccagcugaucaugaagaaccaccuccgcgacaucaugggcauccccuacugcaacuacuccaaguacugguaccugaaccacaccgucacggggaagaccagccugccccggugcuggcugguguccaacggcagcuaccucaacgagacccacuucuccgacgacaucgagcagcaggccgacaacaugaucaccgagcugcugcagaaggaguacaucgaccgccagggcaagacgccgcucgggcugguggaccuguucgucuucagcaccuccuucuaccugaucagcaucuuccuccaccuggugaagauccccacccaccggcacguggucggcaagcccugccccaagccgcaccgccugaaccacauggggaucugcuccugcggccucuacaagcaccccggggugcccgugaaguggaagcggugaggacuagucccuguucccagagcccacuuuuuuuucuuuuuuugaaauaaaauagccugucuuucagaucuaaaaaaaaaaaaaaaaaaaaaaaaaaaaaaaaaaaaaaaaaaaaaaaaaaaaaaaaaaaaaaaaaaaaaaaaaaaaaaaaaaaaaaaaaaaaaaaaaaaa

SEQ ID NO: 23414 - RNA, 1721 nt, Artificial Sequence
  mRNA product Design a-1 (A100) comprising derived and/or modified sequence from LASV(LASV221-NIG-2010;Clade II)__AIT17624__GPCmut2 (opt1)
aggagagucccgcagucggcguccagcggcucugcuuguucgugugugugucguugcaggccuuauucaagcuuaccaugggccagaucaucaccuucuuccaggaggugccccacgucaucgaggaggugaugaacaucgugcugaucgcccucagccugcuggccauccucaaggggaucuacaacgucgcgaccugcggccuguucgggcugguguccuuccuccugcugugcggccgcagcugcuccacgaccuacaaggggguguacgagcuccagacccuggagcuggacauggccagccucaacaugugcaugccgcuguccugcaccaagaacaacagccaccacuacaucauggucggcaacgagacgggccuggagcucacccugaccaacaccuccaucaucaaccacaaguucugcaaccugagcgacgcccacaagaagaaccucuacgaccacgcccugauguccaucaucagcacguuccaccuguccauccccaacuucaaccaguacgaggccaugagcugcgacuucaacgggggcaagaucuccgugcaguacaaccucagccacaccuacgcgaucgacgccgccaaccacugcgggaccaucgccaacggcgugcugcagaccuucaugcggauggcguggggcggguccuacaucgcccuggacagcggcaagggguccugggacugcaucaugacgagcuaccaguaccucaucauccagaacaccaccugggaggaccacugccaguucucccgccccagccccaucggcuaccuggggcugcucagccagcggacccgcgacaucuacaucucccggcgccggcgcggcacguucaccuggacccugagcgacuccgagggcaacgagacccccgggggcuacugccugacgcgguggaugcucaucgaggccgagcugaagugcuucgggaacaccgccgucgccaagugcaacgagaagcacgacgaggaguucugcgacaugcugcgccucuucgacuucugcaagcaggcgauccggcgccugaagaccccggcccagaugagcauccagcugaucaacaaggccgugaacgcccucaucaacgaccagcugaucaugaagaaccaccuccgggacaucaugggcauccccuacugcaacuacuccaaguacugguaccugaaccacaccgugacggggaagaccagccugccccgcugcuggcuggucuccaacggcagcuaccucaacgagacccacuucuccgacgacaucgagcagcaggccgacaacaugaucaccgagaugcugcagaaggaguacauggaccggcagggcaagacgccgcuggggcucguggaccuguucguguucagcaccuccuucuaccugaucagcaucuuccugcaccucgucaagauccccacccaccgccacgugaucggcaagcccugccccaagccgcaccggcugaaccacauggggaucugcuccugcggccuguacaagcaccccggggugcccgucaaguggaagcgcugaggacuagucccuguucccagagcccacuuuuuuuucuuuuuuugaaauaaaauagccugucuuucagaucuaaaaaaaaaaaaaaaaaaaaaaaaaaaaaaaaaaaaaaaaaaaaaaaaaaaaaaaaaaaaaaaaaaaaaaaaaaaaaaaaaaaaaaaaaaaaaaaaaaaa

SEQ ID NO: 23415 - RNA, 1721 nt, Artificial Sequence
  mRNA product Design a-1 (A100) comprising derived and/or modified sequence from LASV(LASV237-NIG-2010;Clade II)__AIT17638__GPCmut2 (opt1)
aggagagucccgcagucggcguccagcggcucugcuuguucgugugugugucguugcaggccuuauucaagcuuaccaugggccagaucaucaccuucuuccaggaggugccccacgucaucgaggaggugaugaacaucgugcugaucgcccucagccugcuggccauccucaaggggaucuacaacgucgcgaccugcggccuguucgggcugguguccuuccuccugcugugcggccgcagcugcuccacgaccuacaaggggguguacgagcuccagacccuggagcuggacauggccagccucaacaugugcaugccgcuguccugcaccaagaacaacagccaccacuacaucauggucggcaacgagacgggccuggagcucacccugaccaacaccuccaucaucaaccacaaguucugcaaccugagcgacgcccacaagaaggaccucuacgaccacgcccugauguccaucaucagcacguuccaccuguccauccccaacuucaaccaguacgaggccaugagcugcgacuucaacgggggcaagaucuccgugcaguacaaccucagccacaccuacgcgguggacgccgccaaccacugcgggaccaucgccaacggcguccugcagaccuucaugcggauggcguggggcggguccuacaucgcccuggacagcggcaagggguccugggacugcaucaugacgagcuaccaguaccucaucauccagaacaccaccugggaggaccacugccaguucucccgccccagccccaucggcuaccuggggcugcucagccagcggacccgcgacaucuacaucucccggcgccggcgcggcacguucaccuggacccugagcgacuccgagggcaacgagacccccgggggcuacugccugacgcgguggaugcucaucgaggccgagcugaagugcuucgggaacaccgccguggccaagugcaacgagaagcacgacgaggaguucugcgacaugcugcgccucuucgacuucugcaagcaggcgauccggcgccugaagaccccggcccagaugagcauccagcugaucaacaaggccgugaacgcccucaucaacgaccagcugaucaugaagaaccaccuccgggacaucaugggcauccccuacugcaacuacuccaaguacugguaccugaaccacaccgucacggggaagaccagccugccccgcugcuggcugguguccaacggcagcuaccucaacgagacccacuucuccgacgacaucgagcagcaggccgacaacaugaucaccgagcugcugcagaaggaguacauggaccggcagggcaagacgccgcucgggcugguggaccuguucgucuucagcaccuccuucuaccugaucagcaucuuccuccaccugaucaagauccccacccaccgccacaucaccggcaagcccugccccaagccgcaccggcugaaccacauggggaucugcuccugcggccucuacaagcaccccggggugcccgugaaguggaagcgcugaggacuagucccuguucccagagcccacuuuuuuuucuuuuuuugaaauaaaauagccugucuuucagaucuaaaaaaaaaaaaaaaaaaaaaaaaaaaaaaaaaaaaaaaaaaaaaaaaaaaaaaaaaaaaaaaaaaaaaaaaaaaaaaaaaaaaaaaaaaaaaaaaaaaa

SEQ ID NO: 23416 - RNA, 1721 nt, Artificial Sequence
  mRNA product Design a-1 (A100) comprising derived and/or modified sequence from LASV(LASV253-NIG-2011;Clade II)__AIT17670__GPCmut2 (opt1)
aggagagucccgcagucggcguccagcggcucugcuuguucgugugugugucguugcaggccuuauucaagcuuaccaugggccagaucaucaccuucuuccaggaggugccccacgucaucgaggaggugaugaacaucgugcugaucgcccucagccugcuggccauccucaaggggaucuacaacgucgcgaccugcggccuguucgggcugguguccuuccuccugcugugcggccgcagcugcuccacgaccuacaaggggguguacgagcuccagacccuggagcuggacauggccagccucaacaugugcaugccgcuguccugcaccaagaacaacagccaccacuacaucauggucggcaacgagacgggccuggagcucacccugaccaacaccuccaucaucaaccacaaguucugcaaccugagcgacgcccacaagaagaaccucuacgaccacgcccugauguccaucaucagcacguuccaccuguccauccccaacuucaaccaguacgaggccaugagcugcgacuucaacgggggcaagaucuccgugcaguacaaccucagccacaccuacgcgguggacgccgccaaccacugcgggaccaucgccaacggcguccugcagaccuucaugcggauggcguggggcggguccuacaucgcccuggacagcggcaagggguccugggacugcaucaugacgagcuaccaguaccucaucauccagaacaccaccugggaggaccacugccaguucucccgccccagccccaucggcuaccuggggcugcucagccagcggacccgcgacaucuacaucucccggcgccggcgcggcacguucaccuggacccugagcgacuccgagggcaacgagacccccgggggcuacugccugacgcgguggaugcucaucgaggccgagcugaagugcuucgggaacaccgccguggccaagugcaacgagaagcacgacgaggaguucugcgacaugcugcgccucuucgacuucugcaagcaggcgauccggcgccugaaggccccggcccagaugagcauccagcugaucaacaaggccgugaacgcccucaucaacgaccagcugaucaugaagaaccaccuccgggacaucaugggcauccccuacugcaacuacuccaaguacugguaccugaaccacaccgucaccgggcgcacgagccugccccggugcuggcugguguccaacggcagcuaccucaacgagacccacuucuccgacgacaucgagcagcaggcggacaacaugaucaccgagcugcugcagaaggaguacaucgaccgccagggcaagaccccgcucgggcugguggaccuguucgucuucagcacguccuucuaccugaucagcaucuuccuccaccuggugaagauccccacccaccggcacaucaucggcaagcccugccccaagccgcaccgccugaaccacauggggaucugcuccugcggccucuacaagcaccccggggugcccgucaaguggaagcggugaggacuagucccuguucccagagcccacuuuuuuuucuuuuuuugaaauaaaauagccugucuuucagaucuaaaaaaaaaaaaaaaaaaaaaaaaaaaaaaaaaaaaaaaaaaaaaaaaaaaaaaaaaaaaaaaaaaaaaaaaaaaaaaaaaaaaaaaaaaaaaaaaaaaa

SEQ ID NO: 23417 - RNA, 1721 nt, Artificial Sequence
  mRNA product Design a-1 (A100) comprising derived and/or modified sequence from LASV(LASV254-NIG-2011;Clade II)__AIT17674__GPCmut2 (opt1)
aggagagucccgcagucggcguccagcggcucugcuuguucgugugugugucguugcaggccuuauucaagcuuaccaugggccagaucaucaccuucuuccaggaggugccccacgucaucgaggaggugaugaacaucgugcugaucgcccucagccugcuggccauccucaaggggaucuacaacgucgcgaccugcggccuguucgggcugguguccuuccuccugcugugcggccgcagcugcuccacgaccuacaaggggguguacgagcuccagacccuggagcuggacaugaccaaccucaacaugugcaugccgcugagcugcacgaagaacaacucccaccacuacaucauggucggcaacgagaccggccuggagcucacccugaccaacacgagcaucaucaaccacaaguucugcaaccuguccgacgcccacaagaagaaccucuacaaccacgcccugaugagcaucaucuccaccuuccaccugagcauccccaacuucaaccaguacgaggccauguccugcgacuucaacgggggcaagaucagcgugcaguacaaccucucccacagcuacgccguggacgcggccaaccacugcgggaccaucgccaacggcguccugcagaccuucaugcggauggccuggggcggguccuacaucgcgcuggacagcggcaaggggaacugggacugcaucaugacguccuaccaguaccucaucauccagaacaccaccugggaggaccacugccaguucagccgccccucccccaucggcuaccuggggcugcucagccagcggacccgcgacaucuacaucagccggcgccggcgcggcacguucaccuggacccuguccgacagcgagggcaacgagacccccgggggcuacugccugacgcgguggaugcucaucgaggccgagcugaagugcuucgggaacaccgccguggccaagugcaacgagaagcacgacgaggaguucugcgacaugcugcgccucuucgacuucugcaagcaggccauccggcgccugaagaccccggcgcaggccaacauccagcugaucaacaaggccgugaacgcccucaucaacgaccagcugaucaugaagaaccaccuccgggacaucaugggcauccccuacugcaacuacuccaaguacugguaccugaaccacaccgucacggggaagaccagccugccccgcugcuggcugguguccaacggcagcuaccucaacgagacccacuucuccgacgacaucgagcagcaggccgacaacaugaucaccgagcugcugcagaaggaguacauggaccggcagggcaagacgccgcucgggcugguggaccuguucgucuucagcaccuccuucuaccugaucagcaucuuccuccaccuggugaagauccccacccaccgccacgugaucggcaagcccugccccaagccgcaccggcugaaccacauggggaucugcuccugcggccucuacaagcaccccgggguccccgugaaguggaagcgcugaggacuagucccuguucccagagcccacuuuuuuuucuuuuuuugaaauaaaauagccugucuuucagaucuaaaaaaaaaaaaaaaaaaaaaaaaaaaaaaaaaaaaaaaaaaaaaaaaaaaaaaaaaaaaaaaaaaaaaaaaaaaaaaaaaaaaaaaaaaaaaaaaaaaa

SEQ ID NO: 23418 - RNA, 1721 nt, Artificial Sequence
  mRNA product Design a-1 (A100) comprising derived and/or modified sequence from LASV(Nig08-A19;Clade III)__ADU56618__GPCmut2 (opt1)
aggagagucccgcagucggcguccagcggcucugcuuguucgugugugugucguugcaggccuuauucaagcuuaccaugggccagaucgugaccuucuuccaggaggucccccacgugaucgaggaggugaugaacaucguccugaucgcccucagcauccuggccauccugaaggggcucuacaacaucgcgaccugcggccugaucgggcuggugacguuccuccugcuguccggccgcagcugcuccaugaccuacaaggggguguacgagcuccagacccuggagcugaacaugaacacccucaacaugugcaugccgcugagcugcacgaagaacaacucccaccacuacaucauggucggcaacgagaccggccuggagcucacccugaccaacacgagccugcuccaccacaaguucugcaaccuguccgacgcccacaagaagaaccuguacgaccacacccucaugagcaucaucuccaccuuccaccugagcauccccaacuucaaccaguacgaggccauguccugcgacuucaacgggggcaagaucaccgugcaguacaaccugagccacuccuacgccaucgacgccgcgaaccacugcgggacgguggccaacggcguccuccagaccuucaugcggauggccuggggcgggagcuacaucgcccuggacuccggccgcgggaagugggacugcaucaugaccagcuaccaguaccugaucauccagaacaccacgugggaggaccacugccaguucucccggcccagccccaucggcuaccucgggcugcugucccagcgcacccgggacaucuacaucagccgccggcgccggggcaccuucaccuggacgcucagcgacuccgagggcaacgagacccccgggggcuacugccugacccgcuggaugcugaucgaggcggagcucaagugcuucgggaacaccgccguggccaagugcaacgagaagcacgacgaggaguucugcgacaugcugcggcuguucgacuucugcaagcaggccauccgccggcucaaggccccggcgcagaugagcauccagcugaucaacaaggccgugaacgcccugaucaacgaccagcucaucaugaagaaccaccuccgcgacaucaugggcauccccuacugcaacuacuccaaguacugguaccugaaccacacgagcaccgggcggaccucccugccccgcugcuggcuggucagcaacggcuccuaccugaacgagacccacuucagcgacgacaucgagcagcaggccgacaacaugaucacggagaugcuccagaaggaguaccuggaccggcagggcaagaccccgcuggggcugguggaccucuucguguucuccaccagcuucuaccugaucuccaucuuccugcaccucgucaagauccccacccaccgccacaucgugggcaagcccugccccaagccgcaccggcugaaccacauggggaucugcagcugcggccuguacaagcagcccggggugcccguccgcuggaagcggugaggacuagucccuguucccagagcccacuuuuuuuucuuuuuuugaaauaaaauagccugucuuucagaucuaaaaaaaaaaaaaaaaaaaaaaaaaaaaaaaaaaaaaaaaaaaaaaaaaaaaaaaaaaaaaaaaaaaaaaaaaaaaaaaaaaaaaaaaaaaaaaaaaaaa

SEQ ID NO: 23419 - RNA, 1724 nt, Artificial Sequence
  mRNA product Design a-1 (A100) comprising derived and/or modified sequence from LASV(G1180-SLE-2010;Clade IV)__AIT17168__GPCmut2 (opt1)
aggagagucccgcagucggcguccagcggcucugcuuguucgugugugugucguugcaggccuuauucaagcuuaccaugggccagaucgugaccuucuuccaggaggucccccacgugaucgaggaggugaugaacaucguccugaucgcccucagcauccuggccgugcugaaggggcucuacaacuucgcgaccugcggccugguggggcugcucacguuccugcugcucugcggccgcuccugcaccgccagccgguacaagggggucuacgagcugcagacccuggagcucaacauggagacccugaacaugugcaugccgcuguccugcacgaagaacaacagccaccacuacaucauggugggcaacgagaccggccucgagcugacccugaccaacacguccaucaucaaccacaaguucugcaaccucagcgacgcccacaagaagaaccuguacgaccacgcccugauguccaucaucagcaccuuccaccucuccauccccaacuucaaccaguacgaggccaugagcugcgacuucaacgggggcaagaucuccgugcaguacaaccugagccacuccuacgcgggggacgccgccaaccacugcggcaccgucgccaacggggugcugcagaccuucaugcgcauggcguggggcggcagcuacaucgcccucgacuccgggcacggcagcugggacugcaucaugacguccuaccaguaccugaucauccagaacaccaccugggaggaccacugccaguucagccggcccucccccaucggguaccugggccuccugagccagcgcacccgggacaucuacaucagccgccggcgccggggcacguucaccuggacccuguccgacagcgaggggaaggacaccccgggcggguacugccucacgcgcuggaugcugaucgaggccgagcugaagugcuucggcaacaccgccguggccaagugcaacgagaagcacgacgaggaguucugcgacaugcuccggcuguucgacuucugcaagcaggcgauccagcgccugaaggcccccgcccagauguccauccagcucaucaacaaggccgucaacgcccugaucaacgaccagcugaucaugaagaaccaccuccgggacaucauggggauccccuacugcaacuacagcaaguacugguaccugaaccacaccaccacgggcaagaccucccugcccaagugcuggcucgugagcaacggcuccuaccugaacgagacccacuucagcgacgacaucgagcagcaggcggacaacaugaucaccgagaugcugcagaaggaguacauggagcgccaggggaagacgccgcucggccugguggaccuguucgucuucuccaccagcuucuaccugaucuccaucuuccuccaccuggugaagauccccacccaccggcacaucgugggcaagagcugccccaagccccaccgccugaaccacauggggaucugcuccugcgggcucuacaagcagccgggcguccccgugaaguggaagcggugaggacuagucccuguucccagagcccacuuuuuuuucuuuuuuugaaauaaaauagccugucuuucagaucuaaaaaaaaaaaaaaaaaaaaaaaaaaaaaaaaaaaaaaaaaaaaaaaaaaaaaaaaaaaaaaaaaaaaaaaaaaaaaaaaaaaaaaaaaaaaaaaaaaaa

SEQ ID NO: 23420 - RNA, 1724 nt, Artificial Sequence
  mRNA product Design a-1 (A100) comprising derived and/or modified sequence from LASV(G1442-SLE-2011;Clade IV)__AIT17180__GPCmut2 (opt1)
aggagagucccgcagucggcguccagcggcucugcuuguucgugugugugucguugcaggccuuauucaagcuuaccaugggccagaucgugaccuucuuccaggaggucccccacgugaucgaggaggugaugaacaucguccugaucgcccucagcauccuggccgugcugaaggggcucuacaacguggcgaccugcggccugaucgggcuggucacguuccuccugcugugcggccgcuccugcaccaccacccucuacaaggggguguacgagcugcagacgcuggagcucaacauggagacccugaacaugugcaugccgcugagcugcaccaagaacaacucccaccacuacauccgggugggcaacgagaccggccucgagcugacgcugaccaacaccagcaucaucaaccacaaguucugcaaccucuccgacgcccacaagaagaaccuguacgaccacgcccugaugagcaucaucuccaccuuccaccucagcauccccaacuucaaccaguacgaggccauguccugcgacuucaacgggggcaagaucagcguccaguacaaccugucccacagcuacgccggggacgcggccaaccacugcggcacgguggccaacggggugcugcagaccuucaugcgcauggccuggggcggcuccuacaucgcgcucgacagcgggcggggcaacugggacugcaucaugaccuccuaccaguaccugaucauccagaacaccacgugggacgaccacugccaguucagccgccccucccccaucggguaccugggccuccugagccagcggacccgcgacgucuacaucucccggcgccggcgcggcaccuucaccuggacgcugagcgacagcgaggggaaggacaccccgggcggguacugccucacccgguggaugcugaucgaggccgagcugaagugcuucggcaacaccgccguggccaagugcaacgagaagcacgacgaggaguucugcgacaugcuccgccuguucgacuucugcaagcaggccauccagcggcugaaggcgcccgcccagauguccauccagcucaucaacaaggccgugaacgcccugaucaacgaccagcugaucaugaagaaccaccuccgcgacaucauggggauccccuacugcaacuacagcaaguacugguaccugaacaacacggccaccggcaagaccucccugcccaagugcuggcucaucagcaacggcuccuaccugaacgagacccacuucagcgacgacaucgagcaggaggcggacaacaugaucacggagaugcugcagaaggaguacauggagcggcaggggaagaccccgcucggccuggucgaccuguucguguucuccaccagcuucuaccugaucuccaucuuccuccaccuggugaagauccccacccaccgccacaucgucggcaagagcugccccaagccccaccggcugaaccacauggggaucugcuccugcgggcucuacaagcagccgggcgugcccgugcgcuggaagcggugaggacuagucccuguucccagagcccacuuuuuuuucuuuuuuugaaauaaaauagccugucuuucagaucuaaaaaaaaaaaaaaaaaaaaaaaaaaaaaaaaaaaaaaaaaaaaaaaaaaaaaaaaaaaaaaaaaaaaaaaaaaaaaaaaaaaaaaaaaaaaaaaaaaaa

SEQ ID NO: 23421 - RNA, 1724 nt, Artificial Sequence
  mRNA product Design a-1 (A100) comprising derived and/or modified sequence from LASV(G3010-SLE-2013;Clade IV)__AIT17344__GPCmut2 (opt1)
aggagagucccgcagucggcguccagcggcucugcuuguucgugugugugucguugcaggccuuauucaagcuuaccaugggccagaucgugaccuucuuccaggaggucccccacgugaucgaggaggugaugaacaucguccugaucgcccucagcauccuggccgugcugaaggggcucuacaacuucgcgaccugcggccugguggggcuggucacguuccuccugcugugcggccgcuccugcaccaccagccucuacaaggggguguacgagcugcagacccuggagcucaacauggagacgcugaacaugugcaugccgcuguccugcaccaagaacaacagccaccacuacaucauggugggcaacgagaccggccucgagcugacccugacgaacaccuccaucaucaaccacaaguucugcaaccucagcgacgcccacaagaagaaccuguacaaccacgcccugauguccaucaucagcaccuuccaccucuccauccccaacuucaaccaguacgaggccaugagcugcgacuucaacgggggcaagaucuccguccaguacaaccugagccacuccuacgccggggacgcggccagccacugcggcaccguggccaacggggugcugcagacguucaugcggauggccuggggcggcuccuacaucgcgcucgacagcggguacggcaagugggacugcaucaugaccuccuaccaguaccugaucauccagaacaccaccugggaggaccacugccaguucagccgccccucccccaucggguaccugggccuccugagccagcggacgcgcgacaucuacaucagccggcgccggcgcggcaccuucaccuggacccuguccgacagcgaggggaaggacacgccgggcggguacugccucacccgguggaugcugaucgaggccgagcugaagugcuucggcaacaccgccgucgccaagugcaacgagaagcacgacgaggaguucugcgacaugcuccgccuguucgacuucugcaagcaggccauccagcggcugaagacccccgcgcagauguccauccagcucaucaacaaggccgugaacgcccugaucaacgaccagcugaucaugaagaaccaccuccgcgacaucauggggauccccuacugcaacuacagcaaguacugguaccugaaccacacgaccaccggcaagaccucccugcccaagugcuggcucgugagcaacggcuccuaccugaacgagacgcacuucagcgacgacaucgagcagcaggccgacaacaugaucaccgagaugcugcagaaggaguacauggagcggcaggggaagaccccgcucggccuggucgaccuguucguguucuccaccagcuucuaccugaucuccaucuuccuccaccuggugaagauccccacgcaccgccacaucgucggcaagagcugccccaagccccaccggcugaaccacauggggaucugcuccugcgggcucuacaagcagccgggcgugcccgugcgcuggaagcggugaggacuagucccuguucccagagcccacuuuuuuuucuuuuuuugaaauaaaauagccugucuuucagaucuaaaaaaaaaaaaaaaaaaaaaaaaaaaaaaaaaaaaaaaaaaaaaaaaaaaaaaaaaaaaaaaaaaaaaaaaaaaaaaaaaaaaaaaaaaaaaaaaaaaa

SEQ ID NO: 23422 - RNA, 1724 nt, Artificial Sequence
  mRNA product Design a-1 (A100) comprising derived and/or modified sequence from LASV(G502-SLE-2009;Clade IV)__AIT17126__GPCmut2 (opt1)
aggagagucccgcagucggcguccagcggcucugcuuguucgugugugugucguugcaggccuuauucaagcuuaccaugggccagaucgugaccuucuuccaggaggucccccacgugaucgaggaggugaugaacaucguccugaucgcccucagcauccuggccgugcugaaggggcucuacaacuucgcgaccugcggccugguggggcugcucacguuccugcugcucugcggccgcuccugcaccaccgggcuguacaagggcgucuacgagcugcagacccucgagcugaacauggagacgcugaacaugugcaugccgcucagcugcaccaagaacaacucccaccacuacaucauggugggcaacgagaccgggcuggagcugacccucacgaacaccagcaucaucaaccacaaguucugcaaccuguccgacgcccacaagaagaaccuguacgaccacgcccucaugagcaucaucuccaccuuccaccugagcauccccaacuucaaccaguacgaggccauguccugcgacuucaacggcgggaagaucagcgugcaguacaaccugucccacagcuacgccggcgacgcggccgaccacugcgggaccgucgccaacggcgugcuccagacguucaugcggauggccuggggcggguccuacaucgcgcuggacagcggccgcgggcggugggacugcaucaugaccuccuaccaguaccugaucauccagaacaccaccugggaggaccacugccaguucagccgccccucccccaucggcuaccucggccugcugagccagcggacgcgcgacaucuacaucucccggcgccggcgcgggaccuucaccuggacccucagcgacagcgagggcaaggacacgcccgggggcuacugccugacccgguggaugcugaucgaggccgagcucaagugcuucgggaacaccgccguggccaagugcaacgagaagcacgacgaggaguucugcgacaugcugcgccuguucgacuucugcaagcaggccauccagcggcucaaggcgccggcccagauguccauccagcugaucaacaaggccgucaacgcccugaucaacgaccagcucgugaugaagaaccaccuccgcgacaucaugggcauccccuacugcaacuacagccgguacugguaccugaaccacaccacgaccggccgcaccucccugcccaagugcuggcuggugagcaacggguccuaccugaacgagacccacuucagcgacgacaucgagcagcaggccgacaacaugaucacggagaugcuccagaaggaguacauggagcggcagggcaagaccccgcuggggcuggucgaccuguucguguucuccaccagcuucuaccucaucuccaucuuccugcaccuggugaagauccccacccaccgccacaucgucggcaagagcugccccaagccccaccggcucaaccacauggggaucugcuccugcggccuguacaagcagccgggcgugcccgugaaguggaagcgcugaggacuagucccuguucccagagcccacuuuuuuuucuuuuuuugaaauaaaauagccugucuuucagaucuaaaaaaaaaaaaaaaaaaaaaaaaaaaaaaaaaaaaaaaaaaaaaaaaaaaaaaaaaaaaaaaaaaaaaaaaaaaaaaaaaaaaaaaaaaaaaaaaaaaa

SEQ ID NO: 23423 - RNA, 1724 nt, Artificial Sequence
  mRNA product Design a-1 (A100) comprising derived and/or modified sequence from LASV(G733-SLE-2010;Clade IV)__AIT17154__GPCmut2 (opt1)
aggagagucccgcagucggcguccagcggcucugcuuguucgugugugugucguugcaggccuuauucaagcuuaccaugggccagaucgugaccuucuuccaggaggucccccacgugaucgaggaggugaugaacaucguccugaucgcccucagcauccuggccgugcugaaggggcucuacaacuucgcgaccugcggcaucguggggcuggucuccuuccugcuccugugcggccgcagcugcacgaccucccuguacaaggggguguacgagcuccagacccuggagcugaacauggagacccucaacaugugcaugccgcugagcugcacgaagaacaacucccaccacuacaucauggugggcaacgagaccggccuggagcucacccugaccaacacgagcaucaucaaccacaaguucugcaaccuguccgacgcccacaagaagaaccucuacgaccacgcccugaugagcaucaucuccaccuuccaccugagcauccccaacuucaaccaguacgaggccauguccugcgacuucaacgggggcaagaucagcguccaguacaaccucucccacagcuacgccggggacgcggccaaccacugcggcaccaucgccaacggggugcugcagaccuucaugcggauggccuggggcggcuccuacaucgcgcuggacagcgggcgcgaccggugggacugcaucaugacguccuaccaguaccucaucauccagaacaccaccugggaggaccacugccaguucagccgccccucccccaucggcuaccuggggcugcucagccagcggacccgcgacaucuacaucagccggcgccggcgcggcacguucaccuggacccuguccgacagcgagggcaaggacacccccgggggcuacugccugacgcgguggaugcucaucgaggccgagcugaagugcuucgggaacaccgccguggccaagugcaacgagaagcacgacgaggaguucugcgacaugcugcgccucuucgacuucugcaagcaggccauccagcggcugaaggcgccggcccagauguccauccagcugaucaacaaggccgucaacgcccucaucaacgaccagcugaucaugaagaaccaccuccgcgacaucaugggcauccccuacugcaacuacagcaaguacugguaccugaaccacaccaccacggggaagaccucccugcccaagugcuggcuggugagcaacggcuccuaccucaacgagacccacuucagcgacgacaucgagcagcaggccgacaacaugaucaccgagaugcugcagaaggaguacauggagcggcagggcaagacgccgcuggggcucguggaccuguucgucuucuccaccagcuucuaccugaucuccaucuuccugcaccucgugaagauccccacccaccgccacguggucggcaagagcugccccaagccccaccggcugaaccacauggggaucugcuccugcggccuguacgggcagccgggcgugcccgugaaguggaagcgcugaggacuagucccuguucccagagcccacuuuuuuuucuuuuuuugaaauaaaauagccugucuuucagaucuaaaaaaaaaaaaaaaaaaaaaaaaaaaaaaaaaaaaaaaaaaaaaaaaaaaaaaaaaaaaaaaaaaaaaaaaaaaaaaaaaaaaaaaaaaaaaaaaaaaa

SEQ ID NO: 23424 - RNA, 1724 nt, Artificial Sequence
  mRNA product Design a-1 (A100) comprising derived and/or modified sequence from MOPV/LASV reassortant(IGS-1;Clade IV)__AFY05576__GPCmut2 (opt1)
aggagagucccgcagucggcguccagcggcucugcuuguucgugugugugucguugcaggccuuauucaagcuuaccaugggccagaucgugaccuucuuccaggaggucccccacgugaucgaggaggugaugaacaucguccugaucgcccucagcgugcuggccgugcugaaggggcucuacaacuucgcgaccugcggccuggucgggcuggugacguuccuccugcugugcggccgcuccugcaccaccagccucuacaaggggguguacgagcugcagacccuggagcucaacauggagacgcugaacaugugcaugccgcuguccugcaccaagaacaacagccaccacuacaucauggucggcaacgagaccggccucgagcugacccugacgaacaccuccaucaucaaccacaaguucugcaaccucagcgacgcccacaagaagaaccuguacgaccacgcccugauguccaucaucagcaccuuccaccucuccauccccaacuucaaccaguacgaggccaugagcugcgacuucaacgggggcaagaucuccgugcaguacaaccugagccacuccuacgccggggacgcggccaaccacugcggcaccguggccaacgggguccugcagacguucaugcggauggccuggggcggcagcuacaucgcgcucgacuccgggcgcggcaacugggacugcaucaugaccagcuaccaguaccugaucauccagaacaccaccugggaggaccacugccaguucucccggcccagccccaucggguaccugggccuccugucccagcgcacgcgggacaucuacaucagccgccggcgccggggcaccuucaccuggacccugagcgacuccgagggggaggacacgccgggcggguacugccucacccgcuggaugcugaucgaggccgagcugaagugcuucggcaacaccgccguggccaagugcaacgagaagcacgacgaggaguucugcgacaugcuccggcuguucgacuucugcaagcaggccauccagcgccugaaggcgcccgcccagaugagcauccagcucaucaacaaggccgugaacgcccugaucaacgaccagcugaucaugaagaaccaccuccgggacaucauggggauccccuacugcaacuacuccaaguacugguaccugaaccacaccacgaccggccgcaccagccugcccaagugcuggcucgucuccaacggcagcuaccugaacgagacccacuucuccgacgacaucgagcagcaggccgacaacaugaucacggagaugcugcagaaggaguacauggagcggcaggggaagaccccgcucggccugguggaccuguucguguucagcaccuccuucuaccugaucagcaucuuccuccaccuggucaagauccccacccaccgccacaucguggggaaguccugccccaagccccaccggcugaaccacaugggcaucugcagcugcgggcucuacaagcagccgggcgugcccgucaaguggaagcgcugaggacuagucccuguucccagagcccacuuuuuuuucuuuuuuugaaauaaaauagccugucuuucagaucuaaaaaaaaaaaaaaaaaaaaaaaaaaaaaaaaaaaaaaaaaaaaaaaaaaaaaaaaaaaaaaaaaaaaaaaaaaaaaaaaaaaaaaaaaaaaaaaaaaaa

SEQ ID NO: 23425 - RNA, 1724 nt, Artificial Sequence
  mRNA product Design a-1 (A100) comprising derived and/or modified sequence from LASV(LM765-SLE-2012;Clade IV)__AIT17814__GPCmut2 (opt1)
aggagagucccgcagucggcguccagcggcucugcuuguucgugugugugucguugcaggccuuauucaagcuuaccaugggccagaucgugaccuucuuccaggaggucccccacgugaucgaggaggugaugaacaucguccugaucgcccucagcauccuggccgugcugaaggggcucuacaacuucgcgaccugcggccugguggggcuggucacguuccuccugcugugcggccgcuccugcaccaccagccucuacaaggggguguacgagcugcagacccuggagcucaacauggagacgcugaacaugugcaugccgcuguccugcaccaagaacaacagccaccacuacaucauggugggcaacgagaccggccucgagcugacccugacgaacaccuccaucaucgaccacaaguucugcaaccucagcgacgcccaccggaagaaccuguacgaccacgcccugauguccaucaucagcaccuuccaccucuccauccccaacuucaaccaguacgaggccaugagcugcgacuucaacgggggcaagaucuccguccaguacaaccugagccacuccuacgccaaggacgcggccgaccacugcgggaccguggccaacggcgugcugcagacguucaugcgcauggccuggggcgggagcuacaucgcgcucgacuccggccgggggcgcugggacugcaucaugaccagcuaccaguaccugaucauccagaacaccaccugggaggaccacugccaguucucccggcccagccccaucggcuaccuggggcuccugucccagcgcacgcgggacaucuacaucagccgccggcgccggggcaccuucaccuggacccugagcgacuccgagggcaaggacacgcccgggggcuacugccucacccgcuggaugcugaucgaggccgagcugaagugcuucgggaacaccgccgucgccaagugcaacgagaagcacgacgaggaguucugcgacaugcuccggcuguucgacuucugcaagcaggccauccagcgccugaaggcgccggcccagaugagcauccagcucaucaacaaggccgugaacgcccugaucaacgaccagcugaucaugaagaaccaccuccgggacaucaugggcauccccuacugcaacuacuccaaguacugguaccugaaccacaccacgaccgggaagaccagccugcccaagugcuggcucguguccaacggcagcuaccugaacgagacccacuucuccgacgacaucgagcagcaggccgacaacaugaucacggagaugcugcagaaggaguacauggagcgccagggcaagaccccgcucgggcuggucgaccuguucguguucagcaccuccuucuaccugaucagcaucuuccuccaccuggugaagauccccacccaccggcacaucgucggcaagcccugccccaagccgcaccgccugaaccacauggggaucugcuccugcggccucuacaagcagcccggggugcccgugaaguggaagcggugaggacuagucccuguucccagagcccacuuuuuuuucuuuuuuugaaauaaaauagccugucuuucagaucuaaaaaaaaaaaaaaaaaaaaaaaaaaaaaaaaaaaaaaaaaaaaaaaaaaaaaaaaaaaaaaaaaaaaaaaaaaaaaaaaaaaaaaaaaaaaaaaaaaaa

SEQ ID NO: 23426 - RNA, 1724 nt, Artificial Sequence
  mRNA product Design a-1 (A100) comprising derived and/or modified sequence from LASV(LM776-SLE-2012;Clade IV)__AIT17824__GPCmut2 (opt1)
aggagagucccgcagucggcguccagcggcucugcuuguucgugugugugucguugcaggccuuauucaagcuuaccaugggccagaucgugaccuucuuccaggaggucccccacgugaucgaggaggugaugaacaucguccugaucgcccucagcauccuggccgugcugaaggggcucuacaacuucgcgaccugcggccugguggggcuggucacguuccuccugcugugcggccgcuccugcaccaccagcguguacaaggggguguacgagcuccagacccuggagcugaacauggagacgcucaacaugugcaugccgcuguccugcaccaagaacaacagccaccacuacaucauggucggcaacgagaccggccuggagcucacccugacgaacaccuccaucaucaaccacaaguucugcaaccugagcgacgcccacaagaagaaccucuacgaccacgcccugauguccaucaucagcaccuuccaccuguccauccccaacuucaaccaguacgaggccaugagcugcgacuucaacgggggcaagaucuccgugcaguacaaccucagccacuccuacgccggggacgcggccaaccacugcggcaccguggccaacgggguccugcagacguucaugcggauggccuggggcggcagcuacaucgcgcuggacuccgggcacggcaagugggacugcaucaugaccagcuaccaguaccucaucauccagaacaccaccugggaggaccacugccaguucucccgccccagccccaucggguaccugggccugcucucccagcggacgcgcgacaucuacaucagccggcgccggcgcggcaccuucaccuggacccugagcgacuccgaggggaaggacacgccgggcggguacugccugacccgguggaugcucaucgaggccgagcugaagugcuucggcaacaccgccguggccaagugcaacgagaagcacgacgaggaguucugcgacaugcugcgccucuucgacuucugcaagcaggccauccagcggcugaaggcgcccgcccagaugagcauccagcugaucaacaaggccgugaacgcccucaucaacgaccagcugaucaugaagaaccaccuccgcgacaucauggggauccccuacugcaacuacuccaaguacugguaccugaaccacaccacgaccggcaagaccagccugcccaagugcuggcuggucuccaacggcagcuaccucaacgagacccacuucuccgacgacaucgagcagcaggccgacaacaugaucacggagaugcugcagaaggaguacauggagcggcaggggaagaccccgcugggccucguggaccuguucguguucagcaccuccuucuaccugaucagcaucuuccugcaccucgucaagauccccacccaccgccacaucguggggaaguccugccccaagccccaccggcugaaccacaugggcaucugcagcugcgggcuguacaagcagccgggcgugcccguccgcuggaagcggugaggacuagucccuguucccagagcccacuuuuuuuucuuuuuuugaaauaaaauagccugucuuucagaucuaaaaaaaaaaaaaaaaaaaaaaaaaaaaaaaaaaaaaaaaaaaaaaaaaaaaaaaaaaaaaaaaaaaaaaaaaaaaaaaaaaaaaaaaaaaaaaaaaaaa

SEQ ID NO: 23427 - RNA, 1724 nt, Artificial Sequence
  mRNA product Design a-1 (A100) comprising derived and/or modified sequence from LASV(Mad39;Clade IV)__ANH09722__GPCmut2 (opt1)
aggagagucccgcagucggcguccagcggcucugcuuguucgugugugugucguugcaggccuuauucaagcuuaccaugggccagaucgugaccuucuuccaggaggucccccacgugaucgaggaggugaugaacaucguccugaucgcccucagcauccuggccgugcugaaggggcucuacaacguggcgaccugcggccugaucgggcuggucacguuccuccugcugugcggccgcuccugcaccaccacccucuacaaggggguguacgagcugcaggcccuggagcucaacauggagacgcugaacaugugcaugccgcugagcugcaccaagaacaacucccaccacuacauccgggugggcaacgagaccggccucgagcugacccugacgaacaccagccucaucaaccacaaguucugcaaccuguccgacgcccacaagaagaaccuguacgaccacgcccucaugagcaucaucuccaccuuccaccugagcauccccaacuucaaccaguacgaggccauguccugcgacuucaacgacgggaagaucagcguccaguacaaccugucccacaccuacgcgggcgacacggccaaccacugcgggaccguggccaacggcgugcuccagaccuucaugcgcauggccuggggcgggagcuacaucgcgcuggacuccggccgcgggggcugggacugcaucaugaccagcuaccaguaccugaucauccagaacacgaccugggaggaccacugccaguucucccggcccagccccaucggguaccucggccugcugucccagcggacccgcgacaucuacaucagccggcgccggcgcggcaccuucacguggacccucuccgacagcgaggggaaggacaccccgggcggguacugccugacccgguggaugcugaucgaggccgagcucaagugcuucggcaacacggccgucgccaagugcaacgagaagcacgacgaggaguucugcgacaugcugcgccuguucgacuucugcaagcaggccauccagcggcucaaggcgcccgcccagaugagcauccagcugaucaacaaggccgugaacgcccugaucaacgaccagcucaucaugaagaaccaccuccgcgacaucauggggauccccuacugcaacuacuccaaguacugguaccugaaccacaccgugaccggcaagaccagccugcccaagugcuggcuggucuccaacggcagcuaccugaacgagacgcacuucuccgacgacaucgagcagcaggccgacaacaugaucaccgagaugcuccagaaggaguacauggagcggcaggggaagaccccgcugggccugguggaccuguucguguucagcaccuccuucuaccucaucagcaucuuccugcaccuggucaagauccccacgcaccgccacgugguggggaagcccugccccaagccgcaccggcucaaccacaugggcaucugcuccugcggguucuacaagcagcccggcguccccgugcgcuggaagcggugaggacuagucccuguucccagagcccacuuuuuuuucuuuuuuugaaauaaaauagccugucuuucagaucuaaaaaaaaaaaaaaaaaaaaaaaaaaaaaaaaaaaaaaaaaaaaaaaaaaaaaaaaaaaaaaaaaaaaaaaaaaaaaaaaaaaaaaaaaaaaaaaaaaaa

SEQ ID NO: 23428 - RNA, 1724 nt, Artificial Sequence
  mRNA product Design a-1 (A100) comprising derived and/or modified sequence from LASV(Z0947-SLE-2011;Clade IV)__AIT17840__GPCmut2 (opt1)
aggagagucccgcagucggcguccagcggcucugcuuguucgugugugugucguugcaggccuuauucaagcuuaccaugggccagaucgugaccuucuuccaggaggucccccacgugaucgaggaggugaugaacaucguccugaucgcccucagcauccuggccgugcugaaggggcucuacaacuucgcgaccugcggccugguggggcuggucacguuccuccugcugugcggccgcuccugcaccaucagccucuacaaggggguguacgagcugcagacccuggagcucaacauggagacccugaacaugugcaugccgcuguccugcacgaagaacaacagccaccacuacaucauggugggcaacgagaccggccucgagcugacccugaccaacacguccaucaucaaccacaaguucugcaaccucagcgacgcccacaagaagaaccuguacgaccacgcccugauguccaucaucagcaccuuccaccucuccauccccaacuucaaccaguacgaggccaugagcugcgacuucaacgggggcaagaucuccguccaguacaaccugagccacuccuacgccggggacgcggccaaccacugcggcaccguggccaacggggugcugcagaccuucaugcggauggccuggggcggcagcuacaucgcgcucgacuccgggcgcgaccggugggacugcaucaugacgagcuaccaguaccugaucauccagaacaccaccugggaggaccacugccaguucucccgccccagccccaucggcuaccuggggcuccugucccagcggacccgcgacaucuacaucagccggcgccggcgcggcacguucaccuggacccugagcgacuccgagggcaaggacacccccgggggcuacugccucacgcgguggaugcugaucgaggccgagcugaagugcuucgggaacaccgccgucgccaagugcaacgagaagcacgacgaggaguucugcgacaugcuccgccuguucgacuucugcaagcaggccauccagcggcugaaggcgccggcccagaugagcauccagcucaucaacaaggccgugaacgcccugaucaacgaccagcugaucaugaagaaccaccuccgcgacaucaugggcauccccuacugcaacuacuccaaguacugguaccugaaccacaccaccacggggaagaccagccugcccaagugcuggcucguguccaacggcagcuaccugaacgagacccacuucuccgacgacaucgagcagcaggccgacaacaugaucaccgagaugcugcagaaggaguacauggagcggcagggcaagacgccgcucgggcuggucgaccuguucguguucagcaccuccuucuaccugaucagcaucuuccuccaccuggugaagauccccacccaccgccacaucgucggcaagcccugccccaagccgcaccggcugaaccacauggggaucugcuccugcggccucuacaagcagcccggggugcccgugaaguggaagcgcugaggacuagucccuguucccagagcccacuuuuuuuucuuuuuuugaaauaaaauagccugucuuucagaucuaaaaaaaaaaaaaaaaaaaaaaaaaaaaaaaaaaaaaaaaaaaaaaaaaaaaaaaaaaaaaaaaaaaaaaaaaaaaaaaaaaaaaaaaaaaaaaaaaaaa

SEQ ID NO: 23429 - RNA, 1724 nt, Artificial Sequence
  mRNA product Design a-1 (A100) comprising derived and/or modified sequence from LASV(Josiah;Clade IV)__NP_694870__GPCmut2 (opt4)
aggagagucccgcagucggcguccagcggcucugcuuguucgugugugugucguugcaggccuuauucaagcuuaccaugggccagaucgugaccuucuuccaggaggugccccacgugaucgaggaggugaugaacaucgugcugaucgcccugagcgugcuggccgugcugaagggccuguacaacuucgccaccugcggccuggugggccuggugaccuuccugcugcugugcggcagaagcugcaccaccagccuguacaagggcguguacgagcugcagacccuggagcugaacauggagacccugaacaugugcaugccccugagcugcaccaagaacaacagccaccacuacaucauggugggcaacgagaccggccuggagcugacccugaccaacaccagcaucaucaaccacaaguucugcaaccugagcgacgcccacaagaagaaccuguacgaccacgcccugaugagcaucaucagcaccuuccaccugagcauccccaacuucaaccaguacgaggccaugagcugcgacuucaacggcggcaagaucagcgugcaguacaaccugagccacagcuacgccggcgacgccgccaaccacugcggcaccguggccaacggcgugcugcagaccuucaugagaauggccuggggcggcagcuacaucgcccuggacagcggcagaggcaacugggacugcaucaugaccagcuaccaguaccugaucauccagaacaccaccugggaggaccacugccaguucagcagacccagccccaucggcuaccugggccugcugagccagagaaccagagacaucuacaucagcagaagaagaagaggcaccuucaccuggacccugagcgacagcgagggcaaggacacccccggcggcuacugccugaccagauggaugcugaucgaggccgagcugaagugcuucggcaacaccgccguggccaagugcaacgagaagcacgacgaggaguucugcgacaugcugagacuguucgacuucugcaagcaggccauccagagacugaaggcccccgcccagaugagcauccagcugaucaacaaggccgugaacgcccugaucaacgaccagcugaucaugaagaaccaccugagagacaucaugggcauccccuacugcaacuacagcaaguacugguaccugaaccacaccaccaccggcagaaccagccugcccaagugcuggcuggugagcaacggcagcuaccugaacgagacccacuucagcgacgacaucgagcagcaggccgacaacaugaucaccgagaugcugcagaaggaguacauggagagacagggcaagaccccccugggccugguggaccuguucguguucagcaccagcuucuaccugaucagcaucuuccugcaccuggugaagauccccacccacagacacaucgugggcaagagcugccccaagccccacagacugaaccacaugggcaucugcagcugcggccuguacaagcagcccggcgugcccgugaaguggaagagaugaggacuagucccuguucccagagcccacuuuuuuuucuuuuuuugaaauaaaauagccugucuuucagaucuaaaaaaaaaaaaaaaaaaaaaaaaaaaaaaaaaaaaaaaaaaaaaaaaaaaaaaaaaaaaaaaaaaaaaaaaaaaaaaaaaaaaaaaaaaaaaaaaaaaa

SEQ ID NO: 23430 - RNA, 1721 nt, Artificial Sequence
  mRNA product Design a-1 (A100) comprising derived and/or modified sequence from LASV(LP;Clade I)__AAF86701__GPCmut2 (opt4)
aggagagucccgcagucggcguccagcggcucugcuuguucgugugugugucguugcaggccuuauucaagcuuaccaugggccagaucaucaccuucuuccaggaggugccccacgugaucgaggaggugaugaacaucgugcugaucgcccugagccugcuggccauccugaagggccuguacaacaucgccaccugcggcaucaucggccugguggccuuccuguuccugugcggcaagagcugcagccugacccugaagggcggcuacgagcugcagacccuggagcugaacauggagacccugaacaugugcaugccccugagcugcaccaagaacagcagccaccacuacaucagagugggcaacgagaccggccuggagcugacccugaccaacaccagcaucaucaaccacaaguucugcaaccugagcgacgcccacaagaagaaccuguacgaccacgcccugaugagcaucaucagcaccuuccaccugagcauccccaacuucaaccaguacgaggccaugagcugcgacuucaacggcggcaagaucagcgugcaguacaaccugagccacagcuacgccggcgacgccgccgagcacugcggcaccguggccaacggcgugcugcagaccuucaugagaauggccuggggcggcagauacaucgcccuggacagcggcaagggcaacugggacugcaucaugaccagcuaccaguaccugaucauccagaacaccaccugggaggaccacugccaguucagcagacccagccccaucggcuaccugggccugcugagccagagaaccagagacaucuacaucagcagaagaagaagaggcaccuucaccuggacccugagcgacagcgagggcaacgagacccccggcggcuacugccugaccagauggaugcugaucgaggccgagcugaagugcuucggcaacaccgccguggccaagugcaacgagaagcacgacgaggaguucugcgacaugcugagacuguucgacuucugcaagcaggccaucagaagacugaaggcccccgcccagaugagcauccagcugaucaacaaggccgugaacgcccugaucaacgaccagcugaucaugaagaaccaccugagagacaucaugggcauccccuacugcaacuacagcaaguacugguaccugaaccacaccagcagcggcagaaccagccugcccaagugcuggcugaucagcaacggcagcuaccugaacgagacccaguucagcgacgacaucgagcagcaggccgacaacaugaucaccgagaugcugcagaaggaguacaucgagagacagggcaagaccccccugggccugguggacaucuucaucuucagcaccagcuucuaccugaucagcaucuuccugcaccugaucaagauccccacccacagacacaucgugggcaagcccugccccaagccccacagacugaaccacaugggcgugugcagcugcggccuguacaagcaccccggcgugcccaccaaguggaagagaugaggacuagucccuguucccagagcccacuuuuuuuucuuuuuuugaaauaaaauagccugucuuucagaucuaaaaaaaaaaaaaaaaaaaaaaaaaaaaaaaaaaaaaaaaaaaaaaaaaaaaaaaaaaaaaaaaaaaaaaaaaaaaaaaaaaaaaaaaaaaaaaaaaaaa

SEQ ID NO: 23431 - RNA, 1721 nt, Artificial Sequence
  mRNA product Design a-1 (A100) comprising derived and/or modified sequence from LASV(803213;Clade II)__AAF86703__GPCmut2 (opt4)
aggagagucccgcagucggcguccagcggcucugcuuguucgugugugugucguugcaggccuuauucaagcuuaccaugggccagaucaucaccuucuuccaggaggugccccacgugaucgaggaggugaugaacaucgugcugaucgcccugagccugcuggccauccugaagggcaucuacaacguggccaccugcggccuguucggccugaucagcuuccugcugcugugcggcagaagcugcagcgugaccuacaagggcguguacgagcugcagacccuggagcugaacauggccaaccugaacaugugcaugccccugagcugcaccaagaacaacagccaccacuacaucauggugggcaacgagaccggccuggagcugacccugaccaacaccagcaucaucaaccacaaguucugcaaccugagcgacgcccacaagaagaaccuguacgaccacgcccugaugagcaucaucagcaccuuccaccugagcauccccaacuucaaccaguacgaggccaugagcugcgacuucaacggcggcaagaucagcgugcaguacaaccugagccacagcuucgccguggacgccgccaaccacugcggcaccaucgccaacggcgugcugcagaccuucaugagaauggccuggggcggcagcuacaucgcccuggacagcggcaagggcaacugggacugcaucaugaccagcuaccaguaccugaucauccagaacaccaccugggaggaccacugccaguucagcagacccagccccaucggcuaccugggccugcugagccagagaaccagagacaucuacaucagcagaagaagaagaggcaccuucaccuggacccugagcgacagcgagggcaacgaggcccccggcggcuacugccugaccagauggaugcugaucgaggccgagcugaagugcuucggcaacaccgccguggccaagugcaacgagaagcacgacgaggaguucugcgacaugcugagacuguucgacuucugcaagcaggccaucaagagacugaagacccccgcccagaugagcauccagcugaucaacaaggccgugaacgcccugaucaacgaccagcugaucaugaagaaccaccugagagacaucaugggcauccccuacugcaacuacagcagauacugguaccugaaccacaccgugaccggcaagaccagccugcccagaugcuggcuggugagcaacggcagcuaccugaacgagacccacuucagcgacgacaucgagcagcaggccgacaacaugaucaccgagaugcugcagaaggaguacauggacagacagggcaagaccccccugggccugguggaccuguucguguucagcaccagcuucuaccugaucagcaucuuccugcaccuggugaagauccccacccacagacacaucgugggcaagcccugccccaagccccacagacugaaccacaugggcaucugcagcugcggccuguacaagcaccccggcgugcccgugaaguggaagagaugaggacuagucccuguucccagagcccacuuuuuuuucuuuuuuugaaauaaaauagccugucuuucagaucuaaaaaaaaaaaaaaaaaaaaaaaaaaaaaaaaaaaaaaaaaaaaaaaaaaaaaaaaaaaaaaaaaaaaaaaaaaaaaaaaaaaaaaaaaaaaaaaaaaaa

SEQ ID NO: 23432 - RNA, 1721 nt, Artificial Sequence
  mRNA product Design a-1 (A100) comprising derived and/or modified sequence from LASV(GA391;Clade III)__CAA36645__GPCmut2 (opt4)
aggagagucccgcagucggcguccagcggcucugcuuguucgugugugugucguugcaggccuuauucaagcuuaccaugggccagaucgugaccuucuuccaggaggugccccacgugaucgaggaggugaugaacaucgugcugaucgcccugagcauccuggccauccugaagggccuguacaacguggccaccugcggccugaucggccuggugaccuuccugcugcugagcggcagaagcugcagccugaucuacaagggcaccuacgagcugcagacccuggagcugaacauggagacccugaacaugugcaugccccugagcugcaccaagaacaacagccaccacuacaucagagugggcaacgagaccggccuggagcugacccugaccaacaccagcauccugaaccacaaguucugcaaccugagcgacgcccacaagagaaaccuguacgaccacagccugaugagcaucaucagcaccuuccaccugagcauccccaacuucaaccaguacgaggccaugagcugcgacuucaacggcggcaagaucaccgugcaguacaaccugagccacagcuucgccguggacgccgccggccacugcggcacccuggccaacggcgugcugcagaccuucaugagaauggccuggggcggcagcuacaucgcccuggacagcggcagaggcaacugggacugcaucaugaccagcuaccaguaccugaucauccagaacaccaccugggacgaccacugccaguucagcagacccagccccaucggcuaccugggccugcugagccagagaaccagagacaucuacaucagcagaagaagaagaggcaccuucaccuggacccugagcgacagcgagggcaacgagacccccggcggcuacugccugaccagauggaugcugaucgaggccgagcugaagugcuucggcaacaccgccguggccaagugcaacgagaagcacgacgaggaguucugcgacaugcugagacuguucgacuucugcaagcaggccaucagaagacugaagacccccgcccagaugagcauccagcugaucaacaaggccgugaacgcccugaucaacgaccagcugaucaugaagaaccaccugagagacaucaugggcauccccuacugcaacuacagcagauacugguaccugaaccacaccagcaccggcaagaccagccugcccagaugcuggcugaucagcaacggcagcuaccugaacgagaccaaguucagcgacgacaucgagcagcaggccgacaacaugaucaccgagaugcugcagaaggaguacaucgacagacagggcaagaccccccugggccugguggaccuguucguguucagcaccagcuucuaccugaucagcaucuuccugcaccuggugaagauccccacccacagacacaucgugggcaagcccugccccaagccccacagacugaaccacaugggcaucugcagcugcggccuguacaagcagcccggcgugcccgugagauggaagagaugaggacuagucccuguucccagagcccacuuuuuuuucuuuuuuugaaauaaaauagccugucuuucagaucuaaaaaaaaaaaaaaaaaaaaaaaaaaaaaaaaaaaaaaaaaaaaaaaaaaaaaaaaaaaaaaaaaaaaaaaaaaaaaaaaaaaaaaaaaaaaaaaaaaaa

SEQ ID NO: 23433 - RNA, 1724 nt, Artificial Sequence
  mRNA product Design a-1 (A100) comprising derived and/or modified sequence from LASV(AV;Clade V)__CCA30314__GPCmut2 (opt4)
aggagagucccgcagucggcguccagcggcucugcuuguucgugugugugucguugcaggccuuauucaagcuuaccaugggccagaucgugaccuucuuccaggaggugccccacgugaucgaggaggugaugaacaucgugcugaucgcccugagcauccuggccgugcugaagggccuguacaacaucgccaccugcggccugaucggccugaucaccuuccugcugcugugcggcagaagcugcagcagcaaccuguacaagggcguguacgagcugcagagccuggaccugaacauggagacccugaacaugugcaugccccugagcugcaccaagaacaacagccaccacuacaucagagugggcaacgacaccggccuggagcugacccugaccaacaccagcauccugaaccacaaguucugcaaccugagcgacgcccacaagaaggaccuguacgaccacgcccugaugagcaucaucagcaccuuccaccugagcauccccaacuucaaccaguacgaggccaugagcugcgacuucaacggcggcaagaucagcgugcaguacaaccugagccacagcuacgccaucgacgccgccaaccacugcggcaccguggccaacggcauccugcagaccuucaugagaauggccuggggcggcagcuacaucgcccuggacagcggcagaggcaacugggacugcaucaugaccagcuaccaguaccugaucauccagaacaccaccugggagaaccacugccaguucagcagacccagccccaucggcuaccugggccugcugagccagagaaccagagacaucuacaucagcagaagaagaagaggcaccuucaccuggacccugagcgacagcgagggcaacgccacccccggcggcuacugccugaccagauggaugcugaucgaggccgagcugaagugcuucggcaacaccgccguggccaagugcaacgagaagcacgacgaggaguucugcgacaugcugagacuguucgacuucugcaagcaggccaucagcagacugaagagccccgcccagaugagcauccagcugaucaacaaggccgugaacgcccugaucaacgaccagcugaucaugaagaaccaccugagagacaucaugggcauccccuacugcaacuacagcaaguacugguaccugaaccacaccaucaccggcaagaccagccugcccaagugcuggcuggugagcaacggcagcuaccugaacgagacccacuucagcgacgacaucgagcagcaggccgacaacaugaucaccgagaugcugcagaaggaguacauggagagacagggcaagaccccccugggccugguggaccuguucguguucagcaccagcuucuaccugaucagcaucuuccugagacuggugaagauccccacccacagacacaucgugggcaagcccugccccaagccccacagacugaaccacaugggcaucugcagcugcggccuguacaagcagcccggcgugcccgugagauggaagagaugaggacuagucccuguucccagagcccacuuuuuuuucuuuuuuugaaauaaaauagccugucuuucagaucuaaaaaaaaaaaaaaaaaaaaaaaaaaaaaaaaaaaaaaaaaaaaaaaaaaaaaaaaaaaaaaaaaaaaaaaaaaaaaaaaaaaaaaaaaaaaaaaaaaaa

SEQ ID NO: 23434 - RNA, 1721 nt, Artificial Sequence
  mRNA product Design a-1 (A100) comprising derived and/or modified sequence from LASV(Togo/2016/7082;Clade VI)__AMR44577__GPCmut2 (opt4)
aggagagucccgcagucggcguccagcggcucugcuuguucgugugugugucguugcaggccuuauucaagcuuaccaugggccagaucaucaccuucuuccaggaggugccccacgugaucgaggaggugaugaacaucgugcugaucgcccugagccugcuggccauccugaagggcguguacaacguggccaccugcggcaucaucggccuggugaccuuccuguuccugugcggcagaagcugcagccugaucuacaagggcagcuacgagcugcagacccuggagcugaacauggagacccugaacaugugcaugccccugagcugcaccaagaacagcagccaccacuacaucagagugggcaacgagaccggccuggagcugacccugaccaacaccagcaucaucaaccacaaguucugcaaccugagcgacgcccacaagagaaaccuguacgaccacgcccugaugagcauccugagcaccuuccaccugagcauccccaacuucaaccaguacgaggccaugagcugcgacuucaacggcggcaagaucagcgugcaguacaaccugagccacgccuacgccguggacgccgccgagcacugcggcaccguggccaacggcgugcugcagaccuucaugagaauggccuggggcggcagcuacaucgcccuggacagcggcagaggcaacugggacugcaucaugaccagcuaccaguaccugaucauccagaacaccaccugggaggaccacugccaguucagcagacccagccccaucggcuaccugggccugcugagccagagaaccagagacaucuacaucagcagaagaagaagaggcaccuucaccuggacccugagcgacagcgagggcaacgagacccccggcggcuacugccugaccagauggaugcugaucgaggccgagcugaagugcuucggcaacaccgccguggccaagugcaacgagaagcacgacgaggaguucugcgacaugcugagacuguucgacuucugcaagcaggccauccagagacugaagagccccgcccagaugagcauccagcugaucaacaaggccgugaacgcccugaucaacgaccagcugaucaugaagaaccaccugagagacaugaugggcauccccuacugcaacuacagcaaguacugguaccugaaccacaccagcagcggcagaaccagccugcccaagugcuggcuggugagcaacggcagcuaccugaacgagacccacuucagcgacgacaucgagcagcaggccgacaacaugaucaccgagaugcugcagaaggaguacaucgacagacagggcaagaccccccugggccugguggaccuguucguguucagcaccagcuucuaccugaucagcaucuuccugcaccugaucaagauccccacccacagacacaucgugggcaagcccugccccaagccccacagacugaaccacaugggcaucugcagcugcggccuguacaagcagcccggcgugcccaccagauggaagagaugaggacuagucccuguucccagagcccacuuuuuuuucuuuuuuugaaauaaaauagccugucuuucagaucuaaaaaaaaaaaaaaaaaaaaaaaaaaaaaaaaaaaaaaaaaaaaaaaaaaaaaaaaaaaaaaaaaaaaaaaaaaaaaaaaaaaaaaaaaaaaaaaaaaaa

SEQ ID NO: 23435 - RNA, 1721 nt, Artificial Sequence
  mRNA product Design a-1 (A100) comprising derived and/or modified sequence from LASV(KAK-428;Clade n.d. (VII))__ANH09740__GPCmut2 (opt4)
aggagagucccgcagucggcguccagcggcucugcuuguucgugugugugucguugcaggccuuauucaagcuuaccaugggccagaucgugaccuucuuccaggaggugccccacgugaucgaggaggugaugaacaucgugcugaucgcccugagccugcuggccauccugaagggccuguacaacuucgccaccugcggcgugaucggccugaucaccuuccugcugcugugcggcagaagcugcagcgccaccuacaagggccaguacgagcugcagacccuggagcugaacauggagagccugaacaugugcaugccccugagcugcaccaagaacaacagccaccacuacaucagagccggcaacaacaccggccuggagcugacccugaccaacaccagcaucaucagccacaaguucugcaaccugagcgacgcccacaagaagaaccuguacgaccacacccugaugagcaucaucaccaccuuccaccugagcauccccaacuucaaccaguacgaggccaugagcugcgacuucaacggcggcaagaucagcauccaguacaaccugagccacagcuacgccggcgacgccgcccagcacugcggcaccguggccaacggcgugcugcagaccuucaugagaauggccuggggcggcagcuaccuggcccuggacagcggcagaagaggcugggacugcaucaucagcagcuaccaguaccugaucauccagaacaccaccugggacgaccacugccaguucagcagacccagccccaucggcuaccugggcuucgugagccagaagaccagagacaucuacaucagcagaagaagaagaggcaccuucaccuggacccugagcgacagcgagggccacgacaugcccggcggcuacugccugaccagauggaugcugaucgaggccgaccugaagugcuucggcaacaccgccguggccaagugcaacgagaagcacgacgaggaguucugcgacauguggagacuguucgacuucugcaagcaggccauccagagacugaaggcccccgcccagaugaacauccagcugaucaacaaggccgugaacgcccugaucaacgaccagcugaugaugaagaaccaccugagagacaucaugggcauccccuacugcaacuacagcaaguucugguaccugaacaacaccaccaccggcagaaccagccugcccagaugcuggcugaucagcaacggcagcuaccugaacgagacccacuucagcgacgacaucgagcagcaggccgacaacaugaucaccgagaugcugcagaaggaguacauggacagacagggcaagaccccccugggccugguggaccuguucguguucagcaccagcuucuaccugaucaccaucuuccugcaccuggugaagauccccacccacagacacaucgugggcaagcccugccccaagccccacagacugaaccacaugggcaucugcagcugcggccuguacaagcagcccggcgugcccgugagauggaagagaugaggacuagucccuguucccagagcccacuuuuuuuucuuuuuuugaaauaaaauagccugucuuucagaucuaaaaaaaaaaaaaaaaaaaaaaaaaaaaaaaaaaaaaaaaaaaaaaaaaaaaaaaaaaaaaaaaaaaaaaaaaaaaaaaaaaaaaaaaaaaaaaaaaaaa

SEQ ID NO: 23436 - RNA, 1721 nt, Artificial Sequence; identical to SEQ ID NO: 23430
  mRNA product Design a-1 (A100) comprising derived and/or modified sequence from LASV(Pinneo-NIG-1969;Clade I)__AIT17836__GPCmut2 (opt4)

SEQ ID NO: 23437 - RNA, 1721 nt, Artificial Sequence
  mRNA product Design a-1 (A100) comprising derived and/or modified sequence from LASV(ISTH0009-NIG-2011;Clade II)__AIT17404__GPCmut2 (opt4)
aggagagucccgcagucggcguccagcggcucugcuuguucgugugugugucguugcaggccuuauucaagcuuaccaugggccagaucaucaccuucuuccaggaggugccccacgugaucgaggaggugaugaacaucgugcugaucgcccugagccugcuggccauccugaagggcaucuacaacguggccaccugcggccuguucggccuggugagcuuccugcugcugugcggcagaagcugcagcaccaccuacaagggcguguacgagcugcagacccuggagcuggacauggccagccugaacaugugcaugccccugagcugcaccaagaacaacagccaccacuacaucauggugggcaacgagaccggccuggagcugacccugaccaacaccagcaucaucaaccacaaguucugcaaccugagcgacgcccacaagaagaaccuguacgaccacgcccugaugagcaucaucagcaccuuccaccugagcauccccaacuucaaccaguacgaggccaugagcugcgacuucaacggcggcaagaucagcgugcaguacaaccugagccacgccuacgccguggacgccgccaaccacugcggcaccaucgccaacggcgugcugcagaccuucaugagaauggccuggggcggcagcuacaucgcccuggacagcggcaagggcagcugggacugcaucaugaccagcuaccaguaccugaucauccagaacaccaccugggaggaccacugccaguucagcagacccagccccaucggcuaccugggccugcugagccagagaaccagagacaucuacaucagcagaagaagaagaggcaccuucaccuggacccugagcgacagcgagggcaacgagacccccggcggcuacugccugaccagauggaugcugaucgaggccgagcugaagugcuucggcaacaccgccguggccaagugcaacgagaagcacgacgaggaguucugcgacaugcugagacuguucgacuucugcaagcaggccaucagaagacugaagacccccgcccagaugagcauccagcugaucaacaaggccgugaacgcccugaucaacgaccagcugaucaugaagaaccaccugagagacaucaugggcauccccuacugcaacuacagcaaguacugguaccugaaccacaccgugaccggcaagaccagccugcccagaugcuggcuggugagcaacggcagcuaccugaacgagacccacuucagcgacgacaucgagcagcaggccgacaacaugaucaccgagcugcugcagaaggaguacauggacagacagggcaagaccccccugggccugguggaccuguucguguucagcaccagcuucuaccugaucagcaucuuccugcaccugaucaagauccccacccacagacacaucaccggcaagcccugccccaagccccacagacugaaccacaugggcaucugcagcugcggccuguacaagcaccccggcgugcccgugaaguggaagagaugaggacuagucccuguucccagagcccacuuuuuuuucuuuuuuugaaauaaaauagccugucuuucagaucuaaaaaaaaaaaaaaaaaaaaaaaaaaaaaaaaaaaaaaaaaaaaaaaaaaaaaaaaaaaaaaaaaaaaaaaaaaaaaaaaaaaaaaaaaaaaaaaaaaaa

SEQ ID NO: 23438 - RNA, 1721 nt, Artificial Sequence
  mRNA product Design a-1 (A100) comprising derived and/or modified sequence from LASV(ISTH2010-NIG-2012;Clade II)__AIT17482__GPCmut2 (opt4)
aggagagucccgcagucggcguccagcggcucugcuuguucgugugugugucguugcaggccuuauucaagcuuaccaugggccagaucaucaccuucuuccaggaggugccccacgugaucgaggaggugaugaacaucgugcugaucgcccugagccugcuggccauccugaagggcaucuacaacguggccaccugcggccuguucggccuggugagcuuccugcugcugugcggcagaagcugcagcaccaccuacaagggcguguacgagcugcagacccuggagcuggacauggccagccugaacaugugcaugccccugagcugcaccaagaacaacagccaccacuacaucauggugggcaacgagaccggccuggagcugacccugaccaacaccagcaucaucaaccacaaguucugcaaccugagcgacgcccacaagaagaaccuguacgaccacgcccugaugagcaucaucagcaccuuccaccugagcauccccaacuucaaccaguacgaggccaugagcugcgacuucaacggcggcaagaucagcgugcaguacaaccugagccacgccuacgccguggacgccgccaaccacugcggcaccaucgccaacggcgugcugcagaccuucaugagaauggccuggggcggcagcuacaucgcccuggacagcggcaagggcagcugggacugcaucaugaccagcuaccaguaccugaucauccagaacaucaccugggaggaccacugccaguucagcagacccagccccaucggcuaccugggccugcugagccagagaaccagagacaucuacaucagcagaagaagaagaggcaccuucaccuggacccugagcgacagcgagggcaacgagacccccggcggcuacugccugaccagauggaugcugaucgaggccgagcugaagugcuucggcaacaccgccguggccaagugcaacgagaagcacgacgaggaguucugcgacaugcugagacuguucgacuucugcaagcaggccaucagaagacugaagacccccgcccagaugagcauccagcugaucaacaaggccgugaacgcccugaucaacgaccagcugaucaugaagaaccaccugagagacaucaugggcauccccuacugcaacuacagcaaguacugguaccugaaccacaccgugaccggcaagaccagccugcccagaugcuggcuggugagcaacggcagcuaccugaacgagacccacuucagcgacgacaucgagcagcaggccgacaacaugaucaccgagcugcugcagaaggaguacaucgacagacagggcaagaccccccugggccugguggaccuguucguguucagcaccagcuucuaccugaucagcaucuuccugcaccuggugaagauccccacccacagacacguggugggcaagcccugccccaagccccacagacugaaccacaugggcaucugcagcugcggccuguacaagcaccccggcgugcccgugaaguggaagagaugaggacuagucccuguucccagagcccacuuuuuuuucuuuuuuugaaauaaaauagccugucuuucagaucuaaaaaaaaaaaaaaaaaaaaaaaaaaaaaaaaaaaaaaaaaaaaaaaaaaaaaaaaaaaaaaaaaaaaaaaaaaaaaaaaaaaaaaaaaaaaaaaaaaaa

SEQ ID NO: 23439 - RNA, 1721 nt, Artificial Sequence
  mRNA product Design a-1 (A100) comprising derived and/or modified sequence from LASV(Lassa virus/H.sapiens-wt/NGA/2015/ISTH_0543;Clade II)__AVO03639__GPCmut2 (opt4)
aggagagucccgcagucggcguccagcggcucugcuuguucgugugugugucguugcaggccuuauucaagcuuaccaugggccagaucaucaccuucuuccaggaggugccccacgugaucgaggaggugaugaacaucgugcugaucgcccugagccugcuggccauccugaagggcaucuacaacguggccaccugcggccuguucggccuggugagcuuccugcugcugugcggcagaagcugcagcaccaccuacaagggcguguacgagcugcagacccuggagcuggacauggccaaccugaacaugugcaugccccugagcugcaccaagaacaacagccaccacuacaucauggugggcaacgagaccggccuggagcugacccugaccaacaccagcaucaucaaccacaaguucugcaaccugagcgacgcccacaagaagaaccuguacgaccacgcccugaugagcaucaucagcaccuuccaccugagcauccccaacuucaaccaguacgaggccaugagcugcgacuucaacggcggcaagaucagcgugcaguacaaccugagccacaccuacgccguggacgccgccaaccacugcggcaccaucgccaacggcgugcugcagaccuucaugagaauggccuggggcggcagcuacaucgcccuggacagcggcaagggcagcugggacugcaucaugaccagcuaccaguaccuggugauccagaacaccaccugggaggaccacugccaguucagcagacccagccccaucggcuaccugggccugcugagccagagaaccagagacaucuacaucagcagaagaagaagaggcaccuucaccuggacccugagcgacagcgagggcaacgagacccccggcggcuacugccugaccagauggaugcugaucgaggccgagcugaagugcuucggcaacaccgccguggccaagugcaacgagaagcacgacgaggaguucugcgacaugcugagacuguucgacuucugcaagcaggccaucagaagacugaagacccccgcccagaugagcauccagcugaucaacaaggccgugaacgcccugaucaacgaccagcugaucaugaagaaccaccugagagacaucaugggcauccccuacugcaacuacagcaaguacugguaccugaaccacaccgugaccggcaagaccagccugcccagaugcuggcuggugagcaacggcagcuaccugaacgagacccacuucagcgacgacaucgagcagcaggccgacaacaugaucaccgagcugcugcagaaggaguacaucgacagacagggcaagaccccccugggccugguggaccuguucguguucagcaccagcuucuaccugaucagcaucuuccugcaccuggugaagauccccacccacagacacaucaccggcaagcccugccccaagccccacagacugaaccacaugggcaucugcagcugcggccuguacaagcaccccggcgugcccgugaaguggaagagaugaggacuagucccuguucccagagcccacuuuuuuuucuuuuuuugaaauaaaauagccugucuuucagaucuaaaaaaaaaaaaaaaaaaaaaaaaaaaaaaaaaaaaaaaaaaaaaaaaaaaaaaaaaaaaaaaaaaaaaaaaaaaaaaaaaaaaaaaaaaaaaaaaaaaa

SEQ ID NO: 23440 - RNA, 1721 nt, Artificial Sequence
  mRNA product Design a-1 (A100) comprising derived and/or modified sequence from LASV(Lassa virus/H.sapiens-wt/NGA/2016/ISTH_0009;Clade II)__AVO03571__GPCmut2 (opt4)
aggagagucccgcagucggcguccagcggcucugcuuguucgugugugugucguugcaggccuuauucaagcuuaccaugggccagaucaucaccuucuuccaggaggugccccacgugaucgaggaggugaugaacaucgugcugaucgcccugagccugcuggccauccugaagggcaucuacaacguggccaccugcggccugcugggccuggugagcuuccugcugcugugcggcagaagcugcagcaccaccuacaagggcguguacgagcugcagacccuggagcuggacauggccagccugaacaugugcaugccccugagcugcaccaagaacaacagccaccacuacaucauggugggcaacgagaccggccuggagcugacccugaccaacaccagcaucaucaaccacaaguucugcaaccugagcgacgcccacaagaagaaccuguacgaccacgcccugaugagcaucaucagcaccuuccaccugagcauccccaacuucaaccaguacgaggccaugagcugcgacuucaacggcggcagaaucagcgugcaguacaaccugagccacagcuacgccguggacgccgccaaccacugcggcaccaucgccaacggcgugcugcagaccuucaugagaauggccuggggcggcagcuacaucgcccuggacagcggcaagggcagcugggacugcaucaugaccagcuaccaguaccugaucauccagaacaccaccugggaggaccacugccaguucagcagacccagccccaucggcuaccugggccugcugagccagagaaccagagacaucuacaucagcagaagaagaagaggcaccuucaccuggacccugagcgacagcgagggcaacgagacccccggcggcuacugccugaccagauggaugcugaucgaggccgagcugaagugcuucggcaacaccgccguggccaagugcaacgagaagcacgacgaggaguucugcgacaugcugagacuguucgacuucugcaagcaggccaucagaagacugaagacccccgcccagaugagcauccagcugaucaacaaggccgugaacgcccugaucaacgaccagcugaucaugaagaaccaccugagagacaucaugggcauccccuacugcaacuacagcaaguacugguaccugaaccacaccgugaccggcaagaccagccugcccagaugcuggcuggugagcaacggcagcuaccugaacgagacccacuucagcgacgacaucgagcagcaggccgacaacaugaucaccgagcugcugcagaaggaguacaucgacagacagggcaagaccccccugggccugguggaccuguucguguucagcaccagcuucuaccugaucagcaucuuccugcaccuggugaagauccccacccacagacacaucaccggcaagcccugccccaagccccacagacugaaccacaugggcaucugcagcugcggccuguacaaccaccccggcgugcccgugaaguggaagagaugaggacuagucccuguucccagagcccacuuuuuuuucuuuuuuugaaauaaaauagccugucuuucagaucuaaaaaaaaaaaaaaaaaaaaaaaaaaaaaaaaaaaaaaaaaaaaaaaaaaaaaaaaaaaaaaaaaaaaaaaaaaaaaaaaaaaaaaaaaaaaaaaaaaaa

SEQ ID NO: 23441 - RNA, 1721 nt, Artificial Sequence
  mRNA product Design a-1 (A100) comprising derived and/or modified sequence from LASV(Lassa virus/H.sapiens-wt/NGA/2016/ISTH_0017;Clade II)__AVO03567__GPCmut2 (opt4)
aggagagucccgcagucggcguccagcggcucugcuuguucgugugugugucguugcaggccuuauucaagcuuaccaugggccagaucaucaccuucuuccaggaggugccccacgugaucgaggaggugaugaacaucgugcugaucgcccugagccugcuggccauccugaagggcaucuacaacguggccaccugcggccuguucggccuggugagcuuccugcugcugugcggcagaagcugcagcaccaccuacaagggcguguacgagcugcagacccuggagcuggacauggccagccugaacaugugcaugccccugagcugcaccaagaacaacagccaccacuacaucauggugggcaacgagaccggccuggagcugacccugaccaacaccagcaucaucaaccacaaguucugcaaccugagcgacgcccacaagaagaaccuguacgaccacgcccugaugagcaucaucagcaccuuccaccugagcauccccaacuucaaccaguacgaggccaugagcugcgacuucaacggcggcaagaucagcgugcaguacaaccugagccacaccuacgccaucgacgccgccaaccacugcggcaccaucgccaacggcgugcugcagaccuucaugagaauggccuggggcggcagcuacaucgcccuggacagcggcaagggcagcugggacugcaucaugaccagcuaccaguaccugaucauccagaacaccaccugggaggaccacugccaguucagcagacccagccccaucggcuaccugggccugcugagccagagaaccagagacaucuacaucagcagaagaagaagaggcaccuucaccuggacccugagcgacagcgagggcaacgagacccccggcggcuacugccugaccagauggaugcugaucgaggccgagcugaagugcuucggcaacaccgccguggccaagugcaacgagaagcacgacgaggaguucugcgacaugcugagacuguucgacuucugcaagcaggccaucagaagacugaagacccccgcccagaugagcauccagcugaucaacaaggccgugaacgcccugaucaacgaccagcugaucaugaagaaccaccugagagacaucaugggcauccccuacugcaacuacagcaaguacugguaccugaaccacaccgugaccggcaagaccagccugcccagaugcuggcuggugagcaacggcagcuaccugaacgagacccacuucagcgacgacaucgagcagcaggccgacaacaugaucaccgagcugcugcagaaggaguacauggacagacagggcaagaccccccugggccugguggaccuguucguguucagcaccagcuucuaccugaucagcaucuuccugcaccuggugagaauccccacccacagacacgugaucggcaagcccugccccaagccccacagacugaaccacaugggcaucugcagcugcggccuguacaagcaccccggcgugcccgugaaguggaagagaugaggacuagucccuguucccagagcccacuuuuuuuucuuuuuuugaaauaaaauagccugucuuucagaucuaaaaaaaaaaaaaaaaaaaaaaaaaaaaaaaaaaaaaaaaaaaaaaaaaaaaaaaaaaaaaaaaaaaaaaaaaaaaaaaaaaaaaaaaaaaaaaaaaaaa

SEQ ID NO: 23442 - RNA, 1721 nt, Artificial Sequence
  mRNA product Design a-1 (A100) comprising derived and/or modified sequence from LASV(Lassa virus/H.sapiens-wt/NGA/2018/ISTH_0959;Clade II)__AVV65099__GPCmut2 (opt4)
aggagagucccgcagucggcguccagcggcucugcuuguucgugugugugucguugcaggccuuauucaagcuuaccaugggccagaucaucaccuucuuccaggaggugccccacgugaucgaggaggugaugaacaucgugcugaucgcccugagccugcuggccauccugaagggcaucuacaacguggugaccugcggccuguucggccuggugagcuuccugcugcugugcggcagaagcugcagcaccaccuacaagggcguguacgagcugcagacccuggagcuggacauggccagccugaacaugugcaugccccugagcugcaccaagaacaacagccaccacuacaucauggugggcaacgagaccggccuggagcugacccugaccaacaccagcaucaucaaccacaaguucugcaaccugagcgacgcccacaagaagaaccuguacgaccacgcccugaugagcaucaucagcaccuuccaccugagcauccccaacuucaaccaguacgaggccaugagcugcgacuucaacggcggcaagaucagcgugcaguacaaccugagccacgccuacgccaucgacgccgccaaccacugcggcaccaucgccaacggcgugcugcagaccuucaugagaauggccuggggcggcagcuacaucgcccuggacagcggcaagggcagcugggacugcaucaugaccagcuaccaguaccugaucauccagaacaccaccugggaggaccacugccaguucagcagacccagccccaucggcuaccugggccugcugagccagagaaccagagacaucuacaucagcagaagaagaagaggcaccuucaccuggacccugagcgacagcgagggcaacgagacccccggcggcuacugccugaccagauggaugcugaucgaggccgagcugaagugcuucggcaacaccgccguggccaagugcaacgagaagcacgacgaggaguucugcgacaugcugagacuguucgacuucugcaagcaggccaucagaagacugaagacccccgcccagaugagcauccagcugaucaacaaggccgugaacgcccugaucaacgaccagcugaucaugaagaaccaccugagagacaucaugggcauccccuacugcaacuacagcaaguacugguaccugaaccacaccgugaccggcaagaccagccugcccagaugcuggcuggugagcaacggcagcuaccugaacgagacccacuucagcgacgacaucgagcagcaggccgacaacaugaucaccgagcugcugcagaaggaguacaucgacagacagggcaagaccccccugggccugguggaccuguucguguucagcaccagcuucuaccugaucagcaucuuccugcaccuggugaagauccccacccacagacacgugaucggcaagcccugccccaagccccacagacugaaccacaugggcaucugcagcugcggccuguacaagcaccccggcgugcccgugaaguggaagagaugaggacuagucccuguucccagagcccacuuuuuuuucuuuuuuugaaauaaaauagccugucuuucagaucuaaaaaaaaaaaaaaaaaaaaaaaaaaaaaaaaaaaaaaaaaaaaaaaaaaaaaaaaaaaaaaaaaaaaaaaaaaaaaaaaaaaaaaaaaaaaaaaaaaaa

SEQ ID NO: 23443 - RNA, 1721 nt, Artificial Sequence
  mRNA product Design a-1 (A100) comprising derived and/or modified sequence from LASV(LASV003-NIG-2008;Clade II)__AIT17580__GPCmut2 (opt4)
aggagagucccgcagucggcguccagcggcucugcuuguucgugugugugucguugcaggccuuauucaagcuuaccaugggccagaucaucaccuucuuccaggaggugccccacgugaucgaggaggugaugaacaucgugcugaucgcccugagccugcuggccauccugaagggcaucuacaacguggccaccugcggccuguucggccuggugagcuuccugcugcugugcggcagaagcugcagcaccaccuacaagggcguguacgagcugcagacccuggagcuggacauggccagccugaacaugugcaugccccugagcugcaccaagaacaacagccaccacuacaucauggugggcaacgagaccggccuggagcugacccugaccaacaccagcaucaucaaccacaaguucugcaaccugagcgacgcccacaagaagaaccuguacgaccacgcccugaugagcaucaucagcaccuuccaccugagcauccccaacuucaaccaguacgaggccaugagcugcgacuucaacggcggcaagaucagcgugcaguacaaccugagccacaccuacgccguggacgccgccaaccacugcggcaccaucgccaacggcgugcugcagaccuucaugagaauggccuggggcggcagcuacaucgcccuggacagcggcaagggcagcugggacugcaucaugaccagcuaccaguaccugaucauccagaacaccaccugggaggaccacugccaguucagcagacccagccccaucggcuaccugggccugcugagccagagaaccagagacaucuacaucagcagaagaagaagaggcaccuucaccuggacccugagcgacagcgagagcaacgagacccccggcggcuacugccugaccagauggaugcugaucgaggccgagcugaagugcuucggcaacaccgccguggccaagugcaacgagaagcacgacgaggaguucugcgacaugcugagacuguucgacuucugcaagcaggccaucagaagacugaaggcccccgcccagaugagcauccagcugaucaacaaggccgugaacgcccugaucaacgaccagcugaucaugaagaaccaccugagagacaucaugggcauccccuacugcaacuacagcaaguacugguaccugaaccacaccgugaccggcagaaccagccugcccagaugcuggcuggugagcaacggcagcuaccugaacgagacccacuucagcgacgacaucgagcagcaggccgacaacaugaucaccgagcugcugcagaaggaguacauggacagacagggcaagaccccccugggccugguggaccuguucguguucagcaccagcuucuaccugaucagcaucuuccugcaccuggugaagauccccacccacagacacgugaucggcaagcccugccccaagccccacagacugaaccacaugggcaucugcagcugcggccuguacaagcaccccggcgugcccgugaaguggaagagaugaggacuagucccuguucccagagcccacuuuuuuuucuuuuuuugaaauaaaauagccugucuuucagaucuaaaaaaaaaaaaaaaaaaaaaaaaaaaaaaaaaaaaaaaaaaaaaaaaaaaaaaaaaaaaaaaaaaaaaaaaaaaaaaaaaaaaaaaaaaaaaaaaaaaa

SEQ ID NO: 23444 - RNA, 1721 nt, Artificial Sequence
  mRNA product Design a-1 (A100) comprising derived and/or modified sequence from LASV(LASV035-NIG-2009;Clade II)__AIT17588__GPCmut2 (opt4)
aggagagucccgcagucggcguccagcggcucugcuuguucgugugugugucguugcaggccuuauucaagcuuaccaugggccagaucaucaccuucuuccaggaggugccccacgugaucgaggaggugaugaacaucgugcugaucgcccugagccugcuggccauccugaagggcaucuacaacguggccaccugcggccuguucggccuggugagcuuccugcugcugugcggcagaagcugcagcaccaccuacaagggcguguacgagcugcagacccuggagcuggacauggccagccugaacaugugcaugccccugagcugcaccaagaacaacagccaccacuacaucauggugggcaacgagaccggccuggagcugacccugaccaacaccagcaucaucaaccacaaguucugcaaccugagcgacgcccacaagaagaaccuguacgaccacgcccugaugagcaucaucagcaccuuccaccugagcauccccaacuucaaccaguacgaggccaugagcugcgacuucaacggcggcaagaucagcgugcaguacaaccugagccacgccuacgccguggacgccgccaaccacugcggcaccaucgccaacggcgugcugcagaccuucaugagaauggccuggggcggcagcuacaucgcccuggacagcggcaagggcagcugggacugcaucaugaccagcuaccaguaccugaucauccagaacaccaccugggaggaccacugccaguucagcagacccagccccaucggcuaccugggccugcugagccagagaaccagagacaucuacaucagcagaagaagaagaggcaccuucaccuggacccugagcgacagcgagggcaacgagacccccggcggcuacugccugaccagauggaugcugaucgaggccgagcugaagugcuucggcaacaccgccguggccaagugcaacgagaagcacgacgaggaguucugcgacaugcugagacuguucgacuucugcaagcaggccaucagaagacugaaggcccccgcccagaugagcauccagcugaucaacaaggccgugaacgcccugaucaacgaccagcugaucaugaagaaccaccugagagacaucaugggcauccccuacugcaacuacagcaaguacugguaccugaaccacaccgugaccggcaagaccagccugcccagaugcuggcuggugagcaacggcagcuaccugaacgagacccacuucagcgacgacaucgagcagcaggccgacaacaugaucaccgagcugcugcagaaggaguacaucgacagacagggcaagaccccccugggccugguggaccuguucguguucagcaccagcuucuaccugaucagcaucuuccugcaccuggugaagauccccacccacagacacgugaucggcaagcccugccccaagccccacagacugaaccacaugggcaucugcagcugcggccuguacaagcaccccggcgugcccgugaaguggaagagaugaggacuagucccuguucccagagcccacuuuuuuuucuuuuuuugaaauaaaauagccugucuuucagaucuaaaaaaaaaaaaaaaaaaaaaaaaaaaaaaaaaaaaaaaaaaaaaaaaaaaaaaaaaaaaaaaaaaaaaaaaaaaaaaaaaaaaaaaaaaaaaaaaaaaa

SEQ ID NO: 23445 - RNA, 1721 nt, Artificial Sequence
  mRNA product Design a-1 (A100) comprising derived and/or modified sequence from LASV(LASV1000-NIG-2009;Clade II)__AIT17782__GPCmut2 (opt4)
aggagagucccgcagucggcguccagcggcucugcuuguucgugugugugucguugcaggccuuauucaagcuuaccaugggccagaucaucaccuucuuccaggaggugccccacgugaucgaggaggugaugaacaucgugcugaucgcccugagccugcuggccauccugaagggcaucuacaacguggccaccugcggccuguucggccuggugagcuuccugcugcugugcggcagaagcugcagcaccaccuacaagggcguguacgagcugcagacccuggagcuggacauggccagccugaacaugugcaugccccugagcugcaccaagaacaacagccaccacuacaucauggugggcaacgagaccggccuggagcugacccugaccaacaccagcaucaucaaccacaaguucugcaaccugagcgacgcccacaagaagaaccuguacgaccacgcccugaugagcaucaucagcaccuuccaccugagcauccccaacuucaaccaguacgaggccaugagcugcgacuucaacggcggcaagaucagcgugcaguacaaccugagccacaccuacgccguggacgccgccaaccacugcggcaccaucgccaacggcgugcugcagaccuucaugagaauggccuggggcggcagcuacaucgcccuggacagcggcaagggcagcugggacugcaucaugaccagcuaccaguaccugaucauccagaacaccaccugggaggaccacugccaguucagcagacccagccccaucggcuaccugggccugcugagccagagaaccagagacaucuacaucagcagaagaagaagaggcaccuucaccuggacccugagcgacagcgagggcaacgagacccccggcggcuacugccugaccagauggaugcugaucgaggccgagcugaagugcuucggcaacaccgccguggccaagugcaacgagaagcacgacgaggaguucugcgacaugcugagacuguucgacuucugcaagcaggccaucaagagacugaagacccccgcccagaugagcauccagcugaucaacaaggccgugaacgcccugaucaacgaccagcugaucaugaagaaccaccugagagacaucaugggcauccccuacugcaacuacagcaaguacugguaccugaaccacaccgugaccggcaagaccagccugcccagaugcuggcuggugagcaacggcagcuaccugaacgagacccacuucagcgacgacaucgagcagcaggccgacaacaugaucaccgagcugcugcagaaggaguacaucgacagacagggcaagaccccccugggccugguggaccuguucguguucagcaccagcuucuaccugaucagcaucuuccugcaccuggugaagauccccacccacagacacguggugggcaagcccugccccaagccccacagacugaaccacaugggcaucugcagcugcggccuguacaagcaccccggcgugcccgugaaguggaagagaugaggacuagucccuguucccagagcccacuuuuuuuucuuuuuuugaaauaaaauagccugucuuucagaucuaaaaaaaaaaaaaaaaaaaaaaaaaaaaaaaaaaaaaaaaaaaaaaaaaaaaaaaaaaaaaaaaaaaaaaaaaaaaaaaaaaaaaaaaaaaaaaaaaaaa

SEQ ID NO: 23446 - RNA, 1721 nt, Artificial Sequence
  mRNA product Design a-1 (A100) comprising derived and/or modified sequence from LASV(LASV221-NIG-2010;Clade II)__AIT17624__GPCmut2 (opt4)
aggagagucccgcagucggcguccagcggcucugcuuguucgugugugugucguugcaggccuuauucaagcuuaccaugggccagaucaucaccuucuuccaggaggugccccacgugaucgaggaggugaugaacaucgugcugaucgcccugagccugcuggccauccugaagggcaucuacaacguggccaccugcggccuguucggccuggugagcuuccugcugcugugcggcagaagcugcagcaccaccuacaagggcguguacgagcugcagacccuggagcuggacauggccagccugaacaugugcaugccccugagcugcaccaagaacaacagccaccacuacaucauggugggcaacgagaccggccuggagcugacccugaccaacaccagcaucaucaaccacaaguucugcaaccugagcgacgcccacaagaagaaccuguacgaccacgcccugaugagcaucaucagcaccuuccaccugagcauccccaacuucaaccaguacgaggccaugagcugcgacuucaacggcggcaagaucagcgugcaguacaaccugagccacaccuacgccaucgacgccgccaaccacugcggcaccaucgccaacggcgugcugcagaccuucaugagaauggccuggggcggcagcuacaucgcccuggacagcggcaagggcagcugggacugcaucaugaccagcuaccaguaccugaucauccagaacaccaccugggaggaccacugccaguucagcagacccagccccaucggcuaccugggccugcugagccagagaaccagagacaucuacaucagcagaagaagaagaggcaccuucaccuggacccugagcgacagcgagggcaacgagacccccggcggcuacugccugaccagauggaugcugaucgaggccgagcugaagugcuucggcaacaccgccguggccaagugcaacgagaagcacgacgaggaguucugcgacaugcugagacuguucgacuucugcaagcaggccaucagaagacugaagacccccgcccagaugagcauccagcugaucaacaaggccgugaacgcccugaucaacgaccagcugaucaugaagaaccaccugagagacaucaugggcauccccuacugcaacuacagcaaguacugguaccugaaccacaccgugaccggcaagaccagccugcccagaugcuggcuggugagcaacggcagcuaccugaacgagacccacuucagcgacgacaucgagcagcaggccgacaacaugaucaccgagaugcugcagaaggaguacauggacagacagggcaagaccccccugggccugguggaccuguucguguucagcaccagcuucuaccugaucagcaucuuccugcaccuggugaagauccccacccacagacacgugaucggcaagcccugccccaagccccacagacugaaccacaugggcaucugcagcugcggccuguacaagcaccccggcgugcccgugaaguggaagagaugaggacuagucccuguucccagagcccacuuuuuuuucuuuuuuugaaauaaaauagccugucuuucagaucuaaaaaaaaaaaaaaaaaaaaaaaaaaaaaaaaaaaaaaaaaaaaaaaaaaaaaaaaaaaaaaaaaaaaaaaaaaaaaaaaaaaaaaaaaaaaaaaaaaaa

SEQ ID NO: 23447 - RNA, 1721 nt, Artificial Sequence
  mRNA product Design a-1 (A100) comprising derived and/or modified sequence from LASV(LASV237-NIG-2010;Clade II)__AIT17638__GPCmut2 (opt4)
aggagagucccgcagucggcguccagcggcucugcuuguucgugugugugucguugcaggccuuauucaagcuuaccaugggccagaucaucaccuucuuccaggaggugccccacgugaucgaggaggugaugaacaucgugcugaucgcccugagccugcuggccauccugaagggcaucuacaacguggccaccugcggccuguucggccuggugagcuuccugcugcugugcggcagaagcugcagcaccaccuacaagggcguguacgagcugcagacccuggagcuggacauggccagccugaacaugugcaugccccugagcugcaccaagaacaacagccaccacuacaucauggugggcaacgagaccggccuggagcugacccugaccaacaccagcaucaucaaccacaaguucugcaaccugagcgacgcccacaagaaggaccuguacgaccacgcccugaugagcaucaucagcaccuuccaccugagcauccccaacuucaaccaguacgaggccaugagcugcgacuucaacggcggcaagaucagcgugcaguacaaccugagccacaccuacgccguggacgccgccaaccacugcggcaccaucgccaacggcgugcugcagaccuucaugagaauggccuggggcggcagcuacaucgcccuggacagcggcaagggcagcugggacugcaucaugaccagcuaccaguaccugaucauccagaacaccaccugggaggaccacugccaguucagcagacccagccccaucggcuaccugggccugcugagccagagaaccagagacaucuacaucagcagaagaagaagaggcaccuucaccuggacccugagcgacagcgagggcaacgagacccccggcggcuacugccugaccagauggaugcugaucgaggccgagcugaagugcuucggcaacaccgccguggccaagugcaacgagaagcacgacgaggaguucugcgacaugcugagacuguucgacuucugcaagcaggccaucagaagacugaagacccccgcccagaugagcauccagcugaucaacaaggccgugaacgcccugaucaacgaccagcugaucaugaagaaccaccugagagacaucaugggcauccccuacugcaacuacagcaaguacugguaccugaaccacaccgugaccggcaagaccagccugcccagaugcuggcuggugagcaacggcagcuaccugaacgagacccacuucagcgacgacaucgagcagcaggccgacaacaugaucaccgagcugcugcagaaggaguacauggacagacagggcaagaccccccugggccugguggaccuguucguguucagcaccagcuucuaccugaucagcaucuuccugcaccugaucaagauccccacccacagacacaucaccggcaagcccugccccaagccccacagacugaaccacaugggcaucugcagcugcggccuguacaagcaccccggcgugcccgugaaguggaagagaugaggacuagucccuguucccagagcccacuuuuuuuucuuuuuuugaaauaaaauagccugucuuucagaucuaaaaaaaaaaaaaaaaaaaaaaaaaaaaaaaaaaaaaaaaaaaaaaaaaaaaaaaaaaaaaaaaaaaaaaaaaaaaaaaaaaaaaaaaaaaaaaaaaaaa

SEQ ID NO: 23448 - RNA, 1721 nt, Artificial Sequence
  mRNA product Design a-1 (A100) comprising derived and/or modified sequence from LASV(LASV253-NIG-2011;Clade II)__AIT17670__GPCmut2 (opt4)
aggagagucccgcagucggcguccagcggcucugcuuguucgugugugugucguugcaggccuuauucaagcuuaccaugggccagaucaucaccuucuuccaggaggugccccacgugaucgaggaggugaugaacaucgugcugaucgcccugagccugcuggccauccugaagggcaucuacaacguggccaccugcggccuguucggccuggugagcuuccugcugcugugcggcagaagcugcagcaccaccuacaagggcguguacgagcugcagacccuggagcuggacauggccagccugaacaugugcaugccccugagcugcaccaagaacaacagccaccacuacaucauggugggcaacgagaccggccuggagcugacccugaccaacaccagcaucaucaaccacaaguucugcaaccugagcgacgcccacaagaagaaccuguacgaccacgcccugaugagcaucaucagcaccuuccaccugagcauccccaacuucaaccaguacgaggccaugagcugcgacuucaacggcggcaagaucagcgugcaguacaaccugagccacaccuacgccguggacgccgccaaccacugcggcaccaucgccaacggcgugcugcagaccuucaugagaauggccuggggcggcagcuacaucgcccuggacagcggcaagggcagcugggacugcaucaugaccagcuaccaguaccugaucauccagaacaccaccugggaggaccacugccaguucagcagacccagccccaucggcuaccugggccugcugagccagagaaccagagacaucuacaucagcagaagaagaagaggcaccuucaccuggacccugagcgacagcgagggcaacgagacccccggcggcuacugccugaccagauggaugcugaucgaggccgagcugaagugcuucggcaacaccgccguggccaagugcaacgagaagcacgacgaggaguucugcgacaugcugagacuguucgacuucugcaagcaggccaucagaagacugaaggcccccgcccagaugagcauccagcugaucaacaaggccgugaacgcccugaucaacgaccagcugaucaugaagaaccaccugagagacaucaugggcauccccuacugcaacuacagcaaguacugguaccugaaccacaccgugaccggcagaaccagccugcccagaugcuggcuggugagcaacggcagcuaccugaacgagacccacuucagcgacgacaucgagcagcaggccgacaacaugaucaccgagcugcugcagaaggaguacaucgacagacagggcaagaccccccugggccugguggaccuguucguguucagcaccagcuucuaccugaucagcaucuuccugcaccuggugaagauccccacccacagacacaucaucggcaagcccugccccaagccccacagacugaaccacaugggcaucugcagcugcggccuguacaagcaccccggcgugcccgugaaguggaagagaugaggacuagucccuguucccagagcccacuuuuuuuucuuuuuuugaaauaaaauagccugucuuucagaucuaaaaaaaaaaaaaaaaaaaaaaaaaaaaaaaaaaaaaaaaaaaaaaaaaaaaaaaaaaaaaaaaaaaaaaaaaaaaaaaaaaaaaaaaaaaaaaaaaaaa

SEQ ID NO: 23449 - RNA, 1721 nt, Artificial Sequence
  mRNA product Design a-1 (A100) comprising derived and/or modified sequence from LASV(LASV254-NIG-2011;Clade II)__AIT17674__GPCmut2 (opt4)
aggagagucccgcagucggcguccagcggcucugcuuguucgugugugugucguugcaggccuuauucaagcuuaccaugggccagaucaucaccuucuuccaggaggugccccacgugaucgaggaggugaugaacaucgugcugaucgcccugagccugcuggccauccugaagggcaucuacaacguggccaccugcggccuguucggccuggugagcuuccugcugcugugcggcagaagcugcagcaccaccuacaagggcguguacgagcugcagacccuggagcuggacaugaccaaccugaacaugugcaugccccugagcugcaccaagaacaacagccaccacuacaucauggugggcaacgagaccggccuggagcugacccugaccaacaccagcaucaucaaccacaaguucugcaaccugagcgacgcccacaagaagaaccuguacaaccacgcccugaugagcaucaucagcaccuuccaccugagcauccccaacuucaaccaguacgaggccaugagcugcgacuucaacggcggcaagaucagcgugcaguacaaccugagccacagcuacgccguggacgccgccaaccacugcggcaccaucgccaacggcgugcugcagaccuucaugagaauggccuggggcggcagcuacaucgcccuggacagcggcaagggcaacugggacugcaucaugaccagcuaccaguaccugaucauccagaacaccaccugggaggaccacugccaguucagcagacccagccccaucggcuaccugggccugcugagccagagaaccagagacaucuacaucagcagaagaagaagaggcaccuucaccuggacccugagcgacagcgagggcaacgagacccccggcggcuacugccugaccagauggaugcugaucgaggccgagcugaagugcuucggcaacaccgccguggccaagugcaacgagaagcacgacgaggaguucugcgacaugcugagacuguucgacuucugcaagcaggccaucagaagacugaagacccccgcccaggccaacauccagcugaucaacaaggccgugaacgcccugaucaacgaccagcugaucaugaagaaccaccugagagacaucaugggcauccccuacugcaacuacagcaaguacugguaccugaaccacaccgugaccggcaagaccagccugcccagaugcuggcuggugagcaacggcagcuaccugaacgagacccacuucagcgacgacaucgagcagcaggccgacaacaugaucaccgagcugcugcagaaggaguacauggacagacagggcaagaccccccugggccugguggaccuguucguguucagcaccagcuucuaccugaucagcaucuuccugcaccuggugaagauccccacccacagacacgugaucggcaagcccugccccaagccccacagacugaaccacaugggcaucugcagcugcggccuguacaagcaccccggcgugcccgugaaguggaagagaugaggacuagucccuguucccagagcccacuuuuuuuucuuuuuuugaaauaaaauagccugucuuucagaucuaaaaaaaaaaaaaaaaaaaaaaaaaaaaaaaaaaaaaaaaaaaaaaaaaaaaaaaaaaaaaaaaaaaaaaaaaaaaaaaaaaaaaaaaaaaaaaaaaaaa

SEQ ID NO: 23450 - RNA, 1721 nt, Artificial Sequence
  mRNA product Design a-1 (A100) comprising derived and/or modified sequence from LASV(Nig08-A19;Clade III)__ADU56618__GPCmut2 (opt4)
aggagagucccgcagucggcguccagcggcucugcuuguucgugugugugucguugcaggccuuauucaagcuuaccaugggccagaucgugaccuucuuccaggaggugccccacgugaucgaggaggugaugaacaucgugcugaucgcccugagcauccuggccauccugaagggccuguacaacaucgccaccugcggccugaucggccuggugaccuuccugcugcugagcggcagaagcugcagcaugaccuacaagggcguguacgagcugcagacccuggagcugaacaugaacacccugaacaugugcaugccccugagcugcaccaagaacaacagccaccacuacaucauggugggcaacgagaccggccuggagcugacccugaccaacaccagccugcugcaccacaaguucugcaaccugagcgacgcccacaagaagaaccuguacgaccacacccugaugagcaucaucagcaccuuccaccugagcauccccaacuucaaccaguacgaggccaugagcugcgacuucaacggcggcaagaucaccgugcaguacaaccugagccacagcuacgccaucgacgccgccaaccacugcggcaccguggccaacggcgugcugcagaccuucaugagaauggccuggggcggcagcuacaucgcccuggacagcggcagaggcaagugggacugcaucaugaccagcuaccaguaccugaucauccagaacaccaccugggaggaccacugccaguucagcagacccagccccaucggcuaccugggccugcugagccagagaaccagagacaucuacaucagcagaagaagaagaggcaccuucaccuggacccugagcgacagcgagggcaacgagacccccggcggcuacugccugaccagauggaugcugaucgaggccgagcugaagugcuucggcaacaccgccguggccaagugcaacgagaagcacgacgaggaguucugcgacaugcugagacuguucgacuucugcaagcaggccaucagaagacugaaggcccccgcccagaugagcauccagcugaucaacaaggccgugaacgcccugaucaacgaccagcugaucaugaagaaccaccugagagacaucaugggcauccccuacugcaacuacagcaaguacugguaccugaaccacaccagcaccggcagaaccagccugcccagaugcuggcuggugagcaacggcagcuaccugaacgagacccacuucagcgacgacaucgagcagcaggccgacaacaugaucaccgagaugcugcagaaggaguaccuggacagacagggcaagaccccccugggccugguggaccuguucguguucagcaccagcuucuaccugaucagcaucuuccugcaccuggugaagauccccacccacagacacaucgugggcaagcccugccccaagccccacagacugaaccacaugggcaucugcagcugcggccuguacaagcagcccggcgugcccgugagauggaagagaugaggacuagucccuguucccagagcccacuuuuuuuucuuuuuuugaaauaaaauagccugucuuucagaucuaaaaaaaaaaaaaaaaaaaaaaaaaaaaaaaaaaaaaaaaaaaaaaaaaaaaaaaaaaaaaaaaaaaaaaaaaaaaaaaaaaaaaaaaaaaaaaaaaaaa

SEQ ID NO: 23451 - RNA, 1724 nt, Artificial Sequence
  mRNA product Design a-1 (A100) comprising derived and/or modified sequence from LASV(G1180-SLE-2010;Clade IV)__AIT17168__GPCmut2 (opt4)
aggagagucccgcagucggcguccagcggcucugcuuguucgugugugugucguugcaggccuuauucaagcuuaccaugggccagaucgugaccuucuuccaggaggugccccacgugaucgaggaggugaugaacaucgugcugaucgcccugagcauccuggccgugcugaagggccuguacaacuucgccaccugcggccuggugggccugcugaccuuccugcugcugugcggcagaagcugcaccgccagcagauacaagggcguguacgagcugcagacccuggagcugaacauggagacccugaacaugugcaugccccugagcugcaccaagaacaacagccaccacuacaucauggugggcaacgagaccggccuggagcugacccugaccaacaccagcaucaucaaccacaaguucugcaaccugagcgacgcccacaagaagaaccuguacgaccacgcccugaugagcaucaucagcaccuuccaccugagcauccccaacuucaaccaguacgaggccaugagcugcgacuucaacggcggcaagaucagcgugcaguacaaccugagccacagcuacgccggcgacgccgccaaccacugcggcaccguggccaacggcgugcugcagaccuucaugagaauggccuggggcggcagcuacaucgcccuggacagcggccacggcagcugggacugcaucaugaccagcuaccaguaccugaucauccagaacaccaccugggaggaccacugccaguucagcagacccagccccaucggcuaccugggccugcugagccagagaaccagagacaucuacaucagcagaagaagaagaggcaccuucaccuggacccugagcgacagcgagggcaaggacacccccggcggcuacugccugaccagauggaugcugaucgaggccgagcugaagugcuucggcaacaccgccguggccaagugcaacgagaagcacgacgaggaguucugcgacaugcugagacuguucgacuucugcaagcaggccauccagagacugaaggcccccgcccagaugagcauccagcugaucaacaaggccgugaacgcccugaucaacgaccagcugaucaugaagaaccaccugagagacaucaugggcauccccuacugcaacuacagcaaguacugguaccugaaccacaccaccaccggcaagaccagccugcccaagugcuggcuggugagcaacggcagcuaccugaacgagacccacuucagcgacgacaucgagcagcaggccgacaacaugaucaccgagaugcugcagaaggaguacauggagagacagggcaagaccccccugggccugguggaccuguucguguucagcaccagcuucuaccugaucagcaucuuccugcaccuggugaagauccccacccacagacacaucgugggcaagagcugccccaagccccacagacugaaccacaugggcaucugcagcugcggccuguacaagcagcccggcgugcccgugaaguggaagagaugaggacuagucccuguucccagagcccacuuuuuuuucuuuuuuugaaauaaaauagccugucuuucagaucuaaaaaaaaaaaaaaaaaaaaaaaaaaaaaaaaaaaaaaaaaaaaaaaaaaaaaaaaaaaaaaaaaaaaaaaaaaaaaaaaaaaaaaaaaaaaaaaaaaaa

SEQ ID NO: 23452 - RNA, 1724 nt, Artificial Sequence
  mRNA product Design a-1 (A100) comprising derived and/or modified sequence from LASV(G1442-SLE-2011;Clade IV)__AIT17180__GPCmut2 (opt4)
aggagagucccgcagucggcguccagcggcucugcuuguucgugugugugucguugcaggccuuauucaagcuuaccaugggccagaucgugaccuucuuccaggaggugccccacgugaucgaggaggugaugaacaucgugcugaucgcccugagcauccuggccgugcugaagggccuguacaacguggccaccugcggccugaucggccuggugaccuuccugcugcugugcggcagaagcugcaccaccacccuguacaagggcguguacgagcugcagacccuggagcugaacauggagacccugaacaugugcaugccccugagcugcaccaagaacaacagccaccacuacaucagagugggcaacgagaccggccuggagcugacccugaccaacaccagcaucaucaaccacaaguucugcaaccugagcgacgcccacaagaagaaccuguacgaccacgcccugaugagcaucaucagcaccuuccaccugagcauccccaacuucaaccaguacgaggccaugagcugcgacuucaacggcggcaagaucagcgugcaguacaaccugagccacagcuacgccggcgacgccgccaaccacugcggcaccguggccaacggcgugcugcagaccuucaugagaauggccuggggcggcagcuacaucgcccuggacagcggcagaggcaacugggacugcaucaugaccagcuaccaguaccugaucauccagaacaccaccugggacgaccacugccaguucagcagacccagccccaucggcuaccugggccugcugagccagagaaccagagacguguacaucagcagaagaagaagaggcaccuucaccuggacccugagcgacagcgagggcaaggacacccccggcggcuacugccugaccagauggaugcugaucgaggccgagcugaagugcuucggcaacaccgccguggccaagugcaacgagaagcacgacgaggaguucugcgacaugcugagacuguucgacuucugcaagcaggccauccagagacugaaggcccccgcccagaugagcauccagcugaucaacaaggccgugaacgcccugaucaacgaccagcugaucaugaagaaccaccugagagacaucaugggcauccccuacugcaacuacagcaaguacugguaccugaacaacaccgccaccggcaagaccagccugcccaagugcuggcugaucagcaacggcagcuaccugaacgagacccacuucagcgacgacaucgagcaggaggccgacaacaugaucaccgagaugcugcagaaggaguacauggagagacagggcaagaccccccugggccugguggaccuguucguguucagcaccagcuucuaccugaucagcaucuuccugcaccuggugaagauccccacccacagacacaucgugggcaagagcugccccaagccccacagacugaaccacaugggcaucugcagcugcggccuguacaagcagcccggcgugcccgugagauggaagagaugaggacuagucccuguucccagagcccacuuuuuuuucuuuuuuugaaauaaaauagccugucuuucagaucuaaaaaaaaaaaaaaaaaaaaaaaaaaaaaaaaaaaaaaaaaaaaaaaaaaaaaaaaaaaaaaaaaaaaaaaaaaaaaaaaaaaaaaaaaaaaaaaaaaaa

SEQ ID NO: 23453 - RNA, 1724 nt, Artificial Sequence
  mRNA product Design a-1 (A100) comprising derived and/or modified sequence from LASV(G3010-SLE-2013;Clade IV)__AIT17344__GPCmut2 (opt4)
aggagagucccgcagucggcguccagcggcucugcuuguucgugugugugucguugcaggccuuauucaagcuuaccaugggccagaucgugaccuucuuccaggaggugccccacgugaucgaggaggugaugaacaucgugcugaucgcccugagcauccuggccgugcugaagggccuguacaacuucgccaccugcggccuggugggccuggugaccuuccugcugcugugcggcagaagcugcaccaccagccuguacaagggcguguacgagcugcagacccuggagcugaacauggagacccugaacaugugcaugccccugagcugcaccaagaacaacagccaccacuacaucauggugggcaacgagaccggccuggagcugacccugaccaacaccagcaucaucaaccacaaguucugcaaccugagcgacgcccacaagaagaaccuguacaaccacgcccugaugagcaucaucagcaccuuccaccugagcauccccaacuucaaccaguacgaggccaugagcugcgacuucaacggcggcaagaucagcgugcaguacaaccugagccacagcuacgccggcgacgccgccagccacugcggcaccguggccaacggcgugcugcagaccuucaugagaauggccuggggcggcagcuacaucgcccuggacagcggcuacggcaagugggacugcaucaugaccagcuaccaguaccugaucauccagaacaccaccugggaggaccacugccaguucagcagacccagccccaucggcuaccugggccugcugagccagagaaccagagacaucuacaucagcagaagaagaagaggcaccuucaccuggacccugagcgacagcgagggcaaggacacccccggcggcuacugccugaccagauggaugcugaucgaggccgagcugaagugcuucggcaacaccgccguggccaagugcaacgagaagcacgacgaggaguucugcgacaugcugagacuguucgacuucugcaagcaggccauccagagacugaagacccccgcccagaugagcauccagcugaucaacaaggccgugaacgcccugaucaacgaccagcugaucaugaagaaccaccugagagacaucaugggcauccccuacugcaacuacagcaaguacugguaccugaaccacaccaccaccggcaagaccagccugcccaagugcuggcuggugagcaacggcagcuaccugaacgagacccacuucagcgacgacaucgagcagcaggccgacaacaugaucaccgagaugcugcagaaggaguacauggagagacagggcaagaccccccugggccugguggaccuguucguguucagcaccagcuucuaccugaucagcaucuuccugcaccuggugaagauccccacccacagacacaucgugggcaagagcugccccaagccccacagacugaaccacaugggcaucugcagcugcggccuguacaagcagcccggcgugcccgugagauggaagagaugaggacuagucccuguucccagagcccacuuuuuuuucuuuuuuugaaauaaaauagccugucuuucagaucuaaaaaaaaaaaaaaaaaaaaaaaaaaaaaaaaaaaaaaaaaaaaaaaaaaaaaaaaaaaaaaaaaaaaaaaaaaaaaaaaaaaaaaaaaaaaaaaaaaaa

SEQ ID NO: 23454 - RNA, 1724 nt, Artificial Sequence
  mRNA product Design a-1 (A100) comprising derived and/or modified sequence from LASV(G502-SLE-2009;Clade IV)__AIT17126__GPCmut2 (opt4)
aggagagucccgcagucggcguccagcggcucugcuuguucgugugugugucguugcaggccuuauucaagcuuaccaugggccagaucgugaccuucuuccaggaggugccccacgugaucgaggaggugaugaacaucgugcugaucgcccugagcauccuggccgugcugaagggccuguacaacuucgccaccugcggccuggugggccugcugaccuuccugcugcugugcggcagaagcugcaccaccggccuguacaagggcguguacgagcugcagacccuggagcugaacauggagacccugaacaugugcaugccccugagcugcaccaagaacaacagccaccacuacaucauggugggcaacgagaccggccuggagcugacccugaccaacaccagcaucaucaaccacaaguucugcaaccugagcgacgcccacaagaagaaccuguacgaccacgcccugaugagcaucaucagcaccuuccaccugagcauccccaacuucaaccaguacgaggccaugagcugcgacuucaacggcggcaagaucagcgugcaguacaaccugagccacagcuacgccggcgacgccgccgaccacugcggcaccguggccaacggcgugcugcagaccuucaugagaauggccuggggcggcagcuacaucgcccuggacagcggcagaggcagaugggacugcaucaugaccagcuaccaguaccugaucauccagaacaccaccugggaggaccacugccaguucagcagacccagccccaucggcuaccugggccugcugagccagagaaccagagacaucuacaucagcagaagaagaagaggcaccuucaccuggacccugagcgacagcgagggcaaggacacccccggcggcuacugccugaccagauggaugcugaucgaggccgagcugaagugcuucggcaacaccgccguggccaagugcaacgagaagcacgacgaggaguucugcgacaugcugagacuguucgacuucugcaagcaggccauccagagacugaaggcccccgcccagaugagcauccagcugaucaacaaggccgugaacgcccugaucaacgaccagcuggugaugaagaaccaccugagagacaucaugggcauccccuacugcaacuacagcagauacugguaccugaaccacaccaccaccggcagaaccagccugcccaagugcuggcuggugagcaacggcagcuaccugaacgagacccacuucagcgacgacaucgagcagcaggccgacaacaugaucaccgagaugcugcagaaggaguacauggagagacagggcaagaccccccugggccugguggaccuguucguguucagcaccagcuucuaccugaucagcaucuuccugcaccuggugaagauccccacccacagacacaucgugggcaagagcugccccaagccccacagacugaaccacaugggcaucugcagcugcggccuguacaagcagcccggcgugcccgugaaguggaagagaugaggacuagucccuguucccagagcccacuuuuuuuucuuuuuuugaaauaaaauagccugucuuucagaucuaaaaaaaaaaaaaaaaaaaaaaaaaaaaaaaaaaaaaaaaaaaaaaaaaaaaaaaaaaaaaaaaaaaaaaaaaaaaaaaaaaaaaaaaaaaaaaaaaaaa

SEQ ID NO: 23455 - RNA, 1724 nt, Artificial Sequence
  mRNA product Design a-1 (A100) comprising derived and/or modified sequence from LASV(G733-SLE-2010;Clade IV)__AIT17154__GPCmut2 (opt4)
aggagagucccgcagucggcguccagcggcucugcuuguucgugugugugucguugcaggccuuauucaagcuuaccaugggccagaucgugaccuucuuccaggaggugccccacgugaucgaggaggugaugaacaucgugcugaucgcccugagcauccuggccgugcugaagggccuguacaacuucgccaccugcggcaucgugggccuggugagcuuccugcugcugugcggcagaagcugcaccaccagccuguacaagggcguguacgagcugcagacccuggagcugaacauggagacccugaacaugugcaugccccugagcugcaccaagaacaacagccaccacuacaucauggugggcaacgagaccggccuggagcugacccugaccaacaccagcaucaucaaccacaaguucugcaaccugagcgacgcccacaagaagaaccuguacgaccacgcccugaugagcaucaucagcaccuuccaccugagcauccccaacuucaaccaguacgaggccaugagcugcgacuucaacggcggcaagaucagcgugcaguacaaccugagccacagcuacgccggcgacgccgccaaccacugcggcaccaucgccaacggcgugcugcagaccuucaugagaauggccuggggcggcagcuacaucgcccuggacagcggcagagacagaugggacugcaucaugaccagcuaccaguaccugaucauccagaacaccaccugggaggaccacugccaguucagcagacccagccccaucggcuaccugggccugcugagccagagaaccagagacaucuacaucagcagaagaagaagaggcaccuucaccuggacccugagcgacagcgagggcaaggacacccccggcggcuacugccugaccagauggaugcugaucgaggccgagcugaagugcuucggcaacaccgccguggccaagugcaacgagaagcacgacgaggaguucugcgacaugcugagacuguucgacuucugcaagcaggccauccagagacugaaggcccccgcccagaugagcauccagcugaucaacaaggccgugaacgcccugaucaacgaccagcugaucaugaagaaccaccugagagacaucaugggcauccccuacugcaacuacagcaaguacugguaccugaaccacaccaccaccggcaagaccagccugcccaagugcuggcuggugagcaacggcagcuaccugaacgagacccacuucagcgacgacaucgagcagcaggccgacaacaugaucaccgagaugcugcagaaggaguacauggagagacagggcaagaccccccugggccugguggaccuguucguguucagcaccagcuucuaccugaucagcaucuuccugcaccuggugaagauccccacccacagacacguggugggcaagagcugccccaagccccacagacugaaccacaugggcaucugcagcugcggccuguacggccagcccggcgugcccgugaaguggaagagaugaggacuagucccuguucccagagcccacuuuuuuuucuuuuuuugaaauaaaauagccugucuuucagaucuaaaaaaaaaaaaaaaaaaaaaaaaaaaaaaaaaaaaaaaaaaaaaaaaaaaaaaaaaaaaaaaaaaaaaaaaaaaaaaaaaaaaaaaaaaaaaaaaaaaa

SEQ ID NO: 23456 - RNA, 1724 nt, Artificial Sequence
  mRNA product Design a-1 (A100) comprising derived and/or modified sequence from MOPV/LASV reassortant(IGS-1;Clade IV)__AFY05576__GPCmut2 (opt4)
aggagagucccgcagucggcguccagcggcucugcuuguucgugugugugucguugcaggccuuauucaagcuuaccaugggccagaucgugaccuucuuccaggaggugccccacgugaucgaggaggugaugaacaucgugcugaucgcccugagcgugcuggccgugcugaagggccuguacaacuucgccaccugcggccuggugggccuggugaccuuccugcugcugugcggcagaagcugcaccaccagccuguacaagggcguguacgagcugcagacccuggagcugaacauggagacccugaacaugugcaugccccugagcugcaccaagaacaacagccaccacuacaucauggugggcaacgagaccggccuggagcugacccugaccaacaccagcaucaucaaccacaaguucugcaaccugagcgacgcccacaagaagaaccuguacgaccacgcccugaugagcaucaucagcaccuuccaccugagcauccccaacuucaaccaguacgaggccaugagcugcgacuucaacggcggcaagaucagcgugcaguacaaccugagccacagcuacgccggcgacgccgccaaccacugcggcaccguggccaacggcgugcugcagaccuucaugagaauggccuggggcggcagcuacaucgcccuggacagcggcagaggcaacugggacugcaucaugaccagcuaccaguaccugaucauccagaacaccaccugggaggaccacugccaguucagcagacccagccccaucggcuaccugggccugcugagccagagaaccagagacaucuacaucagcagaagaagaagaggcaccuucaccuggacccugagcgacagcgagggcgaggacacccccggcggcuacugccugaccagauggaugcugaucgaggccgagcugaagugcuucggcaacaccgccguggccaagugcaacgagaagcacgacgaggaguucugcgacaugcugagacuguucgacuucugcaagcaggccauccagagacugaaggcccccgcccagaugagcauccagcugaucaacaaggccgugaacgcccugaucaacgaccagcugaucaugaagaaccaccugagagacaucaugggcauccccuacugcaacuacagcaaguacugguaccugaaccacaccaccaccggcagaaccagccugcccaagugcuggcuggugagcaacggcagcuaccugaacgagacccacuucagcgacgacaucgagcagcaggccgacaacaugaucaccgagaugcugcagaaggaguacauggagagacagggcaagaccccccugggccugguggaccuguucguguucagcaccagcuucuaccugaucagcaucuuccugcaccuggugaagauccccacccacagacacaucgugggcaagagcugccccaagccccacagacugaaccacaugggcaucugcagcugcggccuguacaagcagcccggcgugcccgugaaguggaagagaugaggacuagucccuguucccagagcccacuuuuuuuucuuuuuuugaaauaaaauagccugucuuucagaucuaaaaaaaaaaaaaaaaaaaaaaaaaaaaaaaaaaaaaaaaaaaaaaaaaaaaaaaaaaaaaaaaaaaaaaaaaaaaaaaaaaaaaaaaaaaaaaaaaaaa

SEQ ID NO: 23457 - RNA, 1724 nt, Artificial Sequence
  mRNA product Design a-1 (A100) comprising derived and/or modified sequence from LASV(LM765-SLE-2012;Clade IV)__AIT17814__GPCmut2 (opt4)
aggagagucccgcagucggcguccagcggcucugcuuguucgugugugugucguugcaggccuuauucaagcuuaccaugggccagaucgugaccuucuuccaggaggugccccacgugaucgaggaggugaugaacaucgugcugaucgcccugagcauccuggccgugcugaagggccuguacaacuucgccaccugcggccuggugggccuggugaccuuccugcugcugugcggcagaagcugcaccaccagccuguacaagggcguguacgagcugcagacccuggagcugaacauggagacccugaacaugugcaugccccugagcugcaccaagaacaacagccaccacuacaucauggugggcaacgagaccggccuggagcugacccugaccaacaccagcaucaucgaccacaaguucugcaaccugagcgacgcccacagaaagaaccuguacgaccacgcccugaugagcaucaucagcaccuuccaccugagcauccccaacuucaaccaguacgaggccaugagcugcgacuucaacggcggcaagaucagcgugcaguacaaccugagccacagcuacgccaaggacgccgccgaccacugcggcaccguggccaacggcgugcugcagaccuucaugagaauggccuggggcggcagcuacaucgcccuggacagcggcagaggcagaugggacugcaucaugaccagcuaccaguaccugaucauccagaacaccaccugggaggaccacugccaguucagcagacccagccccaucggcuaccugggccugcugagccagagaaccagagacaucuacaucagcagaagaagaagaggcaccuucaccuggacccugagcgacagcgagggcaaggacacccccggcggcuacugccugaccagauggaugcugaucgaggccgagcugaagugcuucggcaacaccgccguggccaagugcaacgagaagcacgacgaggaguucugcgacaugcugagacuguucgacuucugcaagcaggccauccagagacugaaggcccccgcccagaugagcauccagcugaucaacaaggccgugaacgcccugaucaacgaccagcugaucaugaagaaccaccugagagacaucaugggcauccccuacugcaacuacagcaaguacugguaccugaaccacaccaccaccggcaagaccagccugcccaagugcuggcuggugagcaacggcagcuaccugaacgagacccacuucagcgacgacaucgagcagcaggccgacaacaugaucaccgagaugcugcagaaggaguacauggagagacagggcaagaccccccugggccugguggaccuguucguguucagcaccagcuucuaccugaucagcaucuuccugcaccuggugaagauccccacccacagacacaucgugggcaagcccugccccaagccccacagacugaaccacaugggcaucugcagcugcggccuguacaagcagcccggcgugcccgugaaguggaagagaugaggacuagucccuguucccagagcccacuuuuuuuucuuuuuuugaaauaaaauagccugucuuucagaucuaaaaaaaaaaaaaaaaaaaaaaaaaaaaaaaaaaaaaaaaaaaaaaaaaaaaaaaaaaaaaaaaaaaaaaaaaaaaaaaaaaaaaaaaaaaaaaaaaaaa

SEQ ID NO: 23458 - RNA, 1724 nt, Artificial Sequence
  mRNA product Design a-1 (A100) comprising derived and/or modified sequence from LASV(LM776-SLE-2012;Clade IV)__AIT17824__GPCmut2 (opt4)
aggagagucccgcagucggcguccagcggcucugcuuguucgugugugugucguugcaggccuuauucaagcuuaccaugggccagaucgugaccuucuuccaggaggugccccacgugaucgaggaggugaugaacaucgugcugaucgcccugagcauccuggccgugcugaagggccuguacaacuucgccaccugcggccuggugggccuggugaccuuccugcugcugugcggcagaagcugcaccaccagcguguacaagggcguguacgagcugcagacccuggagcugaacauggagacccugaacaugugcaugccccugagcugcaccaagaacaacagccaccacuacaucauggugggcaacgagaccggccuggagcugacccugaccaacaccagcaucaucaaccacaaguucugcaaccugagcgacgcccacaagaagaaccuguacgaccacgcccugaugagcaucaucagcaccuuccaccugagcauccccaacuucaaccaguacgaggccaugagcugcgacuucaacggcggcaagaucagcgugcaguacaaccugagccacagcuacgccggcgacgccgccaaccacugcggcaccguggccaacggcgugcugcagaccuucaugagaauggccuggggcggcagcuacaucgcccuggacagcggccacggcaagugggacugcaucaugaccagcuaccaguaccugaucauccagaacaccaccugggaggaccacugccaguucagcagacccagccccaucggcuaccugggccugcugagccagagaaccagagacaucuacaucagcagaagaagaagaggcaccuucaccuggacccugagcgacagcgagggcaaggacacccccggcggcuacugccugaccagauggaugcugaucgaggccgagcugaagugcuucggcaacaccgccguggccaagugcaacgagaagcacgacgaggaguucugcgacaugcugagacuguucgacuucugcaagcaggccauccagagacugaaggcccccgcccagaugagcauccagcugaucaacaaggccgugaacgcccugaucaacgaccagcugaucaugaagaaccaccugagagacaucaugggcauccccuacugcaacuacagcaaguacugguaccugaaccacaccaccaccggcaagaccagccugcccaagugcuggcuggugagcaacggcagcuaccugaacgagacccacuucagcgacgacaucgagcagcaggccgacaacaugaucaccgagaugcugcagaaggaguacauggagagacagggcaagaccccccugggccugguggaccuguucguguucagcaccagcuucuaccugaucagcaucuuccugcaccuggugaagauccccacccacagacacaucgugggcaagagcugccccaagccccacagacugaaccacaugggcaucugcagcugcggccuguacaagcagcccggcgugcccgugagauggaagagaugaggacuagucccuguucccagagcccacuuuuuuuucuuuuuuugaaauaaaauagccugucuuucagaucuaaaaaaaaaaaaaaaaaaaaaaaaaaaaaaaaaaaaaaaaaaaaaaaaaaaaaaaaaaaaaaaaaaaaaaaaaaaaaaaaaaaaaaaaaaaaaaaaaaaa

SEQ ID NO: 23459 - RNA, 1724 nt, Artificial Sequence
  mRNA product Design a-1 (A100) comprising derived and/or modified sequence from LASV(Mad39;Clade IV)__ANH09722__GPCmut2 (opt4)
aggagagucccgcagucggcguccagcggcucugcuuguucgugugugugucguugcaggccuuauucaagcuuaccaugggccagaucgugaccuucuuccaggaggugccccacgugaucgaggaggugaugaacaucgugcugaucgcccugagcauccuggccgugcugaagggccuguacaacguggccaccugcggccugaucggccuggugaccuuccugcugcugugcggcagaagcugcaccaccacccuguacaagggcguguacgagcugcaggcccuggagcugaacauggagacccugaacaugugcaugccccugagcugcaccaagaacaacagccaccacuacaucagagugggcaacgagaccggccuggagcugacccugaccaacaccagccugaucaaccacaaguucugcaaccugagcgacgcccacaagaagaaccuguacgaccacgcccugaugagcaucaucagcaccuuccaccugagcauccccaacuucaaccaguacgaggccaugagcugcgacuucaacgacggcaagaucagcgugcaguacaaccugagccacaccuacgccggcgacaccgccaaccacugcggcaccguggccaacggcgugcugcagaccuucaugagaauggccuggggcggcagcuacaucgcccuggacagcggcagaggcggcugggacugcaucaugaccagcuaccaguaccugaucauccagaacaccaccugggaggaccacugccaguucagcagacccagccccaucggcuaccugggccugcugagccagagaaccagagacaucuacaucagcagaagaagaagaggcaccuucaccuggacccugagcgacagcgagggcaaggacacccccggcggcuacugccugaccagauggaugcugaucgaggccgagcugaagugcuucggcaacaccgccguggccaagugcaacgagaagcacgacgaggaguucugcgacaugcugagacuguucgacuucugcaagcaggccauccagagacugaaggcccccgcccagaugagcauccagcugaucaacaaggccgugaacgcccugaucaacgaccagcugaucaugaagaaccaccugagagacaucaugggcauccccuacugcaacuacagcaaguacugguaccugaaccacaccgugaccggcaagaccagccugcccaagugcuggcuggugagcaacggcagcuaccugaacgagacccacuucagcgacgacaucgagcagcaggccgacaacaugaucaccgagaugcugcagaaggaguacauggagagacagggcaagaccccccugggccugguggaccuguucguguucagcaccagcuucuaccugaucagcaucuuccugcaccuggugaagauccccacccacagacacguggugggcaagcccugccccaagccccacagacugaaccacaugggcaucugcagcugcggcuucuacaagcagcccggcgugcccgugagauggaagagaugaggacuagucccuguucccagagcccacuuuuuuuucuuuuuuugaaauaaaauagccugucuuucagaucuaaaaaaaaaaaaaaaaaaaaaaaaaaaaaaaaaaaaaaaaaaaaaaaaaaaaaaaaaaaaaaaaaaaaaaaaaaaaaaaaaaaaaaaaaaaaaaaaaaaa

SEQ ID NO: 23460 - RNA, 1724 nt, Artificial Sequence
  mRNA product Design a-1 (A100) comprising derived and/or modified sequence from LASV(Z0947-SLE-2011;Clade IV)__AIT17840__GPCmut2 (opt4)
aggagagucccgcagucggcguccagcggcucugcuuguucgugugugugucguugcaggccuuauucaagcuuaccaugggccagaucgugaccuucuuccaggaggugccccacgugaucgaggaggugaugaacaucgugcugaucgcccugagcauccuggccgugcugaagggccuguacaacuucgccaccugcggccuggugggccuggugaccuuccugcugcugugcggcagaagcugcaccaucagccuguacaagggcguguacgagcugcagacccuggagcugaacauggagacccugaacaugugcaugccccugagcugcaccaagaacaacagccaccacuacaucauggugggcaacgagaccggccuggagcugacccugaccaacaccagcaucaucaaccacaaguucugcaaccugagcgacgcccacaagaagaaccuguacgaccacgcccugaugagcaucaucagcaccuuccaccugagcauccccaacuucaaccaguacgaggccaugagcugcgacuucaacggcggcaagaucagcgugcaguacaaccugagccacagcuacgccggcgacgccgccaaccacugcggcaccguggccaacggcgugcugcagaccuucaugagaauggccuggggcggcagcuacaucgcccuggacagcggcagagacagaugggacugcaucaugaccagcuaccaguaccugaucauccagaacaccaccugggaggaccacugccaguucagcagacccagccccaucggcuaccugggccugcugagccagagaaccagagacaucuacaucagcagaagaagaagaggcaccuucaccuggacccugagcgacagcgagggcaaggacacccccggcggcuacugccugaccagauggaugcugaucgaggccgagcugaagugcuucggcaacaccgccguggccaagugcaacgagaagcacgacgaggaguucugcgacaugcugagacuguucgacuucugcaagcaggccauccagagacugaaggcccccgcccagaugagcauccagcugaucaacaaggccgugaacgcccugaucaacgaccagcugaucaugaagaaccaccugagagacaucaugggcauccccuacugcaacuacagcaaguacugguaccugaaccacaccaccaccggcaagaccagccugcccaagugcuggcuggugagcaacggcagcuaccugaacgagacccacuucagcgacgacaucgagcagcaggccgacaacaugaucaccgagaugcugcagaaggaguacauggagagacagggcaagaccccccugggccugguggaccuguucguguucagcaccagcuucuaccugaucagcaucuuccugcaccuggugaagauccccacccacagacacaucgugggcaagcccugccccaagccccacagacugaaccacaugggcaucugcagcugcggccuguacaagcagcccggcgugcccgugaaguggaagagaugaggacuagucccuguucccagagcccacuuuuuuuucuuuuuuugaaauaaaauagccugucuuucagaucuaaaaaaaaaaaaaaaaaaaaaaaaaaaaaaaaaaaaaaaaaaaaaaaaaaaaaaaaaaaaaaaaaaaaaaaaaaaaaaaaaaaaaaaaaaaaaaaaaaaa

SEQ ID NO: 23461 - RNA, 1724 nt, Artificial Sequence
  mRNA product Design a-1 (A100) comprising derived and/or modified sequence from LASV(Josiah;Clade IV)__NP_694870__GPCmut2 (opt5)
aggagagucccgcagucggcguccagcggcucugcuuguucgugugugugucguugcaggccuuauucaagcuuaccaugggccagaucgugaccuucuuucaagaggucccccacguuauugaagaggugaugaacaucgugcugauugcccucagcguccuggcugugcuuaaggggcuguacaauuucgccacaugcggacucguuggccuggugacguuucuucugcucugugggagauccugcaccacaucucuguauaaaggagucuacgaacugcagacccucgagcugaacauggaaacacuuaauauguguaugccucugagcugcaccaagaacaauucccaucacuauaucauggugggcaacgagacagggcucgagcugacccuuacgaauaccucuauuaucaaccauaaauucuguaaucugagcgacgcgcacaagaaaaaccucuacgaucaugcucugauguccaucauuucuacauuucaccugagcaucccgaauuucaaccaguaugaagccauguccugcgacuuuaauggaggcaagauuagcguucaguacaaccucucucacuccuaugccggcgaugcugccaaucauugugggaccguggcuaacggaguccugcaaacauucaugcggauggccuggggcgggagcuacaucgcgcuugacucuggacgcggcaacugggauugcauuaugaccuccuaccaguaucugaucauucagaauacgacaugggaggaccacugucaguuuagcagacccucuccuaucggguaccucggacugcuuucccaacggacccgcgauaucuauauuagcagacggcgcagaggcacauucaccuggacccuguccgacucugaaggcaaggauacacccgggggauacugccucacgcgguggaugcugaucgaggccgagcugaaauguuuuggcaacaccgcuguggccaagugcaaugaaaaacaugacgaggaguucugcgauaugcuccgccuguuugacuucuguaagcaggcuauucagagacuuaaagccccugcgcagaugagcauccaacugauuaacaaggccgugaaugcucucaucaacgaucagcugaucaugaagaaucaccuucgggacauuauggggauccccuauugcaacuacuccaaauauugguaccugaaucacacaaccacaggacgcaccagccucccuaaguguuggcuggucucuaacggcuccuaccugaaugaaacgcauuucagcgacgauauugaacagcaagccgacaacaugaucacagagaugcuccagaaagaguauauggaaagacaggggaagaccccgcugggacuuguugaucuguuuguguucucuaccagcuuuuaccucauuuccaucuuccugcaccuggugaaaauccccacacaucggcacauugucggcaagucuugcccuaaaccccaucgccuuaaucacaugggcaucuguagcugcgggcucuauaagcagccuggagugcccguuaaguggaaaagaugaggacuagucccuguucccagagcccacuuuuuuuucuuuuuuugaaauaaaauagccugucuuucagaucuaaaaaaaaaaaaaaaaaaaaaaaaaaaaaaaaaaaaaaaaaaaaaaaaaaaaaaaaaaaaaaaaaaaaaaaaaaaaaaaaaaaaaaaaaaaaaaaaaaaa

SEQ ID NO: 23462 - RNA, 1721 nt, Artificial Sequence
  mRNA product Design a-1 (A100) comprising derived and/or modified sequence from LASV(LP;Clade I)__AAF86701__GPCmut2 (opt5)
aggagagucccgcagucggcguccagcggcucugcuuguucgugugugugucguugcaggccuuauucaagcuuaccaugggccagaucauuaccuucuuucaagaggugccccacgucaucgaagagguuaugaacauugugcugaucgcccucagccugcuugcuauucugaaggggcucuacaauaucgccacaugcggaaucauuggccugguggcguuccuuuuucugugugggaaauccugcucucucacgcugaagggaggcuaugaacugcagacccucgagcugaacauggaaacacuuaauauguguaugccucugagcugcaccaaaaacuccucucaucacuacaucagagucgggaaugagacaggacucgagcugacccuuacaaacaccagcauuaucaaucauaaguucuguaaccuguccgacgcucacaaaaagaaucucuaugaucaugcccugaugucuauuaucagcacguuucaccuguccauuccgaacuucaaucaguacgaagccaugagcugcgacuuuaacggcggcaagaucucugugcaguauaaucucucccacagcuacgcuggggaugccgcugagcauuguggaaccguugccaacggcgugcugcaaacauucaugcggauggcguggggagggcgcuauaucgcccuugacucuggcaaagggaauugggauugcauuaugaccuccuaccaguaccugaucauucagaacacaaccugggaagaccacugucaguuuagcagacccucuccuaucggauaucucggccugcuuucccaacggacgcgcgauauuuacaucagcagacggcgcagaggcacauucaccuggacacuguccgacucugaggggaacgagacccccggaggcuauugccucacccgguggaugcugaucgaagcugagcugaaguguuuugggaauacagccgucgcuaaaugcaacgaaaagcaugaugaggaguucugcgacaugcuccgccuguuugauuucuguaaacaggccauuagacggcuuaaggcgccugcccagaugagcauccagcugauuaauaaggcugugaacgcccucaucaaugaccaacugauuaugaaaaaccaccuucgcgauaucaugggaauccccuacugcaauuauuccaaguacugguaucugaaccacacgagcucuggcagaaccucccucccuaaauguuggcugauuagcaaugggucuuaccugaacgaaacacaguucagcgacgacaucgagcagcaagcugauaauaugauuaccgaaaugcuccagaaggaguacaucgaacggcagggaaaaacaccgcugggccuuguugacauuuuuaucuucuccaccucuuuuuaucugauuagcaucuuccuccaucugaucaagauucccacgcaccgccauaucgugggcaaaccuugccccaagccucacagacugaaccauaugggggucuguuccugcggacuuuacaagcaccccggcgugccgacaaaauggaagcggugaggacuagucccuguucccagagcccacuuuuuuuucuuuuuuugaaauaaaauagccugucuuucagaucuaaaaaaaaaaaaaaaaaaaaaaaaaaaaaaaaaaaaaaaaaaaaaaaaaaaaaaaaaaaaaaaaaaaaaaaaaaaaaaaaaaaaaaaaaaaaaaaaaaaa

SEQ ID NO: 23463 - RNA, 1721 nt, Artificial Sequence
  mRNA product Design a-1 (A100) comprising derived and/or modified sequence from LASV(803213;Clade II)__AAF86703__GPCmut2 (opt5)
aggagagucccgcagucggcguccagcggcucugcuuguucgugugugugucguugcaggccuuauucaagcuuaccaugggccagaucauuaccuucuuucaagaggugccccacgucaucgaagagguuaugaacauugugcugaucgcccucagccugcuugcuauucugaaggggaucuacaauguggccacaugcggacucuucggccugaucuccuuucuucugcucugugggagaucuugcagcgucacguauaaaggaguguacgaacugcagacccuggagcucaacauggcgaaucugaacauguguaugccucuuuccugcacaaagaauaacucucaucacuauauuaugguuggcaaugaaaccgggcuggagcucacacugaccaacacaagcaucauuaaucauaaauucuguaaccuuuccgacgcucacaagaaaaaucuguacgaucaugcccucaugucuaucauuagcaccuuucaccuguccaucccgaacuucaaucaguaugaggccaugagcugcgacuuuaacggaggcaagauuucugugcaguacaaucugucccacagcuucgcugucgaugccgcuaaccauuguggcacgaucgccaacggggugcuccaaaccuuuaugcggauggcguggggaggcucuuauaucgcccuggacuccgggaagggaaauugggauugcauuaugacaagcuaccaguaccuuaucauucagaacaccacaugggaagaccacugucaguucucucgccccuccccuaucggcuaucuggggcuccugagccaaagaacccgggauauuuacaucucccgcagacggcgcggaacguuuacauggacccuuucugacagcgagggcaaugaagcucccggcggguauugccugacaagauggaugcucaucgaggccgagcugaaauguuucggaaacaccgcuguugccaagugcaaugaaaaacaugaugaggaauuuugcgacaugcugcgccucuucgauuucuguaagcaggcgauuaaacggcugaagaccccugcccagauguccauccagcuuauuaacaaggcugugaaugcccugaucaacgaccaacucauuaugaaaaaucaccugagagauaucaugggcauccccuacugcaacuauagccgguacugguaucuuaaucacacagucacggggaagaccucucugccucgcuguuggcucguguccaacggaagcuaccugaaugagacacauuuuucugacgacauugaacagcaggcugauaacaugaucaccgagaugcugcaaaaagaguacauggacagacagggcaagacaccgcucgggcugguggaucuuuucgucuuuagcaccuccuucuaucugauuucuaucuuucuccaccugguuaaaauucccacgcaucggcacaucgugggaaagccuugccccaaaccucaucgccugaaucacaugggcauuuguagcugcggccuuuacaagcaccccggggugccggucaaguggaaaagaugaggacuagucccuguucccagagcccacuuuuuuuucuuuuuuugaaauaaaauagccugucuuucagaucuaaaaaaaaaaaaaaaaaaaaaaaaaaaaaaaaaaaaaaaaaaaaaaaaaaaaaaaaaaaaaaaaaaaaaaaaaaaaaaaaaaaaaaaaaaaaaaaaaaaa

SEQ ID NO: 23464 - RNA, 1721 nt, Artificial Sequence
  mRNA product Design a-1 (A100) comprising derived and/or modified sequence from LASV(GA391;Clade III)__CAA36645__GPCmut2 (opt5)
aggagagucccgcagucggcguccagcggcucugcuuguucgugugugugucguugcaggccuuauucaagcuuaccaugggccagaucgugaccuucuuucaagaggucccccacguuauugaagaggugaugaacaucgugcugauugcccucagcauccuggcuauucuuaaggggcuguacaaugucgccacaugcggacucaucggccuggugacguuccuucugcucuccgggagaucuuguagccugaucuauaaaggaaccuacgaacugcagacacucgagcugaacauggaaacccuuaauaugugcaugccucuguccuguacaaagaacaauucucaucacuauauucggguuggcaacgagaccgggcucgagcugacacuuaccaauacgagcauccugaaccauaaauuuugcaaucucuccgacgcgcacaagcgcaaccuguacgaucauucucugaugagcauuaucuccaccuuccaccucagcauuccgaauuuuaaccaguaugaagcuaugucuugugacuucaauggaggcaaaaucacagugcaguacaaccugucccacagcuuugccgucgaugccgcuggccauugcgggacccuugccaauggagugcugcaaacauucaugagaauggcuuggggcgggucuuauauugcccucgacuccggacggggcaacugggauuguaucaugaccagcuaccaguaccugaucauucagaacacgacaugggacgaucacugccaguuuucucgccccuccccuaucggguaucuuggacugcucagccaaagaacccgggacauuuacaucucccgcagacggcgcggcacauucaccuggacccugucugauagcgagggcaaugaaacacccgggggauauugucugacgagauggaugcucauugaggcggagcugaagugcuuuggcaacaccgccguugcuaaguguaaugaaaaacaugacgaggaguucugcgauaugcuucggcuguuugacuucugcaagcaggccauccgcagacucaaaaccccugcucagauguccauccagcugauuaacaaggccgugaaugcgcuuaucaacgaucaacugauuaugaaaaaucaccuccgggacaucauggggauucccuacuguaacuauagccgcuacugguaucugaaucacacaucuacaggaaagaccucccugccuagaugcuggcucaucagcaacggcucuuaccugaaugaaacgaaguucagcgacgauaucgaacagcaggccgacaacaugauuacagagaugcuucaaaaagaguacaucgaucggcaggggaagaccccgcugggacucgucgaccuguuuguguucuccaccucuuuuuaucugauuagcaucuuccuucaucucgugaaaauucccacacacagacauaucgucggcaagccuugucccaaaccucaccgccugaaucauaugggcauuugcuccugugggcuguacaagcagcccggaguuccggugcgguggaaaagaugaggacuagucccuguucccagagcccacuuuuuuuucuuuuuuugaaauaaaauagccugucuuucagaucuaaaaaaaaaaaaaaaaaaaaaaaaaaaaaaaaaaaaaaaaaaaaaaaaaaaaaaaaaaaaaaaaaaaaaaaaaaaaaaaaaaaaaaaaaaaaaaaaaaaa

SEQ ID NO: 23465 - RNA, 1724 nt, Artificial Sequence
  mRNA product Design a-1 (A100) comprising derived and/or modified sequence from LASV(AV;Clade V)__CCA30314__GPCmut2 (opt5)
aggagagucccgcagucggcguccagcggcucugcuuguucgugugugugucguugcaggccuuauucaagcuuaccaugggccagaucgugaccuucuuucaagaggucccccacguuauugaagaggugaugaacaucgugcugauugcccucagcauccuggcuguccuuaaggggcuguacaauauugccacaugcggacucaucggccugaucacguuccuucugcucugugggagauccugcucuagcaaccuguauaaaggaguguacgaacugcagucccucgaccugaauauggagacccuuaacauguguaugccucugucuugcacaaagaauaacagccaucacuauauucggguuggcaaugauaccgggcucgaacugacacuuaccaacacauccauccugaaucauaaauuuuguaaccucucugacgcgcacaagaaagaucuguacgaccaugcucugaugagcauuaucuccaccuuccaccucagcauuccgaauuuuaaccaguaugaggccaugucuugcgauuucaauggaggcaagaucuccgugcaguacaaccugagccacucuuaugccauugacgcugccaaucauuguggcacggucgcuaacgggauccuucaaaccuuuaugcgcauggccuggggaggcuccuacaucgcgcuggauagcgggagaggaaacugggacugcauuaugacaucuuaccaguaucucaucauucagaauaccacaugggagaaccacugucaguucucccggcccagcccuaucggcuaccuggggcuucugucccaacgcaccagagauauuuauaucucucggcgcagacggggaacguuuacauggacccucagcgacuccgaaggcaaugccacacccggcggguacugccugacccgcuggaugcugaucgaggcugaacucaaguguuucggaaacaccgccguggcuaaaugcaaugagaagcaugaugaggaauuuugcgacaugcugagacuuuucgauuuuuguaaacaggccauuagccggcugaagucuccugcgcagauguccauccagcucauuaacaaagccguuaaugcucugaucaacgaccaacuuauuaugaagaaucaucugcgcgacaucaugggcauccccuauugcaacuacagcaaguauugguaccucaaucacacaauuacggggaaaaccucucugccuaaguguuggcuggugagcaacggauccuaccucaaugagacacacuucucugaugacaucgaacagcaggccgauaacaugauuaccgagaugcugcaaaaagaauauauggagagacagggcaagacaccgcuugggcuggucgaccucuucguguuuagcaccuccuucuaccugaucagcauuuuucugcggcuugugaaaauccccacgcaccgccauauugucggaaagccuugccccaaaccucacagacucaaucauaugggcaucuguucuugcggccuguauaagcagcccgggguuccggugcgguggaagagaugaggacuagucccuguucccagagcccacuuuuuuuucuuuuuuugaaauaaaauagccugucuuucagaucuaaaaaaaaaaaaaaaaaaaaaaaaaaaaaaaaaaaaaaaaaaaaaaaaaaaaaaaaaaaaaaaaaaaaaaaaaaaaaaaaaaaaaaaaaaaaaaaaaaaa

SEQ ID NO: 23466 - RNA, 1721 nt, Artificial Sequence
  mRNA product Design a-1 (A100) comprising derived and/or modified sequence from LASV(Togo/2016/7082;Clade VI)__AMR44577__GPCmut2 (opt5)
aggagagucccgcagucggcguccagcggcucugcuuguucgugugugugucguugcaggccuuauucaagcuuaccaugggccagaucauuaccuucuuucaagaggugccccacgucaucgaagagguuaugaacauugugcugaucgcccucagccugcuugcuauucugaaggggguguacaaugucgccacaugcggaaucaucggccucgugacguuccuguuucuuugugggagauccugcucucugauuuauaaaggaagcuacgaacuccagacccuggagcugaacauggaaacacucaauauguguaugccucuguccugcaccaagaacucuagccaucacuauauccggguuggcaaugagacagggcuugagcugacccucacaaacaccuccauuaucaaucauaaauucuguaaccugucugacgcgcacaagcgcaaucuuuacgaucaugcucugaugagcauucucuccacguuucaccugagcaucccgaacuucaaucaguaugaagccaugucuugcgacuuuaacggaggcaaaauuuccgugcaguacaaucugagccacgccuaugcugucgaugccgcugagcauuguggcaccguggccaacgggguucuccaaacauucaugagaauggcguggggaggcucuuacaucgcccuggacuccgggcggggaaauugggauugcaucaugaccagcuaccaguaucuuauuauccagaacacaaccugggaagaccacugucaguuuucucgccccuccccuauuggcuaccuggggcuccugagccaaagaacgcgggauaucuauauuucccgcagacggcgcggaacauucaccuggacacuuucugacagcgagggcaacgagacccccggcggguacugccugaccagauggaugcucaucgaagcugagcugaaguguuuuggaaauacagccguggcuaagugcaacgaaaaacaugaugaggaguucugcgacaugcugcggcucuuugauuucuguaagcaggccauccagcgccugaaauccccugcgcagaugagcauucaacuuaucaauaaggccgucaacgcucugauuaaugaccagcucaucaugaaaaaccaccugagagauaugaugggcauucccuauugcaauuacucuaaguauugguaccuuaaccacacguccagcgggcggaccucucugccuaaguguuggcucgugagcaauggauccuaccugaacgaaacacauuucucugacgacaucgagcagcaagccgauaauaugaucaccgaaaugcugcagaaagaguauauugaccgccagggcaagacaccgcucgggcugguggaucuuuuugucuucagcaccuccuuuuaccugaucagcauuuuccuccaccugaucaaaauucccacgcauagacacaucguuggaaagccuugccccaaaccucaucggcugaaccacaugggcauuuguucuugcggccuuuauaagcagcccggggugccgacaagauggaaacgcugaggacuagucccuguucccagagcccacuuuuuuuucuuuuuuugaaauaaaauagccugucuuucagaucuaaaaaaaaaaaaaaaaaaaaaaaaaaaaaaaaaaaaaaaaaaaaaaaaaaaaaaaaaaaaaaaaaaaaaaaaaaaaaaaaaaaaaaaaaaaaaaaaaaaa

SEQ ID NO: 23467 - RNA, 1721 nt, Artificial Sequence
  mRNA product Design a-1 (A100) comprising derived and/or modified sequence from LASV(KAK-428;Clade n.d. (VII))__ANH09740__GPCmut2 (opt5)
aggagagucccgcagucggcguccagcggcucugcuuguucgugugugugucguugcaggccuuauucaagcuuaccaugggccagaucgugaccuucuuucaagaggucccccacguuauugaagaggugaugaacaucgugcugauugcccucagccugcuugcuauccugaaggggcucuacaauuucgccacaugcggagucauuggccugaucacguuucuucugcucugugggagauccugcucugcgaccuauaaaggacaguacgaacugcagacacuggagcucaacauggaaagccugaauauguguaugccucuuuccugcaccaagaacaauucucaucacuauauccgggcuggcaacaauacagggcuggagcucacccugacaaacaccagcauuaucucccauaaauucuguaaucuuucugacgcccacaagaaaaaccuguacgaucauacgcucaugagcauuaucaccacauuucaccuguccauuccgaauuucaaccaguaugaggccaugagcugcgacuuuaauggaggcaagaucucuauucaauacaaccugucccacagcuaugcuggcgaugccgcucagcauugugggaccguggccaauggaguucuccagacauucaugcgcauggcguggggcgggucuuaccuggcccuugacuccggaagacggggcugggauugcaucaucagcucuuaccaguaucugauuauccaaaacaccacgugggacgaucacugucaguuuucccgccccagcccuauuggguaccucggauucgugucccagaagacaagagacaucuauauuucucggcgcagacggggcaccuuuacauggacccugagcgauuccgaaggccaugacaugcccgggggauacugccuuacccgcuggaugcugaucgaggcugaucucaaauguuucggcaacacagccgucgcuaagugcaaugaaaaacacgacgaggaguuuugcgauauguggagacuguucgacuucuguaagcaggccauccaacggcugaaagcgccugcccagaugaacauucagcucaucaauaaggcugugaacgcccugauuaaugaccaacuuaugaugaagaaccaucugcgcgauaucauggggauucccuauugcaauuacagcaaauuuugguaucucaacaauacgaccacaggaagaaccucucugccucgguguuggcuuaucuccaacggcagcuaccugaaugaaacacacuucucugacgauaucgagcagcaggcugacaacaugauuaccgaaaugcuccagaaggaguacauggaucgccaagggaaaacgccgcugggacugguugaccucuuuguguucagcacauccuuuuaucugaucaccauuuuccuucaccuggucaagauccccacccauagacacauugugggcaaaccuugccccaagccucaucggcucaaucacaugggcaucuguucuugcgggcuguacaaacagcccggagugccggucagauggaagcgcugaggacuagucccuguucccagagcccacuuuuuuuucuuuuuuugaaauaaaauagccugucuuucagaucuaaaaaaaaaaaaaaaaaaaaaaaaaaaaaaaaaaaaaaaaaaaaaaaaaaaaaaaaaaaaaaaaaaaaaaaaaaaaaaaaaaaaaaaaaaaaaaaaaaaa

SEQ ID NO: 23468 - RNA, 1721 nt, Artificial Sequence; identical to SEQ ID NO: 23462
  mRNA product Design a-1 (A100) comprising derived and/or modified sequence from LASV(Pinneo-NIG-1969;Clade I)__AIT17836__GPCmut2 (opt5)

SEQ ID NO: 23469 - RNA, 1721 nt, Artificial Sequence
  mRNA product Design a-1 (A100) comprising derived and/or modified sequence from LASV(ISTH0009-NIG-2011;Clade II)__AIT17404__GPCmut2 (opt5)
aggagagucccgcagucggcguccagcggcucugcuuguucgugugugugucguugcaggccuuauucaagcuuaccaugggccagaucauuaccuucuuucaagaggugccccacgucaucgaagagguuaugaacauugugcugaucgcccucagccugcuugcuauucugaaggggaucuacaauguggccacaugcggacucuucggccuggucuccuuucuucugcucugugggagaucuugcagcacgaccuauaaaggaguguacgaacugcagacacuggagcucgacauggcgucccugaacauguguaugccucuuucuugcaccaagaauaacagccaucacuauaucaugguuggcaaugaaacagggcuggagcucacccugacaaacaccuccauuaucaaucauaaauucuguaaccuuucugaugcucacaagaaaaaucuguacgaccaugcccucaugagcauuaucuccacguuucaccugagcauuccgaacuucaaucaguaugaggccaugucuugcgauuuuaacggaggcaagaucuccgugcaguacaaucugagccacgcuuaugccgucgacgcugccaaccauuguggcaccauugcgaauggggugcuccaaacauucaugcggauggccuggggaggcucuuacaucgcucuggauuccgggaagggaagcugggacugcaucaugaccucuuaccaguaucuuauuauccagaacacaaccugggaagaucacugucaguuuucccgccccagcccuauuggcuaccuggggcuccugucccaaagaacgcgggacaucuauauuucucgcagacggcgcggaacauucaccuggacacuuagcgauuccgagggcaacgaaacccccggcggguacugccugaccagauggaugcucaucgaggccgagcugaaauguuuuggaaauacagcuguugccaagugcaacgaaaaacaugacgaggaguucugcgauaugcugcggcucuuugacuucuguaagcaggcgauccgcagacugaaaacgccugcccagaugagcauucagcuuaucaauaaggcugugaacgcccugauuaaugaucaacucaucaugaagaaccaucugcgggacauuaugggcauccccuauugcaauuacucuaaauauugguaccuuaaccacaccgucacagggaagaccucccugccucgcuguuggcucgugagcaauggaucuuaccugaacgaaacacacuucagcgacgauaucgaacagcaggcugacaauaugauuaccgagcugcuccaaaaagaguauauggauagacagggcaagacgccgcuggggcuuguggaccuguuugucuucuccacaucuuuuuaccucaucagcauuuuccugcaccugaucaaaauucccacccaucggcacaucaccggaaagccuugccccaaaccucaucgccuuaaccacaugggcauuuguuccugcggccucuauaagcaccccgggguuccggugaaguggaaaagaugaggacuagucccuguucccagagcccacuuuuuuuucuuuuuuugaaauaaaauagccugucuuucagaucuaaaaaaaaaaaaaaaaaaaaaaaaaaaaaaaaaaaaaaaaaaaaaaaaaaaaaaaaaaaaaaaaaaaaaaaaaaaaaaaaaaaaaaaaaaaaaaaaaaaa

SEQ ID NO: 23470 - RNA, 1721 nt, Artificial Sequence
  mRNA product Design a-1 (A100) comprising derived and/or modified sequence from LASV(ISTH2010-NIG-2012;Clade II)__AIT17482__GPCmut2 (opt5)
aggagagucccgcagucggcguccagcggcucugcuuguucgugugugugucguugcaggccuuauucaagcuuaccaugggccagaucauuaccuucuuucaagaggugccccacgucaucgaagagguuaugaacauugugcugaucgcccucagccugcuugcuauucugaaggggaucuacaauguggccacaugcggacucuucggccuggucuccuuucuucugcucugugggagaucuugcagcacgaccuauaaaggaguguacgaacugcagacacuggagcucgacauggcgucccugaacauguguaugccucuuucuugcaccaagaauaacagccaucacuauaucaugguuggcaaugaaacagggcuggagcucacccugacaaacaccuccauuaucaaucauaaauucuguaaccuuucugaugcucacaagaaaaaucuguacgaccaugcccucaugagcauuaucuccacguuucaccugagcauuccgaacuucaaucaguaugaggccaugucuugcgauuuuaacggaggcaagaucuccgugcaguacaaucugagccacgcuuaugccgucgacgcugccaaccauuguggcaccauugcgaauggggugcuccaaacauucaugcggauggccuggggaggcucuuacaucgcucuggauuccgggaagggaagcugggacugcaucaugaccucuuaccaguaucuuauuauccagaacauuacaugggaagaucacugucaguuuucccgccccagcccuaucggcuaccuggggcuccugucccaaagaacccgggacauuuauaucucucgcagacggcgcggaacguucacauggacccuuagcgauuccgagggcaacgaaacacccggcggguacugccugaccagauggaugcucaucgaggccgagcugaaauguuuuggaaauaccgcuguugccaagugcaacgaaaaacaugacgaggaguucugcgauaugcugcggcucuuugacuucuguaagcaggcgauucgcagacugaaaacgccugcccagaugagcauccagcuuauuaauaaggcugugaacgcccugaucaaugaucaacucauuaugaagaaccaucugcgggacaucaugggcauccccuauugcaauuacucuaaauauugguaccuuaaccacacagucaccgggaagacaucccugccucgcuguuggcucgugagcaauggaucuuaccugaacgaaacccacuucagcgacgauauugaacagcaggcugacaauaugaucacagagcugcuccaaaaagaguauauugauagacagggcaagaccccgcuggggcuuguggaccuguuugucuucuccacgucuuuuuaccucaucagcauuuuccugcaccugguuaaaauccccacacaucggcacguggugggaaagccuugccccaaaccucaucgccuuaaccacaugggcauuuguuccugcggccucuauaagcaccccggggucccggugaaguggaaaagaugaggacuagucccuguucccagagcccacuuuuuuuucuuuuuuugaaauaaaauagccugucuuucagaucuaaaaaaaaaaaaaaaaaaaaaaaaaaaaaaaaaaaaaaaaaaaaaaaaaaaaaaaaaaaaaaaaaaaaaaaaaaaaaaaaaaaaaaaaaaaaaaaaaaaa

SEQ ID NO: 23471 - RNA, 1721 nt, Artificial Sequence
  mRNA product Design a-1 (A100) comprising derived and/or modified sequence from LASV(Lassa virus/H.sapiens-wt/NGA/2015/ISTH_0543;Clade II)__AVO03639__GPCmut2 (opt5)
aggagagucccgcagucggcguccagcggcucugcuuguucgugugugugucguugcaggccuuauucaagcuuaccaugggccagaucauuaccuucuuucaagaggugccccacgucaucgaagagguuaugaacauugugcugaucgcccucagccugcuugcuauucugaaggggaucuacaauguggccacaugcggacucuucggccuggucuccuuucuucugcucugugggagaucuugcagcacgaccuauaaaggaguguacgaacugcagacacuggagcucgacauggcgaaccugaauauguguaugccucuuuccugcaccaagaacaauucucaucacuauaucaugguuggcaacgaaacagggcuggagcucacccugacaaauaccagcauuaucaaccauaaauucuguaaucuuuccgaugcucacaagaaaaaccuguacgaccaugcccucaugucuauuaucagcacguuucaccuguccauuccgaauuucaaccaguaugaggccaugagcugcgauuuuaauggaggcaagaucucugugcaguacaaccugucccacaccuaugcugucgacgccgcuaaucauuguggcacaauugccaacggggugcuccaaaccuucaugcggauggcguggggaggcagcuacaucgcccuggauucugggaagggauccugggacugcaucaugacaagcuaccaguaucuuguuauucagaacaccacgugggaagaucacugucaguuuucucgccccuccccuaucggcuaccuggggcuccugagccaaagaacacgggacauuuauaucucccgcagacggcgcggaaccuucacauggacccuuucugauagcgagggcaaugaaacccccggcggguacugccugacaagauggaugcucauugaggcugagcugaaauguuuuggaaacacggccguggcuaagugcaaugaaaaacaugacgaggaguucugcgauaugcugcggcucuuugacuucuguaagcaggccauccgcagacugaaaaccccugcgcagauguccauccagcuuauuaacaaggccgucaaugcucugaucaacgaucaacucauuaugaagaaucaucugcgggacaucaugggcauucccuauugcaacuacagcaaauauugguaccuuaaucacacagugaccgggaagacaucucugccucgcuguuggcucguguccaacggaagcuaccugaaugaaacccacuucucugacgauaucgaacagcaggccgacaacaugaucacggagcugcuccaaaaagaguauauugauagacagggcaagacaccgcuggggcuugucgaccuguuuguuuucagcaccuccuuuuaccucaucucuauuuuccugcaccuggugaaaauccccacccaucggcacauuacaggaaagccuugccccaaaccucaucgccuuaaucacaugggcaucuguagcugcggccucuauaagcaccccggggugccggucaaguggaaaagaugaggacuagucccuguucccagagcccacuuuuuuuucuuuuuuugaaauaaaauagccugucuuucagaucuaaaaaaaaaaaaaaaaaaaaaaaaaaaaaaaaaaaaaaaaaaaaaaaaaaaaaaaaaaaaaaaaaaaaaaaaaaaaaaaaaaaaaaaaaaaaaaaaaaaa

SEQ ID NO: 23472 - RNA, 1721 nt, Artificial Sequence
  mRNA product Design a-1 (A100) comprising derived and/or modified sequence from LASV(Lassa virus/H.sapiens-wt/NGA/2016/ISTH_0009;Clade II)__AVO03571__GPCmut2 (opt5)
aggagagucccgcagucggcguccagcggcucugcuuguucgugugugugucguugcaggccuuauucaagcuuaccaugggccagaucauuaccuucuuucaagaggugccccacgucaucgaagagguuaugaacauugugcugaucgcccucagccugcuugcuauucugaaggggaucuacaauguggccacaugcggacuccugggccuugucuccuuccugcuccugugugggagaucuugcagcacgaccuauaaaggaguguacgaacugcagacacucgagcuggacauggcgucccuuaacauguguaugccucugucuugcaccaagaauaacagccaucacuauaucaugguuggcaaugaaacagggcucgagcugacccuuacaaacaccuccauuaucaaucauaaauuuuguaaccugucugaugcucacaagaaaaaucucuacgaccaugcccugaugagcauuaucuccacguuccaccugagcauuccgaacuuuaaucaguaugaggccaugucuugcgauuucaacggaggccggaucuccgugcaguacaaucucagccacucuuaugcugucgacgccgcuaaccauuguggcaccauugccaauggggugcugcaaacauuuaugcgcauggcguggggaggcuccuacaucgcccuugauagcgggaagggaucuugggacugcaucaugaccuccuaccaguaucugauuauccagaacacaaccugggaagaucacugucaguucagcagacccuccccuauuggcuaccucgggcugcuuucucaacggacgcgcgacaucuauauuagcagacggcgcagaggaacauuuaccuggacacuguccgauagcgagggcaacgaaacccccggcggguacugccucacccgguggaugcugaucgaggcugagcugaaguguuucggaaauacagccguugcuaaaugcaacgaaaagcaugacgaggaauuuugcgauaugcuccgccuguucgacuuuuguaaacaggccaucagacggcuuaagacgccugcgcagaugucuauucagcugaucaauaaagccgugaacgcucucauuaaugaucaacugaucaugaagaaccaccuucgcgacauuaugggcauccccuauugcaauuacuccaaguauugguaccugaaccacaccgucacagggaaaaccagccucccuagauguuggcuggugucuaauggaagcuaccugaacgagacacauuucuccgacgauaucgaacagcaggccgacaauaugauuaccgagcuccugcaaaaggaguauaucgaucggcagggcaaaacgccgcuugggcugguggaccucuucgucuuuucuaccagcuucuaccugauuuccaucuuucugcaccuuguuaagauucccacacaucgccacaucaccggaaaaccuugccccaagccucauagacucaaccacaugggcauuuguagcugcggccuguauaaucaccccggggugccggugaaauggaagcggugaggacuagucccuguucccagagcccacuuuuuuuucuuuuuuugaaauaaaauagccugucuuucagaucuaaaaaaaaaaaaaaaaaaaaaaaaaaaaaaaaaaaaaaaaaaaaaaaaaaaaaaaaaaaaaaaaaaaaaaaaaaaaaaaaaaaaaaaaaaaaaaaaaaaa

SEQ ID NO: 23473 - RNA, 1721 nt, Artificial Sequence
  mRNA product Design a-1 (A100) comprising derived and/or modified sequence from LASV(Lassa virus/H.sapiens-wt/NGA/2016/ISTH_0017;Clade II)__AVO03567__GPCmut2 (opt5)
aggagagucccgcagucggcguccagcggcucugcuuguucgugugugugucguugcaggccuuauucaagcuuaccaugggccagaucauuaccuucuuucaagaggugccccacgucaucgaagagguuaugaacauugugcugaucgcccucagccugcuugcuauucugaaggggaucuacaauguggccacaugcggacucuucggccuggucuccuuucuucugcucugugggagaucuugcagcacgaccuauaaaggaguguacgaacugcagacacuggagcucgacauggcgucccugaacauguguaugccucuuucuugcaccaagaauaacagccaucacuauaucaugguuggcaaugaaacagggcuggagcucacccugacaaacaccuccauuaucaaucauaaauucuguaaccuuucugaugcucacaagaaaaaucuguacgaccaugcccucaugagcauuaucuccacguuucaccugagcauuccgaacuucaaucaguaugaggccaugucuugcgauuuuaacggaggcaagaucuccgugcaguacaaucugagccacaccuaugcuauugacgccgcuaaccauuguggcacaaucgccaaugggguccuccaaaccuucaugcggauggcguggggaggcucuuacaucgcccuggauuccgggaagggaagcugggacugcauuaugacaucuuaccaguaucuuaucauucagaacaccacgugggaagaucacugucaguuuucccgccccagcccuaucggcuaccuggggcuccugucccaaagaacacgggacauuuauaucucucgcagacggcgcggaaccuucacauggacccuuagcgauuccgagggcaacgaaacccccggcggguacugccugacaagauggaugcucaucgaggcugagcugaaauguuuuggaaauacggccguggcuaagugcaacgaaaaacaugacgaggaguucugcgauaugcugcggcucuuugacuucuguaagcaggccauucgcagacugaaaaccccugcgcagaugagcauccagcuuauuaauaaggccguuaacgcucugaucaaugaucaacucauuaugaagaaccaucugcgggacaucaugggcauccccuauugcaauuacucuaaauauugguaccuuaaccacacagugaccgggaagacaucccugccucgcuguuggcucgucagcaauggaucuuaccugaacgaaacccacuucagcgacgauauugaacagcaggccgacaauaugaucacggagcugcuccaaaaagaguauauggauagacagggcaagacaccgcuggggcuuguggaccuguuuguguucuccaccucuuuuuaccucauuagcaucuuccugcaccugguccggauucccacccaucgccacguuaucggaaaaccuugccccaagccucauagacuuaaccacaugggcauuuguuccugcggccucuauaaacaccccggggugccggugaaguggaagcggugaggacuagucccuguucccagagcccacuuuuuuuucuuuuuuugaaauaaaauagccugucuuucagaucuaaaaaaaaaaaaaaaaaaaaaaaaaaaaaaaaaaaaaaaaaaaaaaaaaaaaaaaaaaaaaaaaaaaaaaaaaaaaaaaaaaaaaaaaaaaaaaaaaaaa

SEQ ID NO: 23474 - RNA, 1721 nt, Artificial Sequence
  mRNA product Design a-1 (A100) comprising derived and/or modified sequence from LASV(Lassa virus/H.sapiens-wt/NGA/2018/ISTH_0959;Clade II)__AVV65099__GPCmut2 (opt5)
aggagagucccgcagucggcguccagcggcucugcuuguucgugugugugucguugcaggccuuauucaagcuuaccaugggccagaucauuaccuucuuucaagaggugccccacgucaucgaagagguuaugaacauugugcugaucgcccucagccugcuugcuauucugaaggggaucuacaauguggucacaugcggacucuucggccugguguccuuucuucugcucugugggagaucuugcagcacgaccuauaaaggaguuuacgaacugcagacacuggagcucgacauggccucccugaacauguguaugccucuuucuugcaccaagaauaacagccaucacuauaucauggugggcaaugaaacagggcuggagcucacccugacaaacaccuccauuaucaaucauaaauucuguaaccuuucugaugcgcacaagaaaaaucuguacgaccaugcucucaugagcauuaucuccacguuucaccugagcauuccgaacuucaaucaguaugaggccaugucuugcgauuuuaacggaggcaagaucuccguccaguacaaucugagccacgccuaugcuauugacgccgcuaaccauuguggcaccaucgccaauggggugcuccaaacauucaugcggauggcguggggaggcucuuacaucgcccuggauuccgggaagggaagcugggacugcauuaugaccucuuaccaguaucuuaucauucagaacacaaccugggaagaucacugucaguuuucccgccccagcccuaucggcuaccuggggcuccugucccaaagaacgcgggacauuuauaucucucgcagacggcgcggaacauucaccuggacacuuagcgauuccgagggcaacgaaacccccggcggguacugccugaccagauggaugcucaucgaggcugagcugaaauguuuuggaaauacagccguugcuaagugcaacgaaaaacaugacgaggaguucugcgauaugcugcggcucuuugacuucuguaagcaggccauucgcagacugaaaacgccugcgcagaugagcauccagcuuauuaauaaggccgugaacgcucugaucaaugaucaacucauuaugaagaaccaucugcgggacaucaugggcauccccuauugcaauuacucuaaauauugguaccuuaaccacaccgucacagggaagaccucccugccucgcuguuggcucgugagcaauggaucuuaccugaacgaaacacacuucagcgacgauauugaacagcaggccgacaauaugaucaccgagcugcuccaaaaagaguauauugauagacagggcaagacgccgcuggggcuuguggaccuguuugucuucuccacaucuuuuuaccucaucagcauuuuccugcaccugguuaaaauccccacccaucggcacgugauuggaaagccuugccccaaaccucaucgccuuaaccacaugggcaucuguuccugcggccucuauaagcaccccggggugccggucaaguggaaaagaugaggacuagucccuguucccagagcccacuuuuuuuucuuuuuuugaaauaaaauagccugucuuucagaucuaaaaaaaaaaaaaaaaaaaaaaaaaaaaaaaaaaaaaaaaaaaaaaaaaaaaaaaaaaaaaaaaaaaaaaaaaaaaaaaaaaaaaaaaaaaaaaaaaaaa

SEQ ID NO: 23475 - RNA, 1721 nt, Artificial Sequence
  mRNA product Design a-1 (A100) comprising derived and/or modified sequence from LASV(LASV003-NIG-2008;Clade II)__AIT17580__GPCmut2 (opt5)
aggagagucccgcagucggcguccagcggcucugcuuguucgugugugugucguugcaggccuuauucaagcuuaccaugggccagaucauuaccuucuuucaagaggugccccacgucaucgaagagguuaugaacauugugcugaucgcccucagccugcuugcuauucugaaggggaucuacaauguggccacaugcggacucuucggccuggucuccuuucuucugcucugugggagaucuugcagcacgaccuauaaaggaguguacgaacugcagacacuggagcucgacauggcgucccugaacauguguaugccucuuucuugcaccaagaauaacagccaucacuauaucaugguuggcaaugaaacagggcuggagcucacccugacaaacaccuccauuaucaaucauaaauucuguaaccuuucugaugcucacaagaaaaaucuguacgaccaugcccucaugagcauuaucuccacguuucaccugagcauuccgaacuucaaucaguaugaggccaugucuugcgauuuuaacggaggcaagaucuccgugcaguacaaucugagccacaccuaugcugucgacgccgcuaaccauuguggcacaauugccaauggggugcuccaaaccuucaugcggauggcguggggaggcucuuacaucgcccuggauuccgggaagggaagcugggacugcaucaugacaucuuaccaguaucuuauuauccagaacaccacgugggaagaucacugucaguuuucccgccccagcccuauuggcuaccuggggcuccugucccaaagaacacgggacaucuauauuucucgcagacggcgcggaaccuucacauggacccuuagcgauuccgagagcaacgaaacccccggcggcuacugccugacaagauggaugcucaucgaggcugagcugaaauguuuugggaauacggccguugcuaagugcaacgaaaaacaugacgaggaguucugcgauaugcugcggcucuuugacuucuguaagcaggccauccgcagacugaaagcgccugcccagaugucuauucagcuuaucaauaaggcugugaacgcccugauuaaugaucaacucaucaugaagaaccaucugcgggacauuaugggaauccccuauugcaauuacuccaaauauugguaccuuaaccacaccgucacaggccgcaccagccugccuagauguuggcucgugucuaaugggagcuaccugaacgaaacacacuucuccgacgauaucgaacagcaggcugacaauaugauuaccgagcugcuccaaaaggaguauauggaucggcagggaaaaacgccgcugggccuuguggaccuguuugucuucucuaccagcuuuuaccucaucuccauuuuccugcaccugguuaagauccccacacaucgccacgugauugggaaaccuugccccaagccucauagacuuaaccacaugggaaucuguagcugcggccucuauaaacaccccggcgugccggucaaguggaagcggugaggacuagucccuguucccagagcccacuuuuuuuucuuuuuuugaaauaaaauagccugucuuucagaucuaaaaaaaaaaaaaaaaaaaaaaaaaaaaaaaaaaaaaaaaaaaaaaaaaaaaaaaaaaaaaaaaaaaaaaaaaaaaaaaaaaaaaaaaaaaaaaaaaaaa

SEQ ID NO: 23476 - RNA, 1721 nt, Artificial Sequence
  mRNA product Design a-1 (A100) comprising derived and/or modified sequence from LASV(LASV035-NIG-2009;Clade II)__AIT17588__GPCmut2 (opt5)
aggagagucccgcagucggcguccagcggcucugcuuguucgugugugugucguugcaggccuuauucaagcuuaccaugggccagaucauuaccuucuuucaagaggugccccacgucaucgaagagguuaugaacauugugcugaucgcccucagccugcuugcuauucugaaggggaucuacaauguggccacaugcggacucuucggccuggucuccuuucuucugcucugugggagaucuugcagcacgaccuauaaaggaguguacgaacugcagacacuggagcucgacauggcgucccugaacauguguaugccucuuucuugcaccaagaauaacagccaucacuauaucaugguuggcaaugaaacagggcuggagcucacccugacaaacaccuccauuaucaaucauaaauucuguaaccuuucugaugcucacaagaaaaaucuguacgaccaugcccucaugagcauuaucuccacguuucaccugagcauuccgaacuucaaucaguaugaggccaugucuugcgauuuuaacggaggcaagaucuccgugcaguacaaucugagccacgcuuaugccgucgacgcugccaaccauuguggcaccauugcgaauggggugcuccaaacauucaugcggauggccuggggaggcucuuacaucgcucuggauuccgggaagggaagcugggacugcaucaugaccucuuaccaguaucuuauuauccagaacacaaccugggaagaucacugucaguuuucccgccccagcccuauuggcuaccuggggcuccugucccaaagaacgcgggacaucuauauuucucgcagacggcgcggaacauucaccuggacacuuagcgauuccgagggcaacgaaacccccggcggguacugccugaccagauggaugcucaucgaggccgagcugaaauguuuuggaaauacagcuguugccaagugcaacgaaaaacaugacgaggaguucugcgauaugcugcggcucuuugacuucuguaagcaggcgauccgcagacugaaagccccugcucagaugagcauucagcuuaucaauaaggccgugaacgcucugauuaaugaucaacucaucaugaagaaccaucugcgggacauuaugggcauccccuauugcaauuacucuaaauauugguaccuuaaccacacggucaccgggaagacaucccugccucgcuguuggcucgugagcaauggaucuuaccugaacgaaacccacuucagcgacgauaucgaacagcaggccgacaauaugauuacagagcugcuccaaaaagaguauaucgauagacagggcaagaccccgcuggggcuuguggaccuguuugucuucuccacgucuuuuuaccucauuagcaucuuccugcaccugguuaaaauucccacacaucggcacgugaucggaaagccuugccccaaaccucaucgccuuaaccacaugggcauuuguuccugcggccucuauaagcaccccggggugccggucaaguggaaaagaugaggacuagucccuguucccagagcccacuuuuuuuucuuuuuuugaaauaaaauagccugucuuucagaucuaaaaaaaaaaaaaaaaaaaaaaaaaaaaaaaaaaaaaaaaaaaaaaaaaaaaaaaaaaaaaaaaaaaaaaaaaaaaaaaaaaaaaaaaaaaaaaaaaaaa

SEQ ID NO: 23477 - RNA, 1721 nt, Artificial Sequence
  mRNA product Design a-1 (A100) comprising derived and/or modified sequence from LASV(LASV1000-NIG-2009;Clade II)__AIT17782__GPCmut2 (opt5)
aggagagucccgcagucggcguccagcggcucugcuuguucgugugugugucguugcaggccuuauucaagcuuaccaugggccagaucauuaccuucuuucaagaggugccccacgucaucgaagagguuaugaacauugugcugaucgcccucagccugcuugcuauucugaaggggaucuacaauguggccacaugcggacucuucggccuggucuccuuucuucugcucugugggagaucuugcagcacgaccuauaaaggaguguacgaacugcagacacuggagcucgacauggcgucccugaacauguguaugccucuuucuugcaccaagaauaacagccaucacuauaucaugguuggcaaugaaacagggcuggagcucacccugacaaacaccuccauuaucaaucauaaauucuguaaccuuucugaugcucacaagaaaaaucuguacgaccaugcccucaugagcauuaucuccacguuucaccugagcauuccgaacuucaaucaguaugaggccaugucuugcgauuuuaacggaggcaagaucuccgugcaguacaaucugagccacaccuaugcugucgacgccgcuaaccauuguggcacaauugccaauggggugcuccaaaccuucaugcggauggcguggggaggcucuuacaucgcccuggauuccgggaagggaagcugggacugcaucaugacaucuuaccaguaucuuauuauccagaacaccacgugggaagaucacugucaguuuucccgccccagcccuauuggcuaccuggggcuccugucccaaagaacacgggacaucuauauuucucgcagacggcgcggaaccuucacauggacccuuagcgauuccgagggcaacgaaacccccggcggguacugccugacaagauggaugcucaucgaggcugagcugaaauguuuuggaaauacggccguugcuaagugcaacgaaaaacaugacgaggaguucugcgauaugcugcggcucuuugacuucuguaagcaggccaucaaacgccugaagaccccugcgcagaugagcauucagcuuaucaauaaggccgugaacgcucugauuaaugaucaacucaucaugaaaaaccaccugagagacauuaugggcauccccuauugcaauuacucuaaguauugguaccuuaaccacacagucaccgggaaaacaucccugccucgguguuggcucgugagcaauggaucuuaccugaacgaaacccauuucagcgacgauaucgaacagcaggccgacaauaugauuacggagcugcuccaaaaggaguauaucgaucgccagggcaaaacaccgcuggggcuuguggaccuguuugucuucuccaccucuuuuuaccucauuagcaucuuccugcaccugguuaagauucccacccauagacacguggugggaaaaccuugccccaagccucaucggcuuaaccacaugggcaucuguuccugcggccucuauaagcaccccggggucccggugaaauggaagcgcugaggacuagucccuguucccagagcccacuuuuuuuucuuuuuuugaaauaaaauagccugucuuucagaucuaaaaaaaaaaaaaaaaaaaaaaaaaaaaaaaaaaaaaaaaaaaaaaaaaaaaaaaaaaaaaaaaaaaaaaaaaaaaaaaaaaaaaaaaaaaaaaaaaaaa

SEQ ID NO: 23478 - RNA, 1721 nt, Artificial Sequence
  mRNA product Design a-1 (A100) comprising derived and/or modified sequence from LASV(LASV221-NIG-2010;Clade II)__AIT17624__GPCmut2 (opt5)
aggagagucccgcagucggcguccagcggcucugcuuguucgugugugugucguugcaggccuuauucaagcuuaccaugggccagaucauuaccuucuuucaagaggugccccacgucaucgaagagguuaugaacauugugcugaucgcccucagccugcuugcuauucugaaggggaucuacaauguggccacaugcggacucuucggccuggucuccuuucuucugcucugugggagaucuugcagcacgaccuauaaaggaguguacgaacugcagacacuggagcucgacauggcgucccugaacauguguaugccucuuucuugcaccaagaauaacagccaucacuauaucaugguuggcaaugaaacagggcuggagcucacccugacaaacaccuccauuaucaaucauaaauucuguaaccuuucugaugcucacaagaaaaaucuguacgaccaugcccucaugagcauuaucuccacguuucaccugagcauuccgaacuucaaucaguaugaggccaugucuugcgauuuuaacggaggcaagaucuccgugcaguacaaucugagccacaccuaugcuauugacgccgcuaaccauuguggcacaaucgccaaugggguccuccaaaccuucaugcggauggcguggggaggcucuuacaucgcccuggauuccgggaagggaagcugggacugcauuaugacaucuuaccaguaucuuaucauucagaacaccacgugggaagaucacugucaguuuucccgccccagcccuaucggcuaccuggggcuccugucccaaagaacacgggacauuuauaucucucgcagacggcgcggaaccuucacauggacccuuagcgauuccgagggcaacgaaacccccggcggguacugccugacaagauggaugcucaucgaggcugagcugaaauguuuuggaaauacggccguggcuaagugcaacgaaaaacaugacgaggaguucugcgauaugcugcggcucuuugacuucuguaagcaggccauucgcagacugaaaaccccugcgcagaugagcauccagcuuauuaauaaggccguuaacgcucugaucaaugaucaacucauuaugaagaaccaucugcgggacaucaugggcauccccuauugcaauuacucuaaauauugguaccuuaaccacacagugaccgggaagacaucccugccucgcuguuggcucgucagcaauggaucuuaccugaacgaaacccacuucagcgacgauauugaacagcaggccgacaauaugaucacggagaugcugcaaaaagaguauauggauagacagggcaagacaccgcucgggcugguggaccuuuuuguguucuccaccucuuuuuaccugauuagcaucuuccuccaccuggucaaaauucccacccaucggcacguuaucggaaagccuugccccaaaccucaucgccugaaccacaugggcauuuguuccugcggccuuuauaagcaccccggggugccggugaaguggaaaagaugaggacuagucccuguucccagagcccacuuuuuuuucuuuuuuugaaauaaaauagccugucuuucagaucuaaaaaaaaaaaaaaaaaaaaaaaaaaaaaaaaaaaaaaaaaaaaaaaaaaaaaaaaaaaaaaaaaaaaaaaaaaaaaaaaaaaaaaaaaaaaaaaaaaaa

SEQ ID NO: 23479 - RNA, 1721 nt, Artificial Sequence
  mRNA product Design a-1 (A100) comprising derived and/or modified sequence from LASV(LASV237-NIG-2010;Clade II)__AIT17638__GPCmut2 (opt5)
aggagagucccgcagucggcguccagcggcucugcuuguucgugugugugucguugcaggccuuauucaagcuuaccaugggccagaucauuaccuucuuucaagaggugccccacgucaucgaagagguuaugaacauugugcugaucgcccucagccugcuugcuauucugaaggggaucuacaauguggccacaugcggacucuucggccuggucuccuuucuucugcucugugggagaucuugcagcacgaccuauaaaggaguguacgaacugcagacacuggagcucgacauggcgucccugaacauguguaugccucuuucuugcaccaagaauaacagccaucacuauaucaugguuggcaaugaaacagggcuggagcucacccugacaaacaccuccauuaucaaucauaaauucuguaaccuuucugaugcucacaagaaagaccuguacgaucaugcccucaugagcauuaucuccacguuucaccugagcauuccgaauuucaaccaguaugaggccaugucuugcgacuuuaauggaggcaagaucuccgugcaguacaaccugagccacaccuaugcugucgaugccgcuaaucauuguggcacaauugccaacggggugcuccaaaccuucaugcggauggcguggggaggcucuuacaucgcccuggacuccgggaagggaagcugggauugcaucaugacaucuuaccaguaucuuauuauccagaauaccacgugggaagaccacugucaguuuucccgccccagcccuauuggcuaccuggggcuccugucccaaagaacacgggauaucuauauuucucgcagacggcgcggaaccuucacauggacccuuagcgacuccgagggcaacgaaacccccggcggguacugccugacaagauggaugcucaucgaggcugagcugaaauguuuuggaaacacggccguugcuaagugcaaugaaaaacaugaugaggaguucugcgacaugcugcggcucuuugauuucuguaagcaggccauccgcagacugaaaaccccugcgcagaugagcauucagcuuaucaacaaggccgugaaugcucugauuaacgaccaacucaucaugaagaaucaucugcgggacauuaugggcauccccuauugcaacuacucuaaauauugguaccuuaaucacacagucaccgggaagacaucccugccucgcuguuggcucgugagcaacggaucuuaccugaaugaaacccacuucagcgaugacaucgaacagcaggccgauaacaugauuacggagcugcuccaaaaagaguauauggacagacagggcaagacaccgcuggggcuuguggaucuguuugucuucuccaccucuuuuuaccucaucagcauuuuccugcaccugaucaaaauucccacccaucggcacaucacaggaaagccuugccccaaaccucaucgccuuaaucacaugggcauuuguuccugcggccucuauaagcaccccgggguuccggugaaguggaaaagaugaggacuagucccuguucccagagcccacuuuuuuuucuuuuuuugaaauaaaauagccugucuuucagaucuaaaaaaaaaaaaaaaaaaaaaaaaaaaaaaaaaaaaaaaaaaaaaaaaaaaaaaaaaaaaaaaaaaaaaaaaaaaaaaaaaaaaaaaaaaaaaaaaaaaa

SEQ ID NO: 23480 - RNA, 1721 nt, Artificial Sequence
  mRNA product Design a-1 (A100) comprising derived and/or modified sequence from LASV(LASV253-NIG-2011;Clade II)__AIT17670__GPCmut2 (opt5)
aggagagucccgcagucggcguccagcggcucugcuuguucgugugugugucguugcaggccuuauucaagcuuaccaugggccagaucauuaccuucuuucaagaggugccccacgucaucgaagagguuaugaacauugugcugaucgcccucagccugcuugcuauucugaaggggaucuacaauguggccacaugcggacucuucggccuggucuccuuucuucugcucugugggagaucuugcagcacgaccuauaaaggaguguacgaacugcagacacuggagcucgacauggcgucccugaacauguguaugccucuuucuugcaccaagaauaacagccaucacuauaucaugguuggcaaugaaacagggcuggagcucacccugacaaacaccuccauuaucaaucauaaauucuguaaccuuucugaugcucacaagaaaaaucuguacgaccaugcccucaugagcauuaucuccacguuucaccugagcauuccgaacuucaaucaguaugaggccaugucuugcgauuuuaacggaggcaagaucuccgugcaguacaaucugagccacaccuaugcugucgacgccgcuaaccauuguggcacaauugccaauggggugcuccaaaccuucaugcggauggcguggggaggcucuuacaucgcccuggauuccgggaagggaagcugggacugcaucaugacaucuuaccaguaucuuauuauccagaacaccacgugggaagaucacugucaguuuucccgccccagcccuauuggcuaccuggggcuccugucccaaagaacacgggacaucuauauuucucgcagacggcgcggaaccuucacauggacccuuagcgauuccgagggcaacgaaacccccggcggguacugccugacaagauggaugcucaucgaggcugagcugaaauguuuuggaaauacggccguugcuaagugcaacgaaaaacaugacgaggaguucugcgauaugcugcggcucuuugacuucuguaagcaggccauccgcagacugaaagcgccugcccagaugagcauucagcuuaucaauaaggcugugaacgcccugauuaaugaucaacucaucaugaagaaccaucugcgggacauuaugggcauccccuauugcaauuacucuaaauauugguaccuuaaccacaccgucacagggcgcaccucccugccuagauguuggcucgugagcaauggaucuuaccugaacgaaacacacuucagcgacgauaucgaacagcaggcugacaauaugauuaccgagcugcuccaaaaggaguauaucgaucggcagggcaaaacgccgcuggggcuuguggaccuguuugucuucuccacaucuuuuuaccucauuagcaucuuccugcaccugguuaagauucccacccaucgccacaucauuggaaaaccuugccccaagccucauagacuuaaccacaugggcaucuguuccugcggccucuauaaacaccccggggugccggugaaguggaagcggugaggacuagucccuguucccagagcccacuuuuuuuucuuuuuuugaaauaaaauagccugucuuucagaucuaaaaaaaaaaaaaaaaaaaaaaaaaaaaaaaaaaaaaaaaaaaaaaaaaaaaaaaaaaaaaaaaaaaaaaaaaaaaaaaaaaaaaaaaaaaaaaaaaaaa

SEQ ID NO: 23481 - RNA, 1721 nt, Artificial Sequence
  mRNA product Design a-1 (A100) comprising derived and/or modified sequence from LASV(LASV254-NIG-2011;Clade II)__AIT17674__GPCmut2 (opt5)
aggagagucccgcagucggcguccagcggcucugcuuguucgugugugugucguugcaggccuuauucaagcuuaccaugggccagaucauuaccuucuuucaagaggugccccacgucaucgaagagguuaugaacauugugcugaucgcccucagccugcuugcuauucugaaggggaucuacaauguggccacaugcggacucuucggccuggucuccuuucuucugcucugugggagaucuugcagcacgaccuauaaaggaguguacgaacugcagacacuggagcucgacaugaccaaccugaauauguguaugccucuuuccugcacaaagaacaauucucaucacuauaucaugguuggcaacgaaaccgggcuggagcucacacugaccaauacgagcauuaucaaccauaaauucuguaaucuuuccgaugcgcacaagaaaaaccuguacaaucaugcucucaugucuauuaucagcaccuuucaccuguccauuccgaacuucaaucaguaugaggccaugagcugcgacuuuaacggaggcaagaucucugugcaguacaaucugucccacagcuaugccgucgaugcugccaaccauuguggcacaauugcuaacggggugcuccaaaccuucaugcggauggccuggggaggcucuuacaucgcgcuggacuccgggaagggaaauugggauugcaucaugacaagcuaccaguaucuuauuauccagaacaccacgugggaagaccacugucaguuuucucgccccuccccuauuggcuaccuggggcuccugagccaaagaacacgggauaucuauauuucccgcagacggcgcggaaccuucacauggacccuuucugacagcgagggcaaugaaacccccggcggguacugccugacaagauggaugcucaucgaggccgagcugaaauguuuuggaaacacggcuguugccaagugcaaugaaaaacaugaugaggaguucugcgacaugcugcggcucuuugauuucuguaagcaggcuauccgcagacugaaaaccccugcccaggcgaacauucagcuuaucaauaaggccgugaacgcucugauuaaugaccaacucaucaugaagaaccaucugcgggauauuaugggcauccccuauugcaauuacuccaaauauugguaccuuaaccacacagucaccgggaagacaagccugccucgcuguuggcucgugucuaauggauccuaccugaacgaaacccacuucagcgacgacaucgaacagcaggccgauaauaugauuacggagcugcuccaaaaagaguauauggacagacagggcaagacaccgcuggggcuuguggaucuguuugucuucucuaccagcuuuuaccucaucuccauuuuccugcaccugguuaaaauccccacccaucggcacgugauuggaaagccuugccccaaaccucaucgccuuaaccacaugggcaucuguucuugcggccucuauaagcaccccggggugccggucaaguggaaaagaugaggacuagucccuguucccagagcccacuuuuuuuucuuuuuuugaaauaaaauagccugucuuucagaucuaaaaaaaaaaaaaaaaaaaaaaaaaaaaaaaaaaaaaaaaaaaaaaaaaaaaaaaaaaaaaaaaaaaaaaaaaaaaaaaaaaaaaaaaaaaaaaaaaaaa

SEQ ID NO: 23482 - RNA, 1721 nt, Artificial Sequence
  mRNA product Design a-1 (A100) comprising derived and/or modified sequence from LASV(Nig08-A19;Clade III)__ADU56618__GPCmut2 (opt5)
aggagagucccgcagucggcguccagcggcucugcuuguucgugugugugucguugcaggccuuauucaagcuuaccaugggccagaucgugaccuucuuucaagaggucccccacguuauugaagaggugaugaacaucgugcugauugcccucagcauccuggcuauucuuaaggggcuguacaauaucgccacaugcggacucaucggccuggucacguuccuucugcucuccgggagaucuuguagcaugaccuauaaaggaguguacgaacugcagacacuggagcucaacaugaauacccugaacaugugcaugccucuuuccuguacaaagaauaacucucaucacuauauuaugguuggcaaugaaaccgggcuggagcucacacugaccaacacgagccuucugcaucacaaauuuugcaaucucuccgacgcgcauaagaaaaaccuguacgaucacacccugaugucuaucauuagcacauuccaccucuccaucccgaauuuuaaccaguaugaggcuaugagcugugacuucaauggaggcaagauuaccgugcaguacaaccugucucauuccuaugccaucgaugccgcuaaucacugcggcacagucgccaacggggugcuucaaaccuuuaugcggauggcuuggggaggcagcuacauugcccuggacucugggcgcggaaagugggauuguaucaugacguccuaccaguaucucaucauucagaacacaaccugggaagaccauugccaguucagcagacccucuccuaucggcuaccuggggcuucugucccaacggacacgcgauauuuauaucagcagacggcgcagaggaaccuuuaccuggacacucuccgacucugagggcaaugaaacgcccggcggguacugucugacccgguggaugcugauugaggcggagcucaaaugcuucggaaacacagccguugcuaaguguaaugaaaaacacgaugaggaauuuugcgacaugcugcgccuuuucgauuuuugcaagcaggccaucagacggcugaaagcuccugcccagaugagcauccagcucauuaacaaggcggugaaugcccugaucaacgaccaacuuauuaugaagaaucaucugcgcgauaucaugggcauucccuauuguaacuacuccaaauauugguaccucaaucacaccagcacagggagaaccucucugccucggugcuggcuggucuccaacggaagcuaccucaaugagacgcacuucucugacgacaucgaacagcaggcugauaacaugaucacagagaugcugcaaaaggaguaucuugaccgccagggcaaaaccccgcuggggcucguggaucuguucguguuuagcaccuccuucuaccugauuucuaucuuucuucaucucgucaagauucccacacacagacauaucguuggaaaaccuugucccaagccucaccggcugaaucacaugggcauuugcagcuguggccuguauaaacagcccggggugccggugagauggaagcgcugaggacuagucccuguucccagagcccacuuuuuuuucuuuuuuugaaauaaaauagccugucuuucagaucuaaaaaaaaaaaaaaaaaaaaaaaaaaaaaaaaaaaaaaaaaaaaaaaaaaaaaaaaaaaaaaaaaaaaaaaaaaaaaaaaaaaaaaaaaaaaaaaaaaaa

SEQ ID NO: 23483 - RNA, 1724 nt, Artificial Sequence
  mRNA product Design a-1 (A100) comprising derived and/or modified sequence from LASV(G1180-SLE-2010;Clade IV)__AIT17168__GPCmut2 (opt5)
aggagagucccgcagucggcguccagcggcucugcuuguucgugugugugucguugcaggccuuauucaagcuuaccaugggccagaucgugaccuucuuucaagaggucccccacguuauugaagaggugaugaacaucgugcugauugcccucagcauccuggcuguccuuaaggggcuguacaauuucgccacaugcggacucgugggccugcuuacguuucugcuccugugugggagauccugcaccgcgucucgguauaaaggaguuuacgaacugcagacacucgagcugaacauggaaacccuuaauauguguaugccucugagcugcacaaagaacaauucccaucacuauauuauggugggcaacgagaccgggcucgagcugacacuuaccaauacgucuaucaucaaccauaaauucuguaaucugagcgacgcucacaagaaaaaccucuacgaucaugcccugauguccauuaucucuaccuuucaccugagcauuccgaauuucaaccaguaugaagccauguccugcgacuuuaauggaggcaagaucagcguccaguacaaccucucucacuccuaugcuggcgaugccgcuaaucauugugggacaguggccaacggaguucugcaaaccuucaugcgcauggcguggggcgggagcuacauugcccuugacucuggacacggcuccugggauugcaucaugacaagcuaccaguaucugauuauccagaacaccacgugggaggaccauugucaguuuucuagacccuccccuaucggguaccucggacugcuuagccaacggacacgcgauauuuauaucuccagacggcgcagaggcaccuucacauggacccugucugacagcgaaggcaaggauacccccgggggauacugccucacacgguggaugcugauugaggcugagcugaaauguuuuggcaauacggccguggcuaagugcaacgaaaaacacgacgaggaguucugcgauaugcuccgccuguuugacuucuguaagcaggccauccagagacuuaaagcgccugcccagauguccauucaacugaucaauaaggcugucaacgcccucaucaaugaucagcugauuaugaagaaccaccuucgggacaucauggggauucccuauugcaauuacagcaaauauugguaccugaaccauaccacaaccggaaagacaucucucccuaaauguuggcugguguccaauggcagcuaccugaacgaaacccacuucucugacgauaucgaacagcaagcugacaauaugauuacggagaugcuccagaaggaguauauggaacgccaggggaaaacaccgcugggacuuguggaucuguuugucuucagcaccuccuuuuaccucaucucuaucuuccugcaucugguuaagauucccacccacagacauaucgugggcaaaagcugcccuaagccccaccggcuuaaccacaugggcauuuguuccugcgggcucuauaagcagccuggagugcccgucaaauggaagcgcugaggacuagucccuguucccagagcccacuuuuuuuucuuuuuuugaaauaaaauagccugucuuucagaucuaaaaaaaaaaaaaaaaaaaaaaaaaaaaaaaaaaaaaaaaaaaaaaaaaaaaaaaaaaaaaaaaaaaaaaaaaaaaaaaaaaaaaaaaaaaaaaaaaaaa

SEQ ID NO: 23484 - RNA, 1724 nt, Artificial Sequence
  mRNA product Design a-1 (A100) comprising derived and/or modified sequence from LASV(G1442-SLE-2011;Clade IV)__AIT17180__GPCmut2 (opt5)
aggagagucccgcagucggcguccagcggcucugcuuguucgugugugugucguugcaggccuuauucaagcuuaccaugggccagaucgugaccuucuuucaagaggucccccacguuauugaagaggugaugaacaucgugcugauugcccucagcauccuggcuguccuuaaggggcuguacaauguggccacaugcggacucauuggccugguuacguuccuucugcucugugggagauccugcaccacaacccuguauaaaggaguguacgaacugcagacacucgagcugaacauggaaacccuuaauauguguaugccucugucuugcacaaagaacaauagccaucacuauauccgggucggcaacgagaccgggcucgagcugacgcuuaccaauacauccaucauuaaccauaaauuuuguaaucugucugacgcgcacaagaaaaaccucuacgaucaugcucugaugagcaucauuuccaccuuccaccugucuaucccgaauuuuaaccaguaugaagccaugagcugcgacuucaauggaggcaagauuuccgugcaguacaaccucagccacucuuaugccggcgaugcugccaaucauugugggacaguugcuaacggagugcugcaaaccuuuaugcgcauggccuggggcggguccuacaucgcgcuugacagcggaagaggcaacugggauugcauuaugacgucuuaccaguaucugaucauccagaauacaaccugggacgaucacugucaguucucccggcccagcccuauuggguaccucggacugcuuucucaacgcacaagagacgucuauaucucccggcgcagacggggcaccuuuaccuggacacugagcgauuccgagggcaaggacacgcccgggggauacugccucacccgcuggaugcugauugaagccgagcugaaauguuucggcaacacagcuguggccaagugcaaugagaaacaugaugaagaguuuugcgacaugcucagacuguucgauuuuuguaagcaggcuauccagcggcuuaaagccccugcgcagaugucuauucaacugaucaacaaggccgugaaugcucucaucaacgaccagcugauuaugaagaaucaccuucgcgacaucauggggauucccuauugcaacuacagcaaauauugguaccugaauaacaccgccacaggaaagaccucccucccuaaauguuggcugaucagcaauggcucuuaccugaacgaaacgcacuucuccgaugacauugagcaggaagcugauaauaugaucacagagaugcuccaaaaggaguauauggaaagacaggggaaaaccccgcugggacuugucgaccuguucguuuuuagcaccucuuucuaccucaucagcauuuuucugcaucuggugaagauccccacacaccggcauauugugggcaaauccugcccuaagccccaccgccuuaaccauaugggcaucuguucuugcgggcucuauaagcagccuggaguccccgugagauggaaacggugaggacuagucccuguucccagagcccacuuuuuuuucuuuuuuugaaauaaaauagccugucuuucagaucuaaaaaaaaaaaaaaaaaaaaaaaaaaaaaaaaaaaaaaaaaaaaaaaaaaaaaaaaaaaaaaaaaaaaaaaaaaaaaaaaaaaaaaaaaaaaaaaaaaaa

SEQ ID NO: 23485 - RNA, 1724 nt, Artificial Sequence
  mRNA product Design a-1 (A100) comprising derived and/or modified sequence from LASV(G3010-SLE-2013;Clade IV)__AIT17344__GPCmut2 (opt5)
aggagagucccgcagucggcguccagcggcucugcuuguucgugugugugucguugcaggccuuauucaagcuuaccaugggccagaucgugaccuucuuucaagaggucccccacguuauugaagaggugaugaacaucgugcugauugcccucagcauccuggcuguccuuaaggggcuguacaauuucgccacaugcggacucgugggccugguuacguuucuucugcucugugggagauccugcaccacaucucuguauaaaggaguguacgaacugcagacccucgagcugaacauggaaacacuuaauauguguaugccucugagcugcaccaagaacaauucccaucacuauauuauggucggcaacgagacagggcucgagcugacccuuacgaauaccucuaucaucaaccauaaauucuguaaucugagcgacgcgcacaagaaaaaccucuacaaucaugcucugauguccauuaucucuacauuucaccugagcauuccgaacuucaaucaguaugaagccauguccugcgauuuuaacggaggcaagaucagcgugcaguacaaucucucucacuccuaugccggcgacgcugccagccauugugggaccguugcuaacggagugcugcaaacauucaugcggauggccuggggcgggucuuacauugcgcuugauuccggauacggcaagugggacugcaucaugaccagcuaucaguaccugauuauccagaacacgacaugggaggaucacugucaguuuucucgccccuccccuaucggguaucucggacugcuuagccaaagaacccgggacauuuacaucucccgcagacggcgcggcacauucaccuggacccugucugauagcgaaggcaaagacacacccgggggauauugccucacgagauggaugcugauugaggccgagcugaaguguuuuggcaauaccgcugucgccaaaugcaacgaaaagcaugaugaggaguucugcgacaugcuccggcuguuugauuucuguaaacaggcuauccagcgccuuaagaccccugcccagauguccauucaacugaucaauaaggcggugaacgcccucaucaaugaccagcugauuaugaaaaaccaccuuagagauaucauggggauucccuacugcaauuauagcaaguacugguaccugaaccacacaacaaccggaaaaacgucucucccuaaguguuggcugguguccaauggcagcuaucugaacgaaacacauuucucugacgacaucgaacagcaagcugauaauaugauuaccgagaugcuccagaaagaguacauggaacggcaggggaagaccccgcugggacuugucgaccuguuuguuuucagcacauccuuuuaucucaucucuaucuuccugcaccuggugaaaauucccacccaucgccacaucgugggcaagagcugcccuaagccccauagacuuaaccacaugggcauuuguuccugcgggcucuacaaacagccuggaguccccgugcgguggaagcgcugaggacuagucccuguucccagagcccacuuuuuuuucuuuuuuugaaauaaaauagccugucuuucagaucuaaaaaaaaaaaaaaaaaaaaaaaaaaaaaaaaaaaaaaaaaaaaaaaaaaaaaaaaaaaaaaaaaaaaaaaaaaaaaaaaaaaaaaaaaaaaaaaaaaaa

SEQ ID NO: 23486 - RNA, 1724 nt, Artificial Sequence
  mRNA product Design a-1 (A100) comprising derived and/or modified sequence from LASV(G502-SLE-2009;Clade IV)__AIT17126__GPCmut2 (opt5)
aggagagucccgcagucggcguccagcggcucugcuuguucgugugugugucguugcaggccuuauucaagcuuaccaugggccagaucgugaccuucuuucaagaggucccccacguuauugaagaggugaugaacaucgugcugauugcccucagcauccuggcuguccuuaaggggcuguacaauuucgccacaugcggacucgugggccugcuuacguuucugcuccugugugggagauccugcaccacaggacuguauaaaggcguuuacgaacuccagacccuggagcuuaacauggaaacacugaauauguguaugccucucucuugcaccaagaacaauagccaucacuauauuaugguggggaacgagacaggacuggagcuuacccugacgaauaccuccaucaucaaccauaaauucuguaaucucucugacgcgcacaagaaaaaccuguacgaucaugcucugaugagcauuaucuccacauuucaccucucuauuccgaauuucaaccaguaugaagccaugagcugcgacuuuaauggcggcaagaucuccguccaguacaaccugagccacucuuaugccggggaugcugccgaccauuguggaaccguggcuaauggcguucuucaaacauucaugcggauggccuggggaggguccuacauugcgcuggauagcggccgcgggagaugggacugcaucaugaccucuuaccaguaucucauuauccagaacacgacaugggaggaucacugucaguuuucccggcccagcccuaucggauaccugggccuucugucucaacgcaccagagacauuuauaucucccggcgcagacggggcacauucaccuggacccucagcgauuccgaagggaaggacacacccggaggcuacugccugacgcgcuggaugcugauugaggccgagcucaaauguuuugggaacaccgcuguggccaagugcaaugaaaaacaugaugaggaguucugcgacaugcugagacuuuuugauuucuguaagcaggcuauccagcggcugaaagccccugcgcagaugucuauucaacucaucaacaaggccgucaaugcucugaucaacgaccagcuugugaugaagaaucaucugcgcgacauuaugggaauccccuauugcaacuacagcagauauugguaccucaaucacacaaccacaggccggaccucccugccuaaauguuggcuggugagcaacgggucuuaccucaaugaaacgcacuucuccgaugacauugaacagcaagccgauaacaugaucacagagaugcugcagaaggaguauauggaacgccagggaaaaaccccgcuuggccuggucgaccucuuuguuuucagcaccucuuuuuaccugauuagcaucuuccugcaccuugugaagauccccacacauagacacauugugggcaaauccugcccuaagccccaucggcucaaucacauggggaucuguucuugcggacuguauaaacagccuggcguccccgugaaguggaagagaugaggacuagucccuguucccagagcccacuuuuuuuucuuuuuuugaaauaaaauagccugucuuucagaucuaaaaaaaaaaaaaaaaaaaaaaaaaaaaaaaaaaaaaaaaaaaaaaaaaaaaaaaaaaaaaaaaaaaaaaaaaaaaaaaaaaaaaaaaaaaaaaaaaaaa

SEQ ID NO: 23487 - RNA, 1724 nt, Artificial Sequence
  mRNA product Design a-1 (A100) comprising derived and/or modified sequence from LASV(G733-SLE-2010;Clade IV)__AIT17154__GPCmut2 (opt5)
aggagagucccgcagucggcguccagcggcucugcuuguucgugugugugucguugcaggccuuauucaagcuuaccaugggccagaucgugaccuucuuucaagaggucccccacguuauugaagaggugaugaacaucgugcugauugcccucagcauccuggcuguccuuaaggggcuguacaauuucgccacaugcggaauugugggccucguuuccuuucugcuucugugugggagaucuugcacgaccagccucuauaaaggaguguacgaacugcagacacuggagcucaacauggaaacccugaauauguguaugccucuuuccugcacaaagaacaauucucaucacuauaucauggucggcaacgagaccgggcuggagcucacacugaccaauacgagcaucauuaaccauaaauucuguaaucuuuccgacgcgcacaagaaaaaccuguacgaucaugcucucaugucuaucauuagcaccuuucaccuguccaucccgaauuucaaccaguaugaagccaugagcugcgacuuuaauggaggcaagauuucugugcaguacaaccugucccacagcuaugccggcgaugcugccaaucauugugggacaaucgcuaacggaguucuccaaaccuucaugcggauggccuggggcgggucuuacauugcgcuggacuccggacgcgauagaugggacugcaucaugacaagcuaccaguaucuuaucauucagaacaccacgugggaggaucacugucaguuuucucggcccuccccuaucggcuaccuggggcuccugagccaacgcacaagagacauuuauaucucccggcgcagacggggaaccuucacauggacccuuucugauagcgaaggcaaggacacccccggcggguacugccugacacgcuggaugcucauugaggccgagcugaaauguuuuggaaauacggcuguggccaagugcaacgaaaaacaugaugaggaguucugcgacaugcugagacucuuugauuucuguaagcaggcuauccagcggcugaaagccccugcgcagauguccauccaacuuauuaauaaggccgucaacgcucugaucaaugaccagcucauuaugaagaaccaucugcgcgacaucaugggcauucccuauugcaauuacagcaaauauugguaccuuaaccacaccacaaccgggaagacaucucugccuaaauguuggcucguguccaauggaagcuaccugaacgaaacccacuucucugaugacaucgaacagcaagccgauaauaugaucacggagaugcugcagaaggaguauauggaaagacagggcaaaacaccgcucgggcugguggaccuuuuugucuucagcaccuccuuuuaccugauuucuaucuuccuccaccugguuaagauucccacccaucggcacguggugggaaaaagcugcccuaagccccaucgccugaaccacaugggcaucuguuccugcggccuuuaugggcagccuggaguccccgugaaguggaaaagaugaggacuagucccuguucccagagcccacuuuuuuuucuuuuuuugaaauaaaauagccugucuuucagaucuaaaaaaaaaaaaaaaaaaaaaaaaaaaaaaaaaaaaaaaaaaaaaaaaaaaaaaaaaaaaaaaaaaaaaaaaaaaaaaaaaaaaaaaaaaaaaaaaaaaa

SEQ ID NO: 23488 - RNA, 1724 nt, Artificial Sequence
  mRNA product Design a-1 (A100) comprising derived and/or modified sequence from MOPV/LASV reassortant(IGS-1;Clade IV)__AFY05576__GPCmut2 (opt5)
aggagagucccgcagucggcguccagcggcucugcuuguucgugugugugucguugcaggccuuauucaagcuuaccaugggccagaucgugaccuucuuucaagaggucccccacguuauugaagaggugaugaacaucgugcugauugcccucagcguccuggcugugcuuaaggggcuguacaauuucgccacaugcggacucguuggccuggugacguuucuucugcucugugggagauccugcaccacaucucuguauaaaggagucuacgaacugcagacccucgagcugaacauggaaacacuuaauauguguaugccucugagcugcaccaagaacaauucccaucacuauaucauggugggcaacgagacagggcucgagcugacccuuacgaauaccucuauuaucaaccauaaauucuguaaucugagcgacgcgcacaagaaaaaccucuacgaucaugcucugauguccaucauuucuacauuucaccugagcaucccgaauuucaaccaguaugaagccauguccugcgacuuuaauggaggcaagauuagcguucaguacaaccucucucacuccuaugccggcgaugcugccaaucauugugggaccguggcuaacggaguccugcaaacauucaugcggauggccuggggcgggagcuacaucgcgcuugacucuggacgcggcaacugggauugcauuaugaccuccuaccaguaucugaucauucagaauacgacaugggaggaccacugucaguuuagcagacccucuccuaucggguaccucggacugcuuucccaacggacccgcgauaucuauauuagcagacggcgcagaggcacauucaccuggacccuguccgacucugaaggcgaggauacacccgggggauacugccucacgcgguggaugcugaucgaggccgaacugaaguguuuuggcaacaccgcuguggccaaaugcaaugagaagcaugacgaagaguucugcgauaugcuccgccuguuugacuucuguaaacaggcuauucagagacuuaaggccccugcgcagaugagcauccaacugauuaacaaagccgugaaugcucucaucaacgaucagcugaucaugaagaaucaccuucgggacauuauggggauccccuauugcaacuacuccaaguauugguaccugaaucacacaaccacaggacgcaccagccucccuaaauguuggcuggucucuaacggcuccuaccugaaugaaacgcauuucagcgacgauauugagcagcaagccgacaacaugaucacagagaugcuccagaaggaauauauggagagacaggggaaaaccccgcugggacuuguugaucuguuuguguucucuaccagcuuuuaccucauuuccaucuuccugcaccuggugaagauccccacacaucggcacauugucggcaaaucuugcccuaagccccaucgccuuaaucacaugggcaucuguagcugcgggcucuauaaacagccuggagugcccguuaaguggaagagaugaggacuagucccuguucccagagcccacuuuuuuuucuuuuuuugaaauaaaauagccugucuuucagaucuaaaaaaaaaaaaaaaaaaaaaaaaaaaaaaaaaaaaaaaaaaaaaaaaaaaaaaaaaaaaaaaaaaaaaaaaaaaaaaaaaaaaaaaaaaaaaaaaaaaa

SEQ ID NO: 23489 - RNA, 1724 nt, Artificial Sequence
  mRNA product Design a-1 (A100) comprising derived and/or modified sequence from LASV(LM765-SLE-2012;Clade IV)__AIT17814__GPCmut2 (opt5)
aggagagucccgcagucggcguccagcggcucugcuuguucgugugugugucguugcaggccuuauucaagcuuaccaugggccagaucgugaccuucuuucaagaggucccccacguuauugaagaggugaugaacaucgugcugauugcccucagcauccuggcuguccuuaaggggcuguacaauuucgccacaugcggacucgugggccugguuacguuucuucugcucugugggagauccugcaccacaucucuguauaaaggaguguacgaacugcagacccucgagcugaacauggaaacacuuaauauguguaugccucugagcugcaccaagaacaauucccaucacuauauuauggucggcaacgagacagggcucgagcugacccuuacgaauaccucuaucaucgaccauaaauucuguaaccugagcgaugcgcaccggaagaaucucuacgaccaugcucugauguccauuaucucuacauuucaccugagcauuccgaacuucaaucaguaugaagccauguccugcgauuuuaacggaggcaaaaucagcgugcaguacaaucucucucacuccuaugccaaggacgcugccgaucauuguggcaccguugcuaacggggugcugcaaacauucaugcgcauggccuggggaggcagcuacauugcgcuugacucugggagaggacggugggauugcaucaugaccuccuaccaguaucugauuauccagaauacgacaugggaggaccacugucaguuuagccgccccucuccuaucggcuaccucgggcugcuuucccaaagaacccgggauauuuauaucagccgcagacggcgcggaacauucaccuggacccuguccgacucugaaggcaaggauacacccggcggguacugccucacgagauggaugcugauugaggccgagcugaaauguuuuggaaacaccgcugucgccaagugcaacgaaaaacaugacgaggaguucugcgauaugcuccggcuguuugacuucuguaagcaggcuauccagcgccuuaaagccccugcgcagaugagcauucaacugaucaauaaggccgugaacgcucucaucaaugaccagcugauuaugaagaaccaccuuagagauaucaugggcauucccuauugcaauuacuccaaauauugguaccugaaccacacaaccacagggaagaccagccucccuaaauguuggcuggugucuaauggauccuaccugaacgaaacgcauuucagcgacgauaucgaacagcaagccgacaauaugauuacagagaugcuccagaaggaguauauggaacggcagggcaaaaccccgcuggggcuugucgaucuguuuguuuucucuaccagcuuuuaccucaucuccaucuuccugcaccuggugaagauucccacacaucgccacaucgugggaaaaccuugccccaagccucauagacuuaaccacaugggcauuuguucuugcggccucuauaagcagcccggggucccggugaaauggaagcggugaggacuagucccuguucccagagcccacuuuuuuuucuuuuuuugaaauaaaauagccugucuuucagaucuaaaaaaaaaaaaaaaaaaaaaaaaaaaaaaaaaaaaaaaaaaaaaaaaaaaaaaaaaaaaaaaaaaaaaaaaaaaaaaaaaaaaaaaaaaaaaaaaaaaa

SEQ ID NO: 23490 - RNA, 1724 nt, Artificial Sequence
  mRNA product Design a-1 (A100) comprising derived and/or modified sequence from LASV(LM776-SLE-2012;Clade IV)__AIT17824__GPCmut2 (opt5)
aggagagucccgcagucggcguccagcggcucugcuuguucgugugugugucguugcaggccuuauucaagcuuaccaugggccagaucgugaccuucuuucaagaggucccccacguuauugaagaggugaugaacaucgugcugauugcccucagcauccuggcuguccuuaaggggcuguacaauuucgccacaugcggacucgugggccugguuacguuucuucugcucugugggagauccugcaccacaucuguguauaaaggagucuacgaacugcagacccuggagcucaacauggaaacacugaauauguguaugccucuuagcugcaccaagaacaauucccaucacuauauuauggugggcaacgagacagggcuggagcucacccugacgaauaccucuaucaucaaccauaaauucuguaaucuuagcgacgcgcacaagaaaaaccuguacgaucaugcucucauguccauuaucucuacauuucaccugagcauuccgaauuucaaccaguaugaagccauguccugcgacuuuaauggaggcaagaucagcguucaguacaaccugucucacuccuaugccggcgaugcugccaaucauugugggaccguggcuaacggaguccuccaaacauucaugcggauggccuggggcgggagcuacauugcgcuggacucuggacacggcaagugggauugcaucaugaccuccuaccaguaucuuauuauccagaacacgacaugggaggaccauugucaguuuagccgccccucuccuaucggguaccugggacuccugucccaaagaacccgggauauuuauaucagccgcagacggcgcggcacauucaccuggacccuuuccgacucugaaggcaaagauacacccgggggauacugccugacgagauggaugcucauugaggccgagcugaaguguuuuggcaauaccgcuguggccaaaugcaacgaaaagcacgacgaggaguucugcgauaugcugcggcucuuugacuucuguaaacaggcuauccagcgccugaaggccccugcgcagaugagcauucaacuuaucaauaaggccgugaacgcucugaucaaugaucagcucauuaugaaaaaccaccugagagacaucauggggauucccuauugcaauuacuccaaguauugguaccuuaaccauacaaccacaggaaaaaccagccugccuaaguguuggcucgucucuaauggcuccuaccugaacgaaacgcacuucagcgacgauaucgaacagcaagccgacaauaugauuacagagaugcugcagaaagaguauauggaacggcaggggaagaccccgcucggacugguugaucuuuuuguguucucuaccagcuuuuaccugaucuccaucuuccuccaucuggugaaaauucccacacaccgccauaucgucggcaagucuugcccuaagccccacagacugaaccacaugggcauuuguagcugcgggcuuuauaaacagccuggagugcccguucgguggaagcgcugaggacuagucccuguucccagagcccacuuuuuuuucuuuuuuugaaauaaaauagccugucuuucagaucuaaaaaaaaaaaaaaaaaaaaaaaaaaaaaaaaaaaaaaaaaaaaaaaaaaaaaaaaaaaaaaaaaaaaaaaaaaaaaaaaaaaaaaaaaaaaaaaaaaaa

SEQ ID NO: 23491 - RNA, 1724 nt, Artificial Sequence
  mRNA product Design a-1 (A100) comprising derived and/or modified sequence from LASV(Mad39;Clade IV)__ANH09722__GPCmut2 (opt5)
aggagagucccgcagucggcguccagcggcucugcuuguucgugugugugucguugcaggccuuauucaagcuuaccaugggccagaucgugaccuucuuucaagaggucccccacguuauugaagaggugaugaacaucgugcugauugcccucagcauccuggcuguccuuaaggggcuguacaauguggccacaugcggacucauuggccugguuacguuccuucugcucugugggagauccugcaccacaacccuguauaaaggaguguacgaacugcaggcgcucgagcugaacauggaaacacuuaauauguguaugccucugucuugcaccaagaacaauagccaucacuauauccgggucggcaacgagacagggcucgagcugacccuuacgaauaccucccugaucaaccauaaauuuuguaaucucucugacgcucacaagaaaaaccuguacgaucaugcccugaugagcauuaucuccacauuccaccucucuauuccgaauuuuaaccaguaugaagccaugagcugcgacuucaaugauggaaagaucuccgugcaguacaaccugagccacaccuaugcuggcgacacagccaaucauuguggcaccguugcuaacggggugcuucaaacguuuaugcgcauggccuggggaggcucuuacauugcgcuggauuccgggagaggaggcugggacugcaucaugacaagcuaccaguaucucauuauccagaacaccacaugggaggaucacugucaguucucucggcccuccccuaucggguaccugggacuucugagccaacgcaccagagacauuuauaucucucggcgcagacggggcaccuuuacauggacgcucuccgauagcgaaggcaaggacacccccgggggauacugccugacacgcuggaugcugauugaggccgagcucaaauguuucggcaauaccgcugucgccaagugcaacgaaaaacaugaugaggaauuuugcgacaugcugagacuuuucgauuuuuguaagcaggcuauccagcggcugaaagccccugcgcagauguccauucaacucaucaauaaggccgugaacgcucugaucaaugaccagcuuauuaugaagaaccaucugcgcgacaucauggggauucccuauugcaauuacucuaaauauugguaccucaaccacacagugaccggaaagacgagccugccuaaauguuggcuggucuccaauggcagcuaccucaacgagacacacuucucugaugacaucgaacagcaagccgauaauaugauuaccgagaugcugcagaaggaguauauggaaagacaggggaaaaccccgcuuggacugguugaccucuucguguuuuccaccagcuucuaccugaucucuaucuuucugcaccuugugaagauucccacacaucggcacgucgugggcaaaccuugccccaagccucaucgccucaaccacaugggcaucuguagcugcggguucuauaagcagcccggaguuccggugagauggaaacggugaggacuagucccuguucccagagcccacuuuuuuuucuuuuuuugaaauaaaauagccugucuuucagaucuaaaaaaaaaaaaaaaaaaaaaaaaaaaaaaaaaaaaaaaaaaaaaaaaaaaaaaaaaaaaaaaaaaaaaaaaaaaaaaaaaaaaaaaaaaaaaaaaaaaa

SEQ ID NO: 23492 - RNA, 1724 nt, Artificial Sequence
  mRNA product Design a-1 (A100) comprising derived and/or modified sequence from LASV(Z0947-SLE-2011;Clade IV)__AIT17840__GPCmut2 (opt5)
aggagagucccgcagucggcguccagcggcucugcuuguucgugugugugucguugcaggccuuauucaagcuuaccaugggccagaucgugaccuucuuucaagaggucccccacguuauugaagaggugaugaacaucgugcugauugcccucagcauccuggcuguccuuaaggggcuguacaauuucgccacaugcggacucgugggccugguuacguuucuucugcucugugggagauccugcaccauuucucuguauaaaggaguguacgaacugcagacacucgagcugaacauggaaacccuuaauauguguaugccucugagcugcacaaagaacaauucccaucacuauaucauggucggcaacgagaccgggcucgagcugacacuuaccaauacgucuaucauuaaccauaaauucuguaaucugagcgacgcgcacaagaaaaaccucuacgaucaugcucugauguccaucauuucuaccuuucaccugagcaucccgaauuucaaccaguaugaagccauguccugcgacuuuaauggaggcaagauuagcgugcaguacaaccucucucacuccuaugccggcgaugcugccaaucauugugggacaguugcuaacggagugcugcaaaccuucaugcggauggccuggggcgggagcuacaucgcgcuugacucuggacgcgauagaugggacugcauuaugacauccuaccaguaucugaucauccagaacaccacgugggaggaucacugucaguuuagccggcccucuccuauuggcuaccucgggcugcuuucccaacgcacaagagacaucuauauuagccggcgcagacggggaaccuucacauggacccuguccgauucugaaggcaaggacacccccggcggguacugccucacacgcuggaugcugaucgaggccgagcugaaauguuuuggaaauacggcugucgccaagugcaacgaaaaacaugaugaggaguucugcgacaugcucagacuguuugauuucuguaagcaggcuauucagcggcuuaaagccccugcgcagaugagcauccaacugaucaauaaggccgugaacgcucucauuaaugaccagcugaucaugaagaaccaccuucgcgacauuaugggcauccccuauugcaauuacuccaaauauugguaccugaaccacaccacaaccgggaagacaagccucccuaaauguuggcuggugucuaauggauccuaccugaacgaaacccauuucagcgaugacauugaacagcaagccgauaauaugaucacggagaugcuccagaaggaguauauggaaagacagggcaaaacaccgcuggggcuugucgaccuguuuguuuucucuaccagcuuuuaccucaucuccauuuuccugcaccuggugaagauccccacccaucggcacauugugggaaaaccuugccccaagccucaucgccuuaaccacaugggcaucuguucuugcggccucuauaagcagcccggggucccggugaaauggaagagaugaggacuagucccuguucccagagcccacuuuuuuuucuuuuuuugaaauaaaauagccugucuuucagaucuaaaaaaaaaaaaaaaaaaaaaaaaaaaaaaaaaaaaaaaaaaaaaaaaaaaaaaaaaaaaaaaaaaaaaaaaaaaaaaaaaaaaaaaaaaaaaaaaaaaa

SEQ ID NO: 23493 - RNA, 1736 nt, Artificial Sequence
  mRNA product Design a-2 (hSL-A64-N5) comprising derived and/or modified sequence from LASV(Josiah;Clade IV)__NP_694870__GPCmut2 (opt1)
aggagaguccgcucagccagguugcagaagcggcuuagcguguguccuaaucuucucucugcguguagguaggccugugccgcaaacaagcuuaccaugggccagaucgugaccuucuuccaggaggucccccacgugaucgaggaggugaugaacaucguccugaucgcccucagcgugcuggccgugcugaaggggcucuacaacuucgcgaccugcggccuggucgggcuggugacguuccuccugcugugcggccgcuccugcaccaccagccucuacaaggggguguacgagcugcagacccuggagcucaacauggagacgcugaacaugugcaugccgcuguccugcaccaagaacaacagccaccacuacaucauggucggcaacgagaccggccucgagcugacgcugaccaacaccuccaucaucaaccacaaguucugcaaccucagcgacgcccacaagaagaaccuguacgaccacgcccugauguccaucaucagcaccuuccaccucuccauccccaacuucaaccaguacgaggccaugagcugcgacuucaacgggggcaagaucuccgugcaguacaaccugagccacuccuacgccggggacgcggccaaccacugcggcacgguggccaacgggguccugcagaccuucaugcggauggccuggggcggcagcuacaucgcgcucgacuccgggcgcggcaacugggacugcaucaugaccagcuaccaguaccugaucauccagaacaccacgugggaggaccacugccaguucucccggcccagccccaucggguaccugggccuccugucccagcgcacccgggacaucuacaucagccgccggcgccggggcaccuucaccuggacgcugagcgacuccgaggggaaggacaccccgggcggguacugccugacccgcuggaugcucaucgaggccgagcugaagugcuucggcaacaccgccguggccaagugcaacgagaagcacgacgaggaguucugcgacaugcugcggcuguucgacuucugcaagcaggccauccagcgccugaaggcgcccgcccagaugagcauccagcugaucaacaaggccgugaacgcccucaucaacgaccagcugaucaugaagaaccaccuccgggacaucauggggauccccuacugcaacuacuccaaguacugguaccucaaccacacgaccaccggccgcaccagccugcccaagugcuggcuggucuccaacggcagcuaccucaacgagacgcacuucuccgacgacaucgagcagcaggccgacaacaugaucaccgagaugcugcagaaggaguacauggagcggcaggggaagacgccccugggccucguggaccuguucguguucagcaccuccuucuaccugaucagcaucuuccugcaccucgucaagaucccgacccaccgccacaucguggggaaguccugccccaagccccaccggcugaaccacaugggcaucugcagcugcgggcuguacaagcagcccggcgugccggucaaguggaagcgcugaggacuagucccuguucccagagcccacuuuuuuuucuuuuuuugaaauaaaauagccugucuuucagaucucaaaggcucuuuucagagccaccaaaaaaaaaaaaaaaaaaaaaaaaaaaaaaaaaaaaaaaaaaaaaaaaaaaaaaaaaaaaaaaaagaauu

SEQ ID NO: 23494 - RNA, 1733 nt, Artificial Sequence
  mRNA product Design a-2 (hSL-A64-N5) comprising derived and/or modified sequence from LASV(LP;Clade I)__AAF86701__GPCmut2 (opt1)
aggagaguccgcucagccagguugcagaagcggcuuagcguguguccuaaucuucucucugcguguagguaggccugugccgcaaacaagcuuaccaugggccagaucaucaccuucuuccaggaggugccccacgucaucgaggaggugaugaacaucgugcugaucgcccucagccugcuggccauccucaaggggcuguacaacaucgcgaccugcggcaucaucgggcuggucgccuuccucuuccugugcggcaaguccugcagccugacgcucaagggcggguacgagcugcagacccuggagcucaacauggagacccugaacaugugcaugccgcuguccugcacgaagaacagcucccaccacuacauccgcgugggcaacgagaccgggcucgagcugacccugaccaacacgagcaucaucaaccacaaguucugcaaccucuccgacgcccacaagaagaaccuguacgaccacgcccugaugagcaucaucuccaccuuccaccucagcauccccaacuucaaccaguacgaggccauguccugcgacuucaacggcgggaagaucagcgugcaguacaaccugucccacagcuacgcgggcgacgccgccgagcacugcgggaccgucgccaacggcgugcugcagaccuucaugcggauggcguggggcgggcgcuacaucgcccucgacuccggcaaggggaacugggacugcaucaugacgagcuaccaguaccugaucauccagaacaccaccugggaggaccacugccaguucucccggcccagccccaucggcuaccugggccuccugucccagcgcacccgggacaucuacaucagccgccggcgccgggggacguucaccuggacccugagcgacuccgagggcaacgagacccccgggggcuacugccugacgcgcuggaugcucaucgaggccgagcugaagugcuucgggaacaccgccguggccaagugcaacgagaagcacgacgaggaguucugcgacaugcugcggcuguucgacuucugcaagcaggcgauccgccggcugaaggcccccgcccagaugagcauccagcugaucaacaaggccgucaacgcccucaucaacgaccagcugaucaugaagaaccaccuccgcgacaucaugggcauccccuacugcaacuacuccaaguacugguaccucaaccacaccagcuccggccggaccagccugcccaagugcuggcugaucuccaacgggagcuaccucaacgagacgcaguucuccgacgacaucgagcagcaggcggacaacaugaucaccgagaugcugcagaaggaguacaucgagcgccagggcaagaccccgcuggggcucguggacaucuucaucuucagcaccuccuucuaccugaucagcaucuuccugcaccugaucaagaucccgacgcaccggcacaucgugggcaagcccugccccaagccccaccgccucaaccacaugggggucugcuccugcggccuguacaagcacccgggcgugcccaccaaguggaagcggugaggacuagucccuguucccagagcccacuuuuuuuucuuuuuuugaaauaaaauagccugucuuucagaucucaaaggcucuuuucagagccaccaaaaaaaaaaaaaaaaaaaaaaaaaaaaaaaaaaaaaaaaaaaaaaaaaaaaaaaaaaaaaaaaagaauu

SEQ ID NO: 23495 - RNA, 1733 nt, Artificial Sequence
  mRNA product Design a-2 (hSL-A64-N5) comprising derived and/or modified sequence from LASV(803213;Clade II)__AAF86703__GPCmut2 (opt1)
aggagaguccgcucagccagguugcagaagcggcuuagcguguguccuaaucuucucucugcguguagguaggccugugccgcaaacaagcuuaccaugggccagaucaucaccuucuuccaggaggugccccacgucaucgaggaggugaugaacaucgugcugaucgcccucagccugcuggccauccucaaggggaucuacaacgucgcgaccugcggccuguucgggcugaucuccuuccuccugcugugcggccgcagcugcuccgugacguacaaggggguguacgagcuccagacccuggagcugaacauggccaaccucaacaugugcaugccgcugagcugcaccaagaacaacucccaccacuacaucauggucggcaacgagacgggccuggagcucacccugaccaacaccagcaucaucaaccacaaguucugcaaccuguccgacgcccacaagaagaaccucuacgaccacgcccugaugagcaucaucuccacguuccaccugagcauccccaacuucaaccaguacgaggccauguccugcgacuucaacgggggcaagaucagcgugcaguacaaccucucccacagcuucgcgguggacgccgccaaccacugcgggaccaucgccaacggcguccugcagaccuucaugcggauggcguggggcggguccuacaucgcccuggacagcggcaaggggaacugggacugcaucaugaccuccuaccaguaccucaucauccagaacacgaccugggaggaccacugccaguucagccgccccucccccaucggcuaccuggggcugcucagccagcggacccgcgacaucuacaucagccggcgccgccggggcaccuucacguggacccucuccgacagcgagggcaacgaggcccccgggggcuacugccugacccgguggaugcugaucgaggccgagcucaagugcuucgggaacaccgccguggcgaagugcaacgagaagcacgacgaggaguucugcgacaugcugcgccuguucgacuucugcaagcaggccaucaagcggcucaagacgcccgcccagauguccauccagcugaucaacaaggccgugaacgcccugaucaacgaccagcucaucaugaagaaccaccuccgcgacaucaugggcauccccuacugcaacuacagccgguacugguaccugaaccacaccgucaccgggaagaccucccugccccgcugcuggcuggugagcaacggcuccuaccugaacgagacgcacuucagcgacgacaucgagcagcaggcggacaacaugaucaccgagaugcuccagaaggaguacauggaccggcagggcaagaccccgcuggggcugguggaccucuucgucuucuccaccagcuucuaccugaucuccaucuuccugcaccuggugaagaucccgacgcaccgccacaucgugggcaagcccugccccaagccccaccggcucaaccacauggggaucugcagcugcggccuguacaagcacccggggguccccgugaaguggaagcgcugaggacuagucccuguucccagagcccacuuuuuuuucuuuuuuugaaauaaaauagccugucuuucagaucucaaaggcucuuuucagagccaccaaaaaaaaaaaaaaaaaaaaaaaaaaaaaaaaaaaaaaaaaaaaaaaaaaaaaaaaaaaaaaaaagaauu

SEQ ID NO: 23496 - RNA, 1733 nt, Artificial Sequence
  mRNA product Design a-2 (hSL-A64-N5) comprising derived and/or modified sequence from LASV(GA391;Clade III)__CAA36645__GPCmut2 (opt1)
aggagaguccgcucagccagguugcagaagcggcuuagcguguguccuaaucuucucucugcguguagguaggccugugccgcaaacaagcuuaccaugggccagaucgugaccuucuuccaggaggucccccacgugaucgaggaggugaugaacaucguccugaucgcccucagcauccuggccauccugaaggggcucuacaacguggcgaccugcggccugaucgggcuggugacguuccuccugcuguccggccgcagcugcucccucaucuacaaggggaccuacgagcugcagacccuggagcucaacauggagacccugaacaugugcaugccgcugagcugcaccaagaacaacucccaccacuacauccgggucggcaacgagaccggccucgagcugacccugacgaacaccagcauccucaaccacaaguucugcaaccuguccgacgcccacaagcgcaaccuguacgaccacagccucauguccaucaucagcaccuuccaccuguccauccccaacuucaaccaguacgaggccaugagcugcgacuucaacgggggcaagaucaccgugcaguacaaccugucccacagcuucgccguggacgccgcggggcacugcggcacgcucgccaacgggguccugcagaccuucaugcggauggccuggggcggcuccuacaucgcccuggacagcgggcgcggcaacugggacugcaucaugaccuccuaccaguaccucaucauccagaacaccacgugggacgaccacugccaguucagccggcccucccccaucggguaccugggccugcucagccagcgcacccgggacaucuacaucagccgccggcgccggggcaccuucaccuggacgcucuccgacagcgaggggaacgagaccccgggcggguacugccugacccgcuggaugcugaucgaggcggagcucaagugcuucggcaacaccgccguggccaagugcaacgagaagcacgacgaggaguucugcgacaugcugcggcuguucgacuucugcaagcaggccauccgccggcucaagacgcccgcccagauguccauccagcugaucaacaaggcggugaacgcccugaucaacgaccagcucaucaugaagaaccaccuccgcgacaucauggggauccccuacugcaacuacagccgguacugguaccugaaccacaccuccaccggcaagaccagccugccccgcugcuggcugaucuccaacggcagcuaccugaacgagacgaaguucuccgacgacaucgagcagcaggccgacaacaugaucaccgagaugcuccagaaggaguacaucgaccggcaggggaagacgccccugggccuggucgaccuguucguguucagcaccuccuucuaccucaucagcaucuuccugcaccuggugaagaucccgacccaccgccacaucgucgggaagcccugccccaagccccaccggcucaaccacaugggcaucugcuccugcgggcuguacaagcagccgggcgugcccgugcgcuggaagcggugaggacuagucccuguucccagagcccacuuuuuuuucuuuuuuugaaauaaaauagccugucuuucagaucucaaaggcucuuuucagagccaccaaaaaaaaaaaaaaaaaaaaaaaaaaaaaaaaaaaaaaaaaaaaaaaaaaaaaaaaaaaaaaaaagaauu

SEQ ID NO: 23497 - RNA, 1736 nt, Artificial Sequence
  mRNA product Design a-2 (hSL-A64-N5) comprising derived and/or modified sequence from LASV(AV;Clade V)__CCA30314__GPCmut2 (opt1)
aggagaguccgcucagccagguugcagaagcggcuuagcguguguccuaaucuucucucugcguguagguaggccugugccgcaaacaagcuuaccaugggccagaucgugaccuucuuccaggaggucccccacgugaucgaggaggugaugaacaucguccugaucgcccucagcauccuggccgugcugaaggggcucuacaacaucgcgaccugcggccugaucgggcugaucacguuccuccugcugugcggccgcuccugcagcuccaaccucuacaaggggguguacgagcugcagagccuggaccucaacauggagacccugaacaugugcaugccgcuguccugcaccaagaacaacagccaccacuacauccgggucggcaacgacacgggccucgagcugacccugaccaacaccuccauccucaaccacaaguucugcaaccugagcgacgcccacaagaaggaccuguacgaccacgcccucauguccaucaucagcacguuccaccuguccauccccaacuucaaccaguacgaggccaugagcugcgacuucaacgggggcaagaucuccgugcaguacaaccugagccacuccuacgccaucgacgcggccaaccacugcgggaccguggccaacggcauccuccagaccuucaugcgcauggccuggggcgggagcuacaucgcgcuggacuccggccgggggaacugggacugcaucaugaccagcuaccaguaccugaucauccagaacacgaccugggagaaccacugccaguucucccgccccagccccaucggcuaccucgggcugcugagccagcggacccgcgacaucuacaucucccggcgccgccggggcaccuucacguggacccugagcgacuccgagggcaacgccacccccgggggcuacugccucacccgguggaugcugaucgaggccgagcugaagugcuucgggaacacggccgucgccaagugcaacgagaagcacgacgaggaguucugcgacaugcuccgccuguucgacuucugcaagcaggcgaucagccggcugaagucccccgcccagaugagcauccagcucaucaacaaggccgugaacgcccugaucaacgaccagcugaucaugaagaaccaccuccgcgacaucaugggcauccccuacugcaacuacuccaaguacugguaccugaaccacaccaucaccgggaagaccagccugcccaagugcuggcucguguccaacggcagcuaccugaacgagacgcacuucuccgacgacaucgagcagcaggccgacaacaugaucaccgagaugcugcagaaggaguacauggagcggcagggcaagaccccgcucgggcuggucgaccuguucguguucagcaccuccuucuaccugaucagcaucuuccuccgccuggugaagaucccgacgcaccggcacaucgucggcaagcccugccccaagccccaccgccugaaccacauggggaucugcuccugcggccucuacaagcagccgggggugcccgugcgguggaagcgcugaggacuagucccuguucccagagcccacuuuuuuuucuuuuuuugaaauaaaauagccugucuuucagaucucaaaggcucuuuucagagccaccaaaaaaaaaaaaaaaaaaaaaaaaaaaaaaaaaaaaaaaaaaaaaaaaaaaaaaaaaaaaaaaaagaauu

SEQ ID NO: 23498 - RNA, 1733 nt, Artificial Sequence
  mRNA product Design a-2 (hSL-A64-N5) comprising derived and/or modified sequence from LASV(Togo/2016/7082;Clade VI)__AMR44577__GPCmut2 (opt1)
aggagaguccgcucagccagguugcagaagcggcuuagcguguguccuaaucuucucucugcguguagguaggccugugccgcaaacaagcuuaccaugggccagaucaucaccuucuuccaggaggugccccacgucaucgaggaggugaugaacaucgugcugaucgcccucagccugcuggccauccucaagggggucuacaacguggcgaccugcggcaucaucgggcuggugacguuccuguuccucugcggccgcuccugcagccugaucuacaagggguccuacgagcugcagacccucgagcugaacauggagacccugaacaugugcaugccgcucagcugcacgaagaacuccagccaccacuacauccgggucggcaacgagaccggccuggagcugacccucaccaacacguccaucaucaaccacaaguucugcaaccugagcgacgcccacaagcgcaaccuguacgaccacgcccucauguccauccugagcaccuuccaccuguccauccccaacuucaaccaguacgaggccaugagcugcgacuucaacgggggcaagaucuccgugcaguacaaccucagccacgccuacgcgguggacgccgccgagcacugcgggaccgucgccaacggcgugcugcagaccuucaugcggauggcguggggcggguccuacaucgcccuggacagcggccgcgggaacugggacugcaucaugacguccuaccaguaccucaucauccagaacaccaccugggaggaccacugccaguucagccggcccucccccaucggcuaccuggggcugcucagccagcgcacccgggacaucuacaucagccgccggcgccggggcacguucaccuggacccucuccgacagcgagggcaacgagacccccgggggcuacugccugacgcgcuggaugcugaucgaggccgagcucaagugcuucgggaacaccgccguggccaagugcaacgagaagcacgacgaggaguucugcgacaugcugcggcuguucgacuucugcaagcaggcgauccagcgccucaagucccccgcccagaugagcauccagcugaucaacaaggccgucaacgcccugaucaacgaccagcucaucaugaagaaccaccuccgggacaugaugggcauccccuacugcaacuacuccaaguacugguaccugaaccacaccagcuccgggcgcaccagccugcccaagugcuggcugguguccaacggcagcuaccugaacgagacgcacuucuccgacgacaucgagcagcaggccgacaacaugaucaccgagaugcuccagaaggaguacaucgaccggcagggcaagaccccgcuggggcugguggaccucuucgucuucagcaccuccuucuaccugaucagcaucuuccugcaccugaucaagaucccgacgcaccgccacaucgugggcaagcccugccccaagccccaccggcucaaccacauggggaucugcuccugcggccuguacaagcagccgggggugcccacccgcuggaagcggugaggacuagucccuguucccagagcccacuuuuuuuucuuuuuuugaaauaaaauagccugucuuucagaucucaaaggcucuuuucagagccaccaaaaaaaaaaaaaaaaaaaaaaaaaaaaaaaaaaaaaaaaaaaaaaaaaaaaaaaaaaaaaaaaagaauu

SEQ ID NO: 23499 - RNA, 1733 nt, Artificial Sequence
  mRNA product Design a-2 (hSL-A64-N5) comprising derived and/or modified sequence from LASV(KAK-428;Clade n.d. (VII))__ANH09740__GPCmut2 (opt1)
aggagaguccgcucagccagguugcagaagcggcuuagcguguguccuaaucuucucucugcguguagguaggccugugccgcaaacaagcuuaccaugggccagaucgugaccuucuuccaggaggucccccacgugaucgaggaggugaugaacaucguccugaucgcccucagccugcuggccauccucaaggggcuguacaacuucgcgaccugcggcgugaucgggcugaucacguuccuccugcugugcggccgcuccugcagcgccaccuacaaggggcaguacgagcuccagacccuggagcugaacauggagucccucaacaugugcaugccgcugagcugcacgaagaacaacucccaccacuacauccgggccggcaacaacaccggccuggagcucacccugaccaacacgagcaucaucucccacaaguucugcaaccugagcgacgcccacaagaagaaccucuacgaccacacccugauguccaucaucaccaccuuccaccugagcauccccaacuucaaccaguacgaggccauguccugcgacuucaacgggggcaagaucagcauccaguacaaccucucccacagcuacgcgggggacgccgcccagcacugcggcacgguggccaacgggguccugcagaccuucaugcgcauggcguggggcggcuccuaccuggcccucgacagcgggcggcgcggcugggacugcaucaucuccagcuaccaguaccugaucauccagaacaccaccugggacgaccacugccaguucucccggcccagccccaucggguaccugggcuucgugagccagaagacgcgcgacaucuacaucucccggcgccgccggggcaccuucaccuggacccugagcgacuccgaggggcacgacaugccgggcggguacugccucacgcgguggaugcugaucgaggccgaccugaagugcuucggcaacaccgccguggccaagugcaacgagaagcacgacgaggaguucugcgacauguggcgccucuucgacuucugcaagcaggcgauccagcggcugaaggcccccgcccagaugaacauccagcugaucaacaaggccgucaacgcccucaucaacgaccagcugaugaugaagaaccaccuccgcgacaucauggggauccccuacugcaacuacagcaaguucugguaccugaacaacaccaccacgggccggaccucccugccccgcugcuggcugaucagcaacggcuccuaccucaacgagacccacuucagcgacgacaucgagcagcaggcggacaacaugaucaccgagaugcugcagaaggaguacauggaccggcaggggaagacgccccugggccucguggaccuguucguguucuccaccagcuucuaccugaucaccaucuuccuccaccuggucaagaucccgacccaccgccacaucguggggaagcccugccccaagccccaccggcugaaccacaugggcaucugcuccugcgggcuguacaagcagccgggcgugcccguccgcuggaagcggugaggacuagucccuguucccagagcccacuuuuuuuucuuuuuuugaaauaaaauagccugucuuucagaucucaaaggcucuuuucagagccaccaaaaaaaaaaaaaaaaaaaaaaaaaaaaaaaaaaaaaaaaaaaaaaaaaaaaaaaaaaaaaaaaagaauu

SEQ ID NO: 23500 - RNA, 1733 nt, Artificial Sequence; identical to SEQ ID NO: 23494
  mRNA product Design a-2 (hSL-A64-N5) comprising derived and/or modified sequence from LASV(Pinneo-NIG-1969;Clade I)__AIT17836__GPCmut2 (opt1)

SEQ ID NO: 23501 - RNA, 1733 nt, Artificial Sequence
  mRNA product Design a-2 (hSL-A64-N5) comprising derived and/or modified sequence from LASV(ISTH0009-NIG-2011;Clade II)__AIT17404__GPCmut2 (opt1)
aggagaguccgcucagccagguugcagaagcggcuuagcguguguccuaaucuucucucugcguguagguaggccugugccgcaaacaagcuuaccaugggccagaucaucaccuucuuccaggaggugccccacgucaucgaggaggugaugaacaucgugcugaucgcccucagccugcuggccauccucaaggggaucuacaacgucgcgaccugcggccuguucgggcugguguccuuccuccugcugugcggccgcagcugcuccacgaccuacaaggggguguacgagcuccagacccuggagcuggacauggccagccucaacaugugcaugccgcuguccugcacgaagaacaacagccaccacuacaucauggucggcaacgagaccggccuggagcucacccugaccaacacguccaucaucaaccacaaguucugcaaccugagcgacgcccacaagaagaaccucuacgaccacgcccugauguccaucaucagcaccuuccaccuguccauccccaacuucaaccaguacgaggccaugagcugcgacuucaacgggggcaagaucuccgugcaguacaaccucagccacgcguacgccguggacgccgccaaccacugcgggaccaucgcgaacggcguccugcagaccuucaugcggauggccuggggcggguccuacaucgcccuggacagcggcaagggguccugggacugcaucaugacgagcuaccaguaccucaucauccagaacaccaccugggaggaccacugccaguucucccgccccagccccaucggcuaccuggggcugcucagccagcggacccgcgacaucuacaucucccggcgccgccggggcacguucaccuggacccucagcgacuccgagggcaacgagacccccgggggcuacugccugacgcgguggaugcugaucgaggccgagcucaagugcuucgggaacaccgccguggcgaagugcaacgagaagcacgacgaggaguucugcgacaugcugcgccuguucgacuucugcaagcaggccauccggcgccucaagacccccgcccagaugagcauccagcugaucaacaaggccgugaacgcccugaucaacgaccagcucaucaugaagaaccaccuccgggacaucaugggcaucccguacugcaacuacuccaaguacugguaccugaaccacaccgucacggggaagaccagccugccccgcugcuggcugguguccaacggcagcuaccugaacgagacccacuucuccgacgacaucgagcagcaggcggacaacaugaucaccgagcuccugcagaaggaguacauggaccggcagggcaagacgccccuggggcucguggaccuguucgucuucagcaccuccuucuaccugaucagcaucuuccugcaccucaucaagaucccgacccaccgccacaucaccggcaagcccugccccaagccccaccggcugaaccacauggggaucugcuccugcggccuguacaagcacccgggggugcccgugaaguggaagcgcugaggacuagucccuguucccagagcccacuuuuuuuucuuuuuuugaaauaaaauagccugucuuucagaucucaaaggcucuuuucagagccaccaaaaaaaaaaaaaaaaaaaaaaaaaaaaaaaaaaaaaaaaaaaaaaaaaaaaaaaaaaaaaaaaagaauu

SEQ ID NO: 23502 - RNA, 1733 nt, Artificial Sequence
  mRNA product Design a-2 (hSL-A64-N5) comprising derived and/or modified sequence from LASV(ISTH2010-NIG-2012;Clade II)__AIT17482__GPCmut2 (opt1)
aggagaguccgcucagccagguugcagaagcggcuuagcguguguccuaaucuucucucugcguguagguaggccugugccgcaaacaagcuuaccaugggccagaucaucaccuucuuccaggaggugccccacgucaucgaggaggugaugaacaucgugcugaucgcccucagccugcuggccauccucaaggggaucuacaacgucgcgaccugcggccuguucgggcugguguccuuccuccugcugugcggccgcagcugcuccacgaccuacaaggggguguacgagcuccagacccuggagcuggacauggccagccucaacaugugcaugccgcuguccugcacgaagaacaacagccaccacuacaucauggucggcaacgagaccggccuggagcucacccugaccaacacguccaucaucaaccacaaguucugcaaccugagcgacgcccacaagaagaaccucuacgaccacgcccugauguccaucaucagcaccuuccaccuguccauccccaacuucaaccaguacgaggccaugagcugcgacuucaacgggggcaagaucuccgugcaguacaaccucagccacgcguacgccguggacgccgccaaccacugcgggaccaucgcgaacggcguccugcagaccuucaugcggauggccuggggcggguccuacaucgcccuggacagcggcaagggguccugggacugcaucaugacgagcuaccaguaccucaucauccagaacaucaccugggaggaccacugccaguucucccgccccagccccaucggcuaccuggggcugcucagccagcggacccgcgacaucuacaucucccggcgccgccggggcaccuucacguggacccucagcgacuccgagggcaacgagacccccgggggcuacugccugacccgguggaugcugaucgaggccgagcucaagugcuucgggaacacggccguggcgaagugcaacgagaagcacgacgaggaguucugcgacaugcugcgccuguucgacuucugcaagcaggccauccggcgccucaagacccccgcccagaugagcauccagcugaucaacaaggccgugaacgcccugaucaacgaccagcucaucaugaagaaccaccuccgggacaucaugggcauccccuacugcaacuacuccaaguacugguaccugaaccacaccgucaccgggaagacgagccugccccgcugcuggcugguguccaacggcagcuaccugaacgagacccacuucuccgacgacaucgagcagcaggcggacaacaugaucaccgagcuccugcagaaggaguacaucgaccggcagggcaagaccccgcuggggcucguggaccuguucgucuucagcacguccuucuaccugaucagcaucuuccugcaccucgugaagaucccgacccaccgccacguggucggcaagcccugccccaagccccaccggcugaaccacauggggaucugcuccugcggccuguacaagcacccgggggugcccgugaaguggaagcgcugaggacuagucccuguucccagagcccacuuuuuuuucuuuuuuugaaauaaaauagccugucuuucagaucucaaaggcucuuuucagagccaccaaaaaaaaaaaaaaaaaaaaaaaaaaaaaaaaaaaaaaaaaaaaaaaaaaaaaaaaaaaaaaaaagaauu

SEQ ID NO: 23503 - RNA, 1733 nt, Artificial Sequence
  mRNA product Design a-2 (hSL-A64-N5) comprising derived and/or modified sequence from LASV(Lassa virus/H.sapiens-wt/NGA/2015/ISTH_0543;Clade II)__AVO03639__GPCmut2 (opt1)
aggagaguccgcucagccagguugcagaagcggcuuagcguguguccuaaucuucucucugcguguagguaggccugugccgcaaacaagcuuaccaugggccagaucaucaccuucuuccaggaggugccccacgucaucgaggaggugaugaacaucgugcugaucgcccucagccugcuggccauccucaaggggaucuacaacgucgcgaccugcggccuguucgggcugguguccuuccuccugcugugcggccgcagcugcuccacgaccuacaaggggguguacgagcuccagacccuggagcuggacauggccaaccucaacaugugcaugccgcugagcugcacgaagaacaacucccaccacuacaucauggucggcaacgagaccggccuggagcucacccugaccaacacgagcaucaucaaccacaaguucugcaaccuguccgacgcccacaagaagaaccucuacgaccacgcccugaugagcaucaucuccaccuuccaccugagcauccccaacuucaaccaguacgaggccauguccugcgacuucaacgggggcaagaucagcgugcaguacaaccucucccacaccuacgcgguggacgccgccaaccacugcgggaccaucgccaacggcguccugcagacguucaugcggauggcguggggcgggagcuacaucgcccuggacuccggcaaggggagcugggacugcaucaugaccuccuaccaguaccucgugauccagaacaccaccugggaggaccacugccaguucagccgccccucccccaucggcuaccuggggcugcucagccagcggacgcgcgacaucuacaucagccggcgccgccggggcaccuucaccuggacccucuccgacagcgagggcaacgagacgcccgggggcuacugccugacccgguggaugcugaucgaggccgagcucaagugcuucgggaacaccgccguggccaagugcaacgagaagcacgacgaggaguucugcgacaugcugcgccuguucgacuucugcaagcaggcgauccggcgccucaagacccccgcccagauguccauccagcugaucaacaaggccgucaacgcccugaucaacgaccagcucaucaugaagaaccaccuccgggacaucaugggcauccccuacugcaacuacagcaaguacugguaccugaaccacacggugaccgggaagaccucccugccccgcugcuggcuggugagcaacggcuccuaccugaacgagacccacuucagcgacgacaucgagcagcaggccgacaacaugaucacggagcuccugcagaaggaguacaucgaccggcagggcaagaccccgcuggggcucgucgaccuguucguguucuccaccagcuucuaccugaucuccaucuuccugcaccucgugaagaucccgacccaccgccacaucacgggcaagcccugccccaagccccaccggcugaaccacauggggaucugcagcugcggccuguacaagcacccggggguccccgugaaguggaagcgcugaggacuagucccuguucccagagcccacuuuuuuuucuuuuuuugaaauaaaauagccugucuuucagaucucaaaggcucuuuucagagccaccaaaaaaaaaaaaaaaaaaaaaaaaaaaaaaaaaaaaaaaaaaaaaaaaaaaaaaaaaaaaaaaaagaauu

SEQ ID NO: 23504 - RNA, 1733 nt, Artificial Sequence
  mRNA product Design a-2 (hSL-A64-N5) comprising derived and/or modified sequence from LASV(Lassa virus/H.sapiens-wt/NGA/2016/ISTH_0009;Clade II)__AVO03571__GPCmut2 (opt1)
aggagaguccgcucagccagguugcagaagcggcuuagcguguguccuaaucuucucucugcguguagguaggccugugccgcaaacaagcuuaccaugggccagaucaucaccuucuuccaggaggugccccacgucaucgaggaggugaugaacaucgugcugaucgcccucagccugcuggccauccucaaggggaucuacaacgucgcgaccugcggccugcuggggcucguguccuuccugcugcucugcggccgcagcugcuccacgaccuacaaggggguguacgagcugcagacccuggagcucgacauggccagccugaacaugugcaugccgcuguccugcacgaagaacaacagccaccacuacaucauggucggcaacgagaccggccucgagcugacccugaccaacacguccaucaucaaccacaaguucugcaaccucagcgacgcccacaagaagaaccuguacgaccacgcccugauguccaucaucagcaccuuccaccucuccauccccaacuucaaccaguacgaggccaugagcugcgacuucaacgggggccggaucuccgugcaguacaaccugagccacuccuacgcgguggacgccgccaaccacugcgggaccaucgccaacggcguccugcagaccuucaugcgcauggcguggggcgggagcuacaucgcccucgacuccggcaaggggagcugggacugcaucaugacguccuaccaguaccugaucauccagaacaccaccugggaggaccacugccaguucagccggcccagccccaucggcuaccuggggcuccugucccagcgcacccgggacaucuacaucagccgccggcgccggggcacguucaccuggacccuguccgacagcgagggcaacgagacccccgggggcuacugccugacgcgcuggaugcucaucgaggccgagcugaagugcuucgggaacaccgccguggccaagugcaacgagaagcacgacgaggaguucugcgacaugcugcggcuguucgacuucugcaagcaggcgauccgccggcugaagacccccgcccagauguccauccagcugaucaacaaggccgugaacgcccucaucaacgaccagcugaucaugaagaaccaccuccgcgacaucaugggcaucccguacugcaacuacagcaaguacugguaccucaaccacaccgucacggggaagaccucccugccccggugcuggcuggugagcaacggcuccuaccucaacgagacccacuucagcgacgacaucgagcagcaggccgacaacaugaucaccgagcugcugcagaaggaguacaucgaccgccagggcaagacgccccucgggcugguggaccuguucgucuucuccaccagcuucuaccugaucuccaucuuccuccaccuggugaagaucccgacccaccggcacaucaccggcaagcccugccccaagccccaccgccugaaccacauggggaucugcagcugcggccucuacaaccacccgggggugcccgucaaguggaagcggugaggacuagucccuguucccagagcccacuuuuuuuucuuuuuuugaaauaaaauagccugucuuucagaucucaaaggcucuuuucagagccaccaaaaaaaaaaaaaaaaaaaaaaaaaaaaaaaaaaaaaaaaaaaaaaaaaaaaaaaaaaaaaaaaagaauu

SEQ ID NO: 23505 - RNA, 1733 nt, Artificial Sequence
  mRNA product Design a-2 (hSL-A64-N5) comprising derived and/or modified sequence from LASV(Lassa virus/H.sapiens-wt/NGA/2016/ISTH_0017;Clade II)__AVO03567__GPCmut2 (opt1)
aggagaguccgcucagccagguugcagaagcggcuuagcguguguccuaaucuucucucugcguguagguaggccugugccgcaaacaagcuuaccaugggccagaucaucaccuucuuccaggaggugccccacgucaucgaggaggugaugaacaucgugcugaucgcccucagccugcuggccauccucaaggggaucuacaacgucgcgaccugcggccuguucgggcugguguccuuccuccugcugugcggccgcagcugcuccacgaccuacaaggggguguacgagcuccagacccuggagcuggacauggccagccucaacaugugcaugccgcuguccugcacgaagaacaacagccaccacuacaucauggucggcaacgagaccggccuggagcucacccugaccaacacguccaucaucaaccacaaguucugcaaccugagcgacgcccacaagaagaaccucuacgaccacgcccugauguccaucaucagcaccuuccaccuguccauccccaacuucaaccaguacgaggccaugagcugcgacuucaacgggggcaagaucuccgugcaguacaaccucagccacaccuacgcgaucgacgccgccaaccacugcgggaccaucgccaacggcgugcugcagacguucaugcggauggcguggggcggguccuacaucgcccuggacagcggcaagggguccugggacugcaucaugaccagcuaccaguaccucaucauccagaacaccaccugggaggaccacugccaguucucccgccccagccccaucggcuaccuggggcugcucagccagcggacgcgcgacaucuacaucucccggcgccgccggggcaccuucaccuggacccucagcgacuccgagggcaacgagacgcccgggggcuacugccugacccgguggaugcugaucgaggccgagcucaagugcuucgggaacaccgccgucgccaagugcaacgagaagcacgacgaggaguucugcgacaugcugcgccuguucgacuucugcaagcaggcgauccggcgccucaagacccccgcccagaugagcauccagcugaucaacaaggccgugaacgcccugaucaacgaccagcucaucaugaagaaccaccuccgggacaucaugggcauccccuacugcaacuacuccaaguacugguaccugaaccacacggugaccgggaagaccagccugccccgcugcuggcuggucuccaacggcagcuaccugaacgagacccacuucuccgacgacaucgagcagcaggccgacaacaugaucacggagcuccugcagaaggaguacauggaccggcagggcaagaccccgcuggggcucguggaccuguucguguucagcaccuccuucuaccugaucagcaucuuccugcaccucguccgcaucccgacccaccggcacgugaucggcaagcccugccccaagccccaccgccugaaccacauggggaucugcuccugcggccuguacaagcacccgggggugcccgucaaguggaagcggugaggacuagucccuguucccagagcccacuuuuuuuucuuuuuuugaaauaaaauagccugucuuucagaucucaaaggcucuuuucagagccaccaaaaaaaaaaaaaaaaaaaaaaaaaaaaaaaaaaaaaaaaaaaaaaaaaaaaaaaaaaaaaaaaagaauu

SEQ ID NO: 23506 - RNA, 1733 nt, Artificial Sequence
  mRNA product Design a-2 (hSL-A64-N5) comprising derived and/or modified sequence from LASV(Lassa virus/H.sapiens-wt/NGA/2018/ISTH_0959;Clade II)__AVV65099__GPCmut2 (opt1)
aggagaguccgcucagccagguugcagaagcggcuuagcguguguccuaaucuucucucugcguguagguaggccugugccgcaaacaagcuuaccaugggccagaucaucaccuucuuccaggaggugccccacgucaucgaggaggugaugaacaucgugcugaucgcccucagccugcuggccauccucaaggggaucuacaacgucgugaccugcggccuguucgggcugguguccuuccuccugcugugcggccgcagcugcuccacgaccuacaagggggucuacgagcuccagacccuggagcuggacauggcgagccucaacaugugcaugccgcuguccugcacgaagaacaacagccaccacuacaucauggugggcaacgagaccggccuggagcucacccugaccaacacguccaucaucaaccacaaguucugcaaccugagcgacgcccacaagaagaaccucuacgaccacgcccugauguccaucaucagcaccuuccaccuguccauccccaacuucaaccaguacgaggccaugagcugcgacuucaacgggggcaagaucuccgugcaguacaaccucagccacgccuacgcgaucgacgccgccaaccacugcgggaccaucgccaacggcguccugcagaccuucaugcggauggcguggggcggguccuacaucgcccuggacagcggcaagggguccugggacugcaucaugacgagcuaccaguaccucaucauccagaacaccaccugggaggaccacugccaguucucccgccccagccccaucggcuaccuggggcugcucagccagcggacccgcgacaucuacaucucccggcgccgccggggcacguucaccuggacccucagcgacuccgagggcaacgagacccccgggggcuacugccugacgcgguggaugcugaucgaggccgagcucaagugcuucgggaacaccgccguggccaagugcaacgagaagcacgacgaggaguucugcgacaugcugcgccuguucgacuucugcaagcaggcgauccggcgccucaagacccccgcccagaugagcauccagcugaucaacaaggccgugaacgcccugaucaacgaccagcucaucaugaagaaccaccuccgggacaucaugggcaucccguacugcaacuacuccaaguacugguaccugaaccacaccgucacggggaagaccagccugccccgcugcuggcugguguccaacggcagcuaccugaacgagacccacuucuccgacgacaucgagcagcaggccgacaacaugaucaccgagcuccugcagaaggaguacaucgaccggcagggcaagacgccccuggggcucguggaccuguucgucuucagcaccuccuucuaccugaucagcaucuuccugcaccucgugaagaucccgacccaccgccacgugaucggcaagcccugccccaagccccaccggcugaaccacauggggaucugcuccugcggccuguacaagcacccggggguccccgugaaguggaagcgcugaggacuagucccuguucccagagcccacuuuuuuuucuuuuuuugaaauaaaauagccugucuuucagaucucaaaggcucuuuucagagccaccaaaaaaaaaaaaaaaaaaaaaaaaaaaaaaaaaaaaaaaaaaaaaaaaaaaaaaaaaaaaaaaaagaauu

SEQ ID NO: 23507 - RNA, 1733 nt, Artificial Sequence
  mRNA product Design a-2 (hSL-A64-N5) comprising derived and/or modified sequence from LASV(LASV003-NIG-2008;Clade II)__AIT17580__GPCmut2 (opt1)
aggagaguccgcucagccagguugcagaagcggcuuagcguguguccuaaucuucucucugcguguagguaggccugugccgcaaacaagcuuaccaugggccagaucaucaccuucuuccaggaggugccccacgucaucgaggaggugaugaacaucgugcugaucgcccucagccugcuggccauccucaaggggaucuacaacgucgcgaccugcggccuguucgggcugguguccuuccuccugcugugcggccgcagcugcuccacgaccuacaaggggguguacgagcuccagacccuggagcuggacauggccagccucaacaugugcaugccgcuguccugcacgaagaacaacagccaccacuacaucauggucggcaacgagaccggccuggagcucacccugaccaacacguccaucaucaaccacaaguucugcaaccugagcgacgcccacaagaagaaccucuacgaccacgcccugauguccaucaucagcaccuuccaccuguccauccccaacuucaaccaguacgaggccaugagcugcgacuucaacgggggcaagaucuccgugcaguacaaccucagccacaccuacgcgguggacgccgccaaccacugcgggaccaucgccaacggcguccugcagacguucaugcggauggcguggggcggguccuacaucgcccuggacagcggcaagggguccugggacugcaucaugaccagcuaccaguaccucaucauccagaacaccaccugggaggaccacugccaguucucccgccccagccccaucggcuaccuggggcugcucagccagcggacgcgcgacaucuacaucucccggcgccgccggggcaccuucaccuggacccucagcgacuccgagagcaacgagacgccgggcggguacugccugacccgguggaugcugaucgaggccgagcucaagugcuucggcaacaccgccguggccaagugcaacgagaagcacgacgaggaguucugcgacaugcugcgccuguucgacuucugcaagcaggcgauccggcgccucaaggcccccgcccagauguccauccagcugaucaacaaggccgugaacgcccugaucaacgaccagcucaucaugaagaaccaccuccgggacaucauggggauccccuacugcaacuacagcaaguacugguaccugaaccacaccgucacgggccgcaccucccugccccggugcuggcuggugagcaacggguccuaccugaacgagacccacuucagcgacgacaucgagcagcaggcggacaacaugaucaccgagcuccugcagaaggaguacauggaccgccagggcaagacgccccugggccucguggaccuguucgucuucuccaccagcuucuaccugaucuccaucuuccugcaccucgugaagaucccgacccaccggcacgugaucgggaagcccugccccaagccccaccgccugaaccacaugggcaucugcagcugcgggcuguacaagcacccgggcguccccgugaaguggaagcggugaggacuagucccuguucccagagcccacuuuuuuuucuuuuuuugaaauaaaauagccugucuuucagaucucaaaggcucuuuucagagccaccaaaaaaaaaaaaaaaaaaaaaaaaaaaaaaaaaaaaaaaaaaaaaaaaaaaaaaaaaaaaaaaaagaauu

SEQ ID NO: 23508 - RNA, 1733 nt, Artificial Sequence
  mRNA product Design a-2 (hSL-A64-N5) comprising derived and/or modified sequence from LASV(LASV035-NIG-2009;Clade II)__AIT17588__GPCmut2 (opt1)
aggagaguccgcucagccagguugcagaagcggcuuagcguguguccuaaucuucucucugcguguagguaggccugugccgcaaacaagcuuaccaugggccagaucaucaccuucuuccaggaggugccccacgucaucgaggaggugaugaacaucgugcugaucgcccucagccugcuggccauccucaaggggaucuacaacgucgcgaccugcggccuguucgggcugguguccuuccuccugcugugcggccgcagcugcuccacgaccuacaaggggguguacgagcuccagacccuggagcuggacauggccagccucaacaugugcaugccgcuguccugcacgaagaacaacagccaccacuacaucauggucggcaacgagaccggccuggagcucacccugaccaacacguccaucaucaaccacaaguucugcaaccugagcgacgcccacaagaagaaccucuacgaccacgcccugauguccaucaucagcaccuuccaccuguccauccccaacuucaaccaguacgaggccaugagcugcgacuucaacgggggcaagaucuccgugcaguacaaccucagccacgcguacgccguggacgccgccaaccacugcgggaccaucgcgaacggcguccugcagaccuucaugcggauggccuggggcggguccuacaucgcccuggacagcggcaagggguccugggacugcaucaugacgagcuaccaguaccucaucauccagaacaccaccugggaggaccacugccaguucucccgccccagccccaucggcuaccuggggcugcucagccagcggacccgcgacaucuacaucucccggcgccgccggggcacguucaccuggacccucagcgacuccgagggcaacgagacccccgggggcuacugccugacgcgguggaugcugaucgaggccgagcucaagugcuucgggaacaccgccguggcgaagugcaacgagaagcacgacgaggaguucugcgacaugcugcgccuguucgacuucugcaagcaggccauccggcgccucaaggcccccgcccagaugagcauccagcugaucaacaaggccgugaacgcgcugaucaacgaccagcucaucaugaagaaccaccuccgggacaucaugggcauccccuacugcaacuacuccaaguacugguaccugaaccacaccgucaccgggaagacgagccugccccgcugcuggcugguguccaacggcagcuaccugaacgagacccacuucuccgacgacaucgagcagcaggccgacaacaugaucaccgagcuccugcagaaggaguacaucgaccggcagggcaagaccccgcuggggcucguggaccuguucgucuucagcacguccuucuaccugaucagcaucuuccugcaccucgugaagaucccgacccaccgccacgugaucggcaagcccugccccaagccccaccggcugaaccacauggggaucugcuccugcggccuguacaagcacccggggguccccgugaaguggaagcgcugaggacuagucccuguucccagagcccacuuuuuuuucuuuuuuugaaauaaaauagccugucuuucagaucucaaaggcucuuuucagagccaccaaaaaaaaaaaaaaaaaaaaaaaaaaaaaaaaaaaaaaaaaaaaaaaaaaaaaaaaaaaaaaaaagaauu

SEQ ID NO: 23509 - RNA, 1733 nt, Artificial Sequence
  mRNA product Design a-2 (hSL-A64-N5) comprising derived and/or modified sequence from LASV(LASV1000-NIG-2009;Clade II)__AIT17782__GPCmut2 (opt1)
aggagaguccgcucagccagguugcagaagcggcuuagcguguguccuaaucuucucucugcguguagguaggccugugccgcaaacaagcuuaccaugggccagaucaucaccuucuuccaggaggugccccacgucaucgaggaggugaugaacaucgugcugaucgcccucagccugcuggccauccucaaggggaucuacaacgucgcgaccugcggccuguucgggcugguguccuuccuccugcugugcggccgcagcugcuccacgaccuacaaggggguguacgagcuccagacccuggagcuggacauggccagccucaacaugugcaugccgcuguccugcacgaagaacaacagccaccacuacaucauggucggcaacgagaccggccuggagcucacccugaccaacacguccaucaucaaccacaaguucugcaaccugagcgacgcccacaagaagaaccucuacgaccacgcccugauguccaucaucagcaccuuccaccuguccauccccaacuucaaccaguacgaggccaugagcugcgacuucaacgggggcaagaucuccgugcaguacaaccucagccacaccuacgcgguggacgccgccaaccacugcgggaccaucgccaacggcguccugcagacguucaugcggauggcguggggcggguccuacaucgcccuggacagcggcaagggguccugggacugcaucaugaccagcuaccaguaccucaucauccagaacaccaccugggaggaccacugccaguucucccgccccagccccaucggcuaccuggggcugcucagccagcggacgcgcgacaucuacaucucccggcgccgccggggcaccuucaccuggacccucagcgacuccgagggcaacgagacgcccgggggcuacugccugacccgguggaugcugaucgaggccgagcucaagugcuucgggaacaccgccguggccaagugcaacgagaagcacgacgaggaguucugcgacaugcugcgccuguucgacuucugcaagcaggcgaucaagcggcucaagacccccgcccagaugagcauccagcugaucaacaaggccgugaacgcccugaucaacgaccagcucaucaugaagaaccaccuccgcgacaucaugggcauccccuacugcaacuacuccaaguacugguaccugaaccacacggucaccgggaagaccagccugccccggugcuggcugguguccaacggcagcuaccugaacgagacccacuucuccgacgacaucgagcagcaggccgacaacaugaucacggagcuccugcagaaggaguacaucgaccgccagggcaagaccccgcuggggcucguggaccuguucgucuucagcaccuccuucuaccugaucagcaucuuccugcaccucgugaagaucccgacccaccggcacguggucggcaagcccugccccaagccccaccgccugaaccacauggggaucugcuccugcggccuguacaagcacccgggggugcccgugaaguggaagcggugaggacuagucccuguucccagagcccacuuuuuuuucuuuuuuugaaauaaaauagccugucuuucagaucucaaaggcucuuuucagagccaccaaaaaaaaaaaaaaaaaaaaaaaaaaaaaaaaaaaaaaaaaaaaaaaaaaaaaaaaaaaaaaaaagaauu

SEQ ID NO: 23510 - RNA, 1733 nt, Artificial Sequence
  mRNA product Design a-2 (hSL-A64-N5) comprising derived and/or modified sequence from LASV(LASV221-NIG-2010;Clade II)__AIT17624__GPCmut2 (opt1)
aggagaguccgcucagccagguugcagaagcggcuuagcguguguccuaaucuucucucugcguguagguaggccugugccgcaaacaagcuuaccaugggccagaucaucaccuucuuccaggaggugccccacgucaucgaggaggugaugaacaucgugcugaucgcccucagccugcuggccauccucaaggggaucuacaacgucgcgaccugcggccuguucgggcugguguccuuccuccugcugugcggccgcagcugcuccacgaccuacaaggggguguacgagcuccagacccuggagcuggacauggccagccucaacaugugcaugccgcuguccugcacgaagaacaacagccaccacuacaucauggucggcaacgagaccggccuggagcucacccugaccaacacguccaucaucaaccacaaguucugcaaccugagcgacgcccacaagaagaaccucuacgaccacgcccugauguccaucaucagcaccuuccaccuguccauccccaacuucaaccaguacgaggccaugagcugcgacuucaacgggggcaagaucuccgugcaguacaaccucagccacaccuacgcgaucgacgccgccaaccacugcgggaccaucgccaacggcgugcugcagacguucaugcggauggcguggggcggguccuacaucgcccuggacagcggcaagggguccugggacugcaucaugaccagcuaccaguaccucaucauccagaacaccaccugggaggaccacugccaguucucccgccccagccccaucggcuaccuggggcugcucagccagcggacgcgcgacaucuacaucucccggcgccgccggggcaccuucaccuggacccucagcgacuccgagggcaacgagacgcccgggggcuacugccugacccgguggaugcugaucgaggccgagcucaagugcuucgggaacaccgccgucgccaagugcaacgagaagcacgacgaggaguucugcgacaugcugcgccuguucgacuucugcaagcaggcgauccggcgccucaagacccccgcccagaugagcauccagcugaucaacaaggccgugaacgcccugaucaacgaccagcucaucaugaagaaccaccuccgggacaucaugggcauccccuacugcaacuacuccaaguacugguaccugaaccacacggugaccgggaagaccagccugccccgcugcuggcuggucuccaacggcagcuaccugaacgagacccacuucuccgacgacaucgagcagcaggccgacaacaugaucacggagaugcuccagaaggaguacauggaccggcagggcaagaccccgcuggggcugguggaccucuucguguucagcaccuccuucuaccugaucagcaucuuccugcaccuggucaagaucccgacccaccgccacgugaucggcaagcccugccccaagccccaccggcucaaccacauggggaucugcuccugcggccuguacaagcacccgggggugcccgucaaguggaagcgcugaggacuagucccuguucccagagcccacuuuuuuuucuuuuuuugaaauaaaauagccugucuuucagaucucaaaggcucuuuucagagccaccaaaaaaaaaaaaaaaaaaaaaaaaaaaaaaaaaaaaaaaaaaaaaaaaaaaaaaaaaaaaaaaaagaauu

SEQ ID NO: 23511 - RNA, 1733 nt, Artificial Sequence
  mRNA product Design a-2 (hSL-A64-N5) comprising derived and/or modified sequence from LASV(LASV237-NIG-2010;Clade II)__AIT17638__GPCmut2 (opt1)
aggagaguccgcucagccagguugcagaagcggcuuagcguguguccuaaucuucucucugcguguagguaggccugugccgcaaacaagcuuaccaugggccagaucaucaccuucuuccaggaggugccccacgucaucgaggaggugaugaacaucgugcugaucgcccucagccugcuggccauccucaaggggaucuacaacgucgcgaccugcggccuguucgggcugguguccuuccuccugcugugcggccgcagcugcuccacgaccuacaaggggguguacgagcuccagacccuggagcuggacauggccagccucaacaugugcaugccgcuguccugcacgaagaacaacagccaccacuacaucauggucggcaacgagaccggccuggagcucacccugaccaacacguccaucaucaaccacaaguucugcaaccugagcgacgcccacaagaaggaccucuacgaccacgcccugauguccaucaucagcaccuuccaccuguccauccccaacuucaaccaguacgaggccaugagcugcgacuucaacgggggcaagaucuccgugcaguacaaccucagccacaccuacgcgguggacgccgccaaccacugcgggaccaucgccaacggcguccugcagacguucaugcggauggcguggggcggguccuacaucgcccuggacagcggcaagggguccugggacugcaucaugaccagcuaccaguaccucaucauccagaacaccaccugggaggaccacugccaguucucccgccccagccccaucggcuaccuggggcugcucagccagcggacgcgcgacaucuacaucucccggcgccgccggggcaccuucaccuggacccucagcgacuccgagggcaacgagacgcccgggggcuacugccugacccgguggaugcugaucgaggccgagcucaagugcuucgggaacaccgccguggccaagugcaacgagaagcacgacgaggaguucugcgacaugcugcgccuguucgacuucugcaagcaggcgauccggcgccucaagacccccgcccagaugagcauccagcugaucaacaaggccgugaacgcccugaucaacgaccagcucaucaugaagaaccaccuccgggacaucaugggcauccccuacugcaacuacuccaaguacugguaccugaaccacacggucaccgggaagaccagccugccccgcugcuggcugguguccaacggcagcuaccugaacgagacccacuucuccgacgacaucgagcagcaggccgacaacaugaucacggagcuccugcagaaggaguacauggaccggcagggcaagaccccgcuggggcucguggaccuguucgucuucagcaccuccuucuaccugaucagcaucuuccugcaccucaucaagaucccgacccaccgccacaucacgggcaagcccugccccaagccccaccggcugaaccacauggggaucugcuccugcggccuguacaagcacccgggggugcccgugaaguggaagcgcugaggacuagucccuguucccagagcccacuuuuuuuucuuuuuuugaaauaaaauagccugucuuucagaucucaaaggcucuuuucagagccaccaaaaaaaaaaaaaaaaaaaaaaaaaaaaaaaaaaaaaaaaaaaaaaaaaaaaaaaaaaaaaaaaagaauu

SEQ ID NO: 23512 - RNA, 1733 nt, Artificial Sequence
  mRNA product Design a-2 (hSL-A64-N5) comprising derived and/or modified sequence from LASV(LASV253-NIG-2011;Clade II)__AIT17670__GPCmut2 (opt1)
aggagaguccgcucagccagguugcagaagcggcuuagcguguguccuaaucuucucucugcguguagguaggccugugccgcaaacaagcuuaccaugggccagaucaucaccuucuuccaggaggugccccacgucaucgaggaggugaugaacaucgugcugaucgcccucagccugcuggccauccucaaggggaucuacaacgucgcgaccugcggccuguucgggcugguguccuuccuccugcugugcggccgcagcugcuccacgaccuacaaggggguguacgagcuccagacccuggagcuggacauggccagccucaacaugugcaugccgcuguccugcacgaagaacaacagccaccacuacaucauggucggcaacgagaccggccuggagcucacccugaccaacacguccaucaucaaccacaaguucugcaaccugagcgacgcccacaagaagaaccucuacgaccacgcccugauguccaucaucagcaccuuccaccuguccauccccaacuucaaccaguacgaggccaugagcugcgacuucaacgggggcaagaucuccgugcaguacaaccucagccacaccuacgcgguggacgccgccaaccacugcgggaccaucgccaacggcguccugcagacguucaugcggauggcguggggcggguccuacaucgcccuggacagcggcaagggguccugggacugcaucaugaccagcuaccaguaccucaucauccagaacaccaccugggaggaccacugccaguucucccgccccagccccaucggcuaccuggggcugcucagccagcggacgcgcgacaucuacaucucccggcgccgccggggcaccuucaccuggacccucagcgacuccgagggcaacgagacgcccgggggcuacugccugacccgguggaugcugaucgaggccgagcucaagugcuucgggaacaccgccguggccaagugcaacgagaagcacgacgaggaguucugcgacaugcugcgccuguucgacuucugcaagcaggcgauccggcgccucaaggcccccgcccagaugagcauccagcugaucaacaaggccgugaacgcccugaucaacgaccagcucaucaugaagaaccaccuccgggacaucaugggcaucccguacugcaacuacuccaaguacugguaccugaaccacaccgucacggggcgcaccagccugccccggugcuggcugguguccaacggcagcuaccugaacgagacccacuucuccgacgacaucgagcagcaggcggacaacaugaucaccgagcuccugcagaaggaguacaucgaccgccagggcaagacgccccuggggcucguggaccuguucgucuucagcaccuccuucuaccugaucagcaucuuccugcaccucgugaagaucccgacccaccggcacaucaucggcaagcccugccccaagccccaccgccugaaccacauggggaucugcuccugcggccuguacaagcacccgggggugcccgucaaguggaagcggugaggacuagucccuguucccagagcccacuuuuuuuucuuuuuuugaaauaaaauagccugucuuucagaucucaaaggcucuuuucagagccaccaaaaaaaaaaaaaaaaaaaaaaaaaaaaaaaaaaaaaaaaaaaaaaaaaaaaaaaaaaaaaaaaagaauu

SEQ ID NO: 23513 - RNA, 1733 nt, Artificial Sequence
  mRNA product Design a-2 (hSL-A64-N5) comprising derived and/or modified sequence from LASV(LASV254-NIG-2011;Clade II)__AIT17674__GPCmut2 (opt1)
aggagaguccgcucagccagguugcagaagcggcuuagcguguguccuaaucuucucucugcguguagguaggccugugccgcaaacaagcuuaccaugggccagaucaucaccuucuuccaggaggugccccacgucaucgaggaggugaugaacaucgugcugaucgcccucagccugcuggccauccucaaggggaucuacaacgucgcgaccugcggccuguucgggcugguguccuuccuccugcugugcggccgcagcugcuccacgaccuacaaggggguguacgagcuccagacccuggagcuggacaugaccaaccucaacaugugcaugccgcugagcugcaccaagaacaacucccaccacuacaucauggucggcaacgagaccggccuggagcucacccugacgaacaccagcaucaucaaccacaaguucugcaaccuguccgacgcccacaagaagaaccucuacaaccacgcccugaugagcaucaucuccaccuuccaccugagcauccccaacuucaaccaguacgaggccauguccugcgacuucaacgggggcaagaucagcgugcaguacaaccucucccacagcuacgccguggacgcggccaaccacugcgggaccaucgccaacggcguccugcagacguucaugcggauggccuggggcggguccuacaucgcgcuggacagcggcaaggggaacugggacugcaucaugaccuccuaccaguaccucaucauccagaacaccaccugggaggaccacugccaguucagccgccccucccccaucggcuaccuggggcugcucagccagcggacgcgcgacaucuacaucagccggcgccgccggggcaccuucaccuggacccucuccgacagcgagggcaacgagacgcccgggggcuacugccugacccgguggaugcugaucgaggccgagcucaagugcuucgggaacaccgccguggccaagugcaacgagaagcacgacgaggaguucugcgacaugcugcgccuguucgacuucugcaagcaggccauccggcgccucaagacccccgcgcaggccaacauccagcugaucaacaaggccgugaacgcccugaucaacgaccagcucaucaugaagaaccaccuccgggacaucaugggcauccccuacugcaacuacuccaaguacugguaccugaaccacacggucaccgggaagaccagccugccccgcugcuggcugguguccaacggcagcuaccugaacgagacccacuucuccgacgacaucgagcagcaggccgacaacaugaucacggagcuccugcagaaggaguacauggaccggcagggcaagaccccgcuggggcucguggaccuguucgucuucagcaccuccuucuaccugaucagcaucuuccugcaccucgugaagaucccgacccaccgccacgugaucggcaagcccugccccaagccccaccggcugaaccacauggggaucugcuccugcggccuguacaagcacccggggguccccgugaaguggaagcgcugaggacuagucccuguucccagagcccacuuuuuuuucuuuuuuugaaauaaaauagccugucuuucagaucucaaaggcucuuuucagagccaccaaaaaaaaaaaaaaaaaaaaaaaaaaaaaaaaaaaaaaaaaaaaaaaaaaaaaaaaaaaaaaaaagaauu

SEQ ID NO: 23514 - RNA, 1733 nt, Artificial Sequence
  mRNA product Design a-2 (hSL-A64-N5) comprising derived and/or modified sequence from LASV(Nig08-A19;Clade III)__ADU56618__GPCmut2 (opt1)
aggagaguccgcucagccagguugcagaagcggcuuagcguguguccuaaucuucucucugcguguagguaggccugugccgcaaacaagcuuaccaugggccagaucgugaccuucuuccaggaggucccccacgugaucgaggaggugaugaacaucguccugaucgcccucagcauccuggccauccugaaggggcucuacaacaucgcgaccugcggccugaucgggcuggugacguuccuccugcuguccggccgcagcugcuccaugaccuacaaggggguguacgagcuccagacccuggagcugaacaugaacacccucaacaugugcaugccgcugagcugcaccaagaacaacucccaccacuacaucauggucggcaacgagaccggccuggagcucacccugacgaacaccagccugcuccaccacaaguucugcaaccuguccgacgcccacaagaagaaccuguacgaccacacccucaugagcaucaucuccaccuuccaccugagcauccccaacuucaaccaguacgaggccauguccugcgacuucaacgggggcaagaucacggugcaguacaaccugagccacuccuacgccaucgacgccgcgaaccacugcgggaccguggccaacggcguccuccagaccuucaugcggauggccuggggcgggagcuacaucgcccuggacuccggccgcgggaagugggacugcaucaugaccagcuaccaguaccugaucauccagaacacgaccugggaggaccacugccaguucucccggcccagccccaucggcuaccucgggcugcugucccagcgcacccgggacaucuacaucagccgccggcgccggggcaccuucacguggacccugagcgacuccgagggcaacgagacccccgggggcuacugccucacccgcuggaugcugaucgaggcggagcugaagugcuucgggaacacggccguggccaagugcaacgagaagcacgacgaggaguucugcgacaugcuccggcuguucgacuucugcaagcaggccauccgccggcugaaggcccccgcgcagaugagcauccagcucaucaacaaggccgugaacgcccugaucaacgaccagcugaucaugaagaaccaccuccgcgacaucaugggcauccccuacugcaacuacuccaaguacugguaccugaaccacaccagcaccgggcggaccucccugccccgcugcuggcucgucagcaacggcuccuaccugaacgagacgcacuucagcgacgacaucgagcagcaggccgacaacaugaucaccgagaugcugcagaaggaguaccucgaccggcagggcaagaccccgcuggggcugguggaccuguucguguucuccaccagcuucuaccucaucuccaucuuccugcaccuggucaagaucccgacgcaccgccacaucgugggcaagcccugccccaagccccaccggcucaaccacauggggaucugcagcugcggccuguacaagcagccgggggugcccguccgcuggaagcggugaggacuagucccuguucccagagcccacuuuuuuuucuuuuuuugaaauaaaauagccugucuuucagaucucaaaggcucuuuucagagccaccaaaaaaaaaaaaaaaaaaaaaaaaaaaaaaaaaaaaaaaaaaaaaaaaaaaaaaaaaaaaaaaaagaauu

SEQ ID NO: 23515 - RNA, 1736 nt, Artificial Sequence
  mRNA product Design a-2 (hSL-A64-N5) comprising derived and/or modified sequence from LASV(G1180-SLE-2010;Clade IV)__AIT17168__GPCmut2 (opt1)
aggagaguccgcucagccagguugcagaagcggcuuagcguguguccuaaucuucucucugcguguagguaggccugugccgcaaacaagcuuaccaugggccagaucgugaccuucuuccaggaggucccccacgugaucgaggaggugaugaacaucguccugaucgcccucagcauccuggccgugcugaaggggcucuacaacuucgcgaccugcggccugguggggcugcucaccuuccugcugcucugcggccgcuccugcaccgccagccgguacaagggggucuacgagcugcagacccuggagcucaacauggagacccugaacaugugcaugccgcuguccugcaccaagaacaacagccaccacuacaucauggugggcaacgagaccggccucgagcugacccugacgaacaccuccaucaucaaccacaaguucugcaaccucagcgacgcccacaagaagaaccuguacgaccacgcccugauguccaucaucagcaccuuccaccucuccauccccaacuucaaccaguacgaggccaugagcugcgacuucaacgggggcaagaucuccgugcaguacaaccugagccacuccuacgcgggggacgccgccaaccacugcggcaccgucgccaacggggugcugcagacguucaugcgcauggcguggggcggcagcuacaucgcccucgacuccgggcacggcagcugggacugcaucaugaccuccuaccaguaccugaucauccagaacaccaccugggaggaccacugccaguucagccggcccucccccaucggguaccugggccuccugagccagcgcacgcgggacaucuacaucagccgccggcgccggggcaccuucaccuggacccuguccgacagcgaggggaaggacacgccgggcggguacugccugacccgcuggaugcucaucgaggccgagcugaagugcuucggcaacaccgccguggccaagugcaacgagaagcacgacgaggaguucugcgacaugcugcggcuguucgacuucugcaagcaggcgauccagcgccugaaggcccccgcccagauguccauccagcugaucaacaaggccgucaacgcccucaucaacgaccagcugaucaugaagaaccaccuccgggacaucauggggauccccuacugcaacuacagcaaguacugguaccucaaccacaccacgaccggcaagaccucccugcccaagugcuggcuggugagcaacggcuccuaccucaacgagacccacuucagcgacgacaucgagcagcaggcggacaacaugaucacggagaugcugcagaaggaguacauggagcgccaggggaagacgccccugggccucguggaccuguucgucuucuccaccagcuucuaccugaucuccaucuuccugcaccucgugaagaucccgacccaccggcacaucgugggcaagagcugccccaagccccaccgccugaaccacauggggaucugcuccugcgggcuguacaagcagcccggcgucccggugaaguggaagcggugaggacuagucccuguucccagagcccacuuuuuuuucuuuuuuugaaauaaaauagccugucuuucagaucucaaaggcucuuuucagagccaccaaaaaaaaaaaaaaaaaaaaaaaaaaaaaaaaaaaaaaaaaaaaaaaaaaaaaaaaaaaaaaaaagaauu

SEQ ID NO: 23516 - RNA, 1736 nt, Artificial Sequence
  mRNA product Design a-2 (hSL-A64-N5) comprising derived and/or modified sequence from LASV(G1442-SLE-2011;Clade IV)__AIT17180__GPCmut2 (opt1)
aggagaguccgcucagccagguugcagaagcggcuuagcguguguccuaaucuucucucugcguguagguaggccugugccgcaaacaagcuuaccaugggccagaucgugaccuucuuccaggaggucccccacgugaucgaggaggugaugaacaucguccugaucgcccucagcauccuggccgugcugaaggggcucuacaacguggcgaccugcggccugaucgggcuggucacguuccuccugcugugcggccgcuccugcaccaccacccucuacaaggggguguacgagcugcagacgcuggagcucaacauggagacccugaacaugugcaugccgcugagcugcaccaagaacaacucccaccacuacauccgggugggcaacgagacgggccucgagcugacccugaccaacaccagcaucaucaaccacaaguucugcaaccucuccgacgcccacaagaagaaccuguacgaccacgcccugaugagcaucaucuccacguuccaccucagcauccccaacuucaaccaguacgaggccauguccugcgacuucaacgggggcaagaucagcguccaguacaaccugucccacagcuacgccggggacgcggccaaccacugcggcaccguggccaacggggugcugcagaccuucaugcgcauggccuggggcggcuccuacaucgcgcucgacagcgggcggggcaacugggacugcaucaugaccuccuaccaguaccugaucauccagaacacgaccugggacgaccacugccaguucagccgccccucccccaucggguaccugggccuccugagccagcggacccgcgacgucuacaucucccggcgccgccggggcaccuucacguggacccugagcgacagcgaggggaaggacaccccgggcggguacugccugacccgguggaugcucaucgaggccgagcugaagugcuucggcaacacggccguggccaagugcaacgagaagcacgacgaggaguucugcgacaugcugcgccucuucgacuucugcaagcaggccauccagcggcugaaggcgcccgcccagauguccauccagcugaucaacaaggccgugaacgcccucaucaacgaccagcugaucaugaagaaccaccuccgcgacaucauggggauccccuacugcaacuacagcaaguacugguaccugaacaacaccgccaccggcaagaccucccugcccaagugcuggcugaucagcaacggcuccuaccucaacgagacgcacuucagcgacgacaucgagcaggaggcggacaacaugaucaccgagaugcugcagaaggaguacauggagcggcaggggaagacgccccugggccucgucgaccuguucguguucuccaccagcuucuaccugaucuccaucuuccugcaccucgugaagaucccgacccaccgccacaucgucggcaagagcugccccaagccccaccggcugaaccacauggggaucugcuccugcgggcuguacaagcagcccggcgugccggugcgcuggaagcggugaggacuagucccuguucccagagcccacuuuuuuuucuuuuuuugaaauaaaauagccugucuuucagaucucaaaggcucuuuucagagccaccaaaaaaaaaaaaaaaaaaaaaaaaaaaaaaaaaaaaaaaaaaaaaaaaaaaaaaaaaaaaaaaaagaauu

SEQ ID NO: 23517 - RNA, 1736 nt, Artificial Sequence
  mRNA product Design a-2 (hSL-A64-N5) comprising derived and/or modified sequence from LASV(G3010-SLE-2013;Clade IV)__AIT17344__GPCmut2 (opt1)
aggagaguccgcucagccagguugcagaagcggcuuagcguguguccuaaucuucucucugcguguagguaggccugugccgcaaacaagcuuaccaugggccagaucgugaccuucuuccaggaggucccccacgugaucgaggaggugaugaacaucguccugaucgcccucagcauccuggccgugcugaaggggcucuacaacuucgcgaccugcggccugguggggcuggucacguuccuccugcugugcggccgcuccugcaccaccagccucuacaaggggguguacgagcugcagacccuggagcucaacauggagacgcugaacaugugcaugccgcuguccugcaccaagaacaacagccaccacuacaucauggugggcaacgagaccggccucgagcugacgcugaccaacaccuccaucaucaaccacaaguucugcaaccucagcgacgcccacaagaagaaccuguacaaccacgcccugauguccaucaucagcaccuuccaccucuccauccccaacuucaaccaguacgaggccaugagcugcgacuucaacgggggcaagaucuccguccaguacaaccugagccacuccuacgccggggacgcggccagccacugcggcacgguggccaacggggugcugcagaccuucaugcggauggccuggggcggcuccuacaucgcgcucgacagcggguacggcaagugggacugcaucaugaccuccuaccaguaccugaucauccagaacaccacgugggaggaccacugccaguucagccgccccucccccaucggguaccugggccuccugagccagcggacccgcgacaucuacaucagccggcgccgccggggcaccuucaccuggacgcuguccgacagcgaggggaaggacaccccgggcggguacugccugacccgguggaugcucaucgaggccgagcugaagugcuucggcaacaccgccgucgccaagugcaacgagaagcacgacgaggaguucugcgacaugcugcgccucuucgacuucugcaagcaggccauccagcggcugaagacgcccgcgcagauguccauccagcugaucaacaaggccgugaacgcccucaucaacgaccagcugaucaugaagaaccaccuccgcgacaucauggggauccccuacugcaacuacagcaaguacugguaccugaaccacaccaccaccggcaagacgucccugcccaagugcuggcuggugagcaacggcuccuaccucaacgagacccacuucagcgacgacaucgagcagcaggccgacaacaugaucaccgagaugcugcagaaggaguacauggagcggcaggggaagacgccccugggccucgucgaccuguucguguucuccaccagcuucuaccugaucuccaucuuccugcaccucgugaagaucccgacccaccgccacaucgucggcaagagcugccccaagccccaccggcugaaccacauggggaucugcuccugcgggcuguacaagcagcccggcgugccggugcgcuggaagcggugaggacuagucccuguucccagagcccacuuuuuuuucuuuuuuugaaauaaaauagccugucuuucagaucucaaaggcucuuuucagagccaccaaaaaaaaaaaaaaaaaaaaaaaaaaaaaaaaaaaaaaaaaaaaaaaaaaaaaaaaaaaaaaaaagaauu

SEQ ID NO: 23518 - RNA, 1736 nt, Artificial Sequence
  mRNA product Design a-2 (hSL-A64-N5) comprising derived and/or modified sequence from LASV(G502-SLE-2009;Clade IV)__AIT17126__GPCmut2 (opt1)
aggagaguccgcucagccagguugcagaagcggcuuagcguguguccuaaucuucucucugcguguagguaggccugugccgcaaacaagcuuaccaugggccagaucgugaccuucuuccaggaggucccccacgugaucgaggaggugaugaacaucguccugaucgcccucagcauccuggccgugcugaaggggcucuacaacuucgcgaccugcggccugguggggcugcucacguuccugcugcucugcggccgcuccugcaccaccgggcuguacaagggcgucuacgagcugcagacccucgagcugaacauggagacgcugaacaugugcaugccgcucagcugcaccaagaacaacucccaccacuacaucauggugggcaacgagaccgggcuggagcugacgcucaccaacaccagcaucaucaaccacaaguucugcaaccuguccgacgcccacaagaagaaccuguacgaccacgcccucaugagcaucaucuccaccuuccaccugagcauccccaacuucaaccaguacgaggccauguccugcgacuucaacggcgggaagaucagcgugcaguacaaccugucccacagcuacgccggcgacgcggccgaccacugcgggacggucgccaacggcgugcuccagaccuucaugcggauggccuggggcggguccuacaucgcgcuggacagcggccgcgggcggugggacugcaucaugaccuccuaccaguaccugaucauccagaacaccacgugggaggaccacugccaguucagccgccccucccccaucggcuaccucggccugcugagccagcggacccgcgacaucuacaucucccggcgccgccgggggaccuucaccuggacgcugagcgacagcgagggcaaggacacccccgggggcuacugccucacccgguggaugcugaucgaggccgagcugaagugcuucgggaacaccgccguggccaagugcaacgagaagcacgacgaggaguucugcgacaugcuccgccuguucgacuucugcaagcaggccauccagcggcugaaggcgcccgcccagauguccauccagcucaucaacaaggccgucaacgcccugaucaacgaccagcuggugaugaagaaccaccuccgcgacaucaugggcauccccuacugcaacuacagccgguacugguaccugaaccacacgaccaccggccgcaccucccugcccaagugcuggcucgugagcaacggguccuaccugaacgagacgcacuucagcgacgacaucgagcagcaggccgacaacaugaucaccgagaugcugcagaaggaguacauggagcggcagggcaagaccccgcucgggcuggucgaccuguucguguucuccaccagcuucuaccugaucuccaucuuccuccaccuggugaagaucccgacgcaccgccacaucgucggcaagagcugccccaagccccaccggcugaaccacauggggaucugcuccugcggccucuacaagcagcccggcgugccggugaaguggaagcgcugaggacuagucccuguucccagagcccacuuuuuuuucuuuuuuugaaauaaaauagccugucuuucagaucucaaaggcucuuuucagagccaccaaaaaaaaaaaaaaaaaaaaaaaaaaaaaaaaaaaaaaaaaaaaaaaaaaaaaaaaaaaaaaaaagaauu

SEQ ID NO: 23519 - RNA, 1736 nt, Artificial Sequence
  mRNA product Design a-2 (hSL-A64-N5) comprising derived and/or modified sequence from LASV(G733-SLE-2010;Clade IV)__AIT17154__GPCmut2 (opt1)
aggagaguccgcucagccagguugcagaagcggcuuagcguguguccuaaucuucucucugcguguagguaggccugugccgcaaacaagcuuaccaugggccagaucgugaccuucuuccaggaggucccccacgugaucgaggaggugaugaacaucguccugaucgcccucagcauccuggccgugcugaaggggcucuacaacuucgcgaccugcggcaucguggggcuggucuccuuccugcuccugugcggccgcagcugcacgaccucccuguacaaggggguguacgagcuccagacccuggagcugaacauggagacccucaacaugugcaugccgcugagcugcaccaagaacaacucccaccacuacaucauggugggcaacgagaccggccuggagcucacccugacgaacaccagcaucaucaaccacaaguucugcaaccuguccgacgcccacaagaagaaccucuacgaccacgcccugaugagcaucaucuccaccuuccaccugagcauccccaacuucaaccaguacgaggccauguccugcgacuucaacgggggcaagaucagcguccaguacaaccucucccacagcuacgccggggacgcggccaaccacugcggcaccaucgccaacggggugcugcagacguucaugcggauggccuggggcggcuccuacaucgcgcuggacagcgggcgcgaccggugggacugcaucaugaccuccuaccaguaccucaucauccagaacaccaccugggaggaccacugccaguucagccgccccucccccaucggcuaccuggggcugcucagccagcggacgcgcgacaucuacaucagccggcgccgccggggcaccuucaccuggacccucuccgacagcgagggcaaggacacgcccgggggcuacugccugacccgguggaugcugaucgaggccgagcucaagugcuucgggaacaccgccguggccaagugcaacgagaagcacgacgaggaguucugcgacaugcugcgccuguucgacuucugcaagcaggccauccagcggcucaaggcgcccgcccagauguccauccagcugaucaacaaggccgucaacgcccugaucaacgaccagcucaucaugaagaaccaccuccgcgacaucaugggcauccccuacugcaacuacagcaaguacugguaccugaaccacaccacgaccgggaagaccucccugcccaagugcuggcuggugagcaacggcuccuaccugaacgagacccacuucagcgacgacaucgagcagcaggccgacaacaugaucacggagaugcuccagaaggaguacauggagcggcagggcaagaccccgcuggggcugguggaccucuucgucuucuccaccagcuucuaccugaucuccaucuuccugcaccuggugaagaucccgacccaccgccacguggucggcaagagcugccccaagccccaccggcucaaccacauggggaucugcuccugcggccuguacgggcagcccggcgugccggugaaguggaagcgcugaggacuagucccuguucccagagcccacuuuuuuuucuuuuuuugaaauaaaauagccugucuuucagaucucaaaggcucuuuucagagccaccaaaaaaaaaaaaaaaaaaaaaaaaaaaaaaaaaaaaaaaaaaaaaaaaaaaaaaaaaaaaaaaaagaauu

SEQ ID NO: 23520 - RNA, 1736 nt, Artificial Sequence
  mRNA product Design a-2 (hSL-A64-N5) comprising derived and/or modified sequence from MOPV/LASV reassortant(IGS-1;Clade IV)__AFY05576__GPCmut2 (opt1)
aggagaguccgcucagccagguugcagaagcggcuuagcguguguccuaaucuucucucugcguguagguaggccugugccgcaaacaagcuuaccaugggccagaucgugaccuucuuccaggaggucccccacgugaucgaggaggugaugaacaucguccugaucgcccucagcgugcuggccgugcugaaggggcucuacaacuucgcgaccugcggccuggucgggcuggugacguuccuccugcugugcggccgcuccugcaccaccagccucuacaaggggguguacgagcugcagacccuggagcucaacauggagacgcugaacaugugcaugccgcuguccugcaccaagaacaacagccaccacuacaucauggucggcaacgagaccggccucgagcugacgcugaccaacaccuccaucaucaaccacaaguucugcaaccucagcgacgcccacaagaagaaccuguacgaccacgcccugauguccaucaucagcaccuuccaccucuccauccccaacuucaaccaguacgaggccaugagcugcgacuucaacgggggcaagaucuccgugcaguacaaccugagccacuccuacgccggggacgcggccaaccacugcggcacgguggccaacgggguccugcagaccuucaugcggauggccuggggcggcagcuacaucgcgcucgacuccgggcgcggcaacugggacugcaucaugaccagcuaccaguaccugaucauccagaacaccacgugggaggaccacugccaguucucccggcccagccccaucggguaccugggccuccugucccagcgcacccgggacaucuacaucagccgccggcgccggggcaccuucaccuggacgcugagcgacuccgagggggaggacaccccgggcggguacugccugacccgcuggaugcucaucgaggccgagcugaagugcuucggcaacaccgccguggccaagugcaacgagaagcacgacgaggaguucugcgacaugcugcggcuguucgacuucugcaagcaggccauccagcgccugaaggcgcccgcccagaugagcauccagcugaucaacaaggccgugaacgcccucaucaacgaccagcugaucaugaagaaccaccuccgggacaucauggggauccccuacugcaacuacuccaaguacugguaccucaaccacacgaccaccggccgcaccagccugcccaagugcuggcuggucuccaacggcagcuaccucaacgagacgcacuucuccgacgacaucgagcagcaggccgacaacaugaucaccgagaugcugcagaaggaguacauggagcggcaggggaagacgccccugggccucguggaccuguucguguucagcaccuccuucuaccugaucagcaucuuccugcaccucgucaagaucccgacccaccgccacaucguggggaaguccugccccaagccccaccggcugaaccacaugggcaucugcagcugcgggcuguacaagcagcccggcgugccggucaaguggaagcgcugaggacuagucccuguucccagagcccacuuuuuuuucuuuuuuugaaauaaaauagccugucuuucagaucucaaaggcucuuuucagagccaccaaaaaaaaaaaaaaaaaaaaaaaaaaaaaaaaaaaaaaaaaaaaaaaaaaaaaaaaaaaaaaaaagaauu

SEQ ID NO: 23521 - RNA, 1736 nt, Artificial Sequence
  mRNA product Design a-2 (hSL-A64-N5) comprising derived and/or modified sequence from LASV(LM765-SLE-2012;Clade IV)__AIT17814__GPCmut2 (opt1)
aggagaguccgcucagccagguugcagaagcggcuuagcguguguccuaaucuucucucugcguguagguaggccugugccgcaaacaagcuuaccaugggccagaucgugaccuucuuccaggaggucccccacgugaucgaggaggugaugaacaucguccugaucgcccucagcauccuggccgugcugaaggggcucuacaacuucgcgaccugcggccugguggggcuggucacguuccuccugcugugcggccgcuccugcaccaccagccucuacaaggggguguacgagcugcagacccuggagcucaacauggagacgcugaacaugugcaugccgcuguccugcaccaagaacaacagccaccacuacaucauggugggcaacgagaccggccucgagcugacgcugaccaacaccuccaucaucgaccacaaguucugcaaccucagcgacgcccaccggaagaaccuguacgaccacgcccugauguccaucaucagcaccuuccaccucuccauccccaacuucaaccaguacgaggccaugagcugcgacuucaacgggggcaagaucuccguccaguacaaccugagccacuccuacgccaaggacgcggccgaccacugcgggacgguggccaacggcgugcugcagaccuucaugcgcauggccuggggcgggagcuacaucgcgcucgacuccggccgggggcgcugggacugcaucaugaccagcuaccaguaccugaucauccagaacaccacgugggaggaccacugccaguucucccggcccagccccaucggcuaccuggggcuccugucccagcgcacccgggacaucuacaucagccgccggcgccggggcaccuucaccuggacgcugagcgacuccgagggcaaggacacccccgggggcuacugccugacccgcuggaugcucaucgaggccgagcugaagugcuucgggaacaccgccgucgccaagugcaacgagaagcacgacgaggaguucugcgacaugcugcggcuguucgacuucugcaagcaggccauccagcgccugaaggcgcccgcccagaugagcauccagcugaucaacaaggccgugaacgcccucaucaacgaccagcugaucaugaagaaccaccuccgggacaucaugggcauccccuacugcaacuacuccaaguacugguaccucaaccacacgaccaccgggaagaccagccugcccaagugcuggcugguguccaacggcagcuaccucaacgagacgcacuucuccgacgacaucgagcagcaggccgacaacaugaucaccgagaugcugcagaaggaguacauggagcgccagggcaagaccccgcuggggcucgucgaccuguucguguucagcaccuccuucuaccugaucagcaucuuccugcaccucgugaagaucccgacgcaccggcacaucgucggcaagcccugccccaagccccaccgccugaaccacauggggaucugcuccugcggccuguacaagcagccgggggugcccgugaaguggaagcggugaggacuagucccuguucccagagcccacuuuuuuuucuuuuuuugaaauaaaauagccugucuuucagaucucaaaggcucuuuucagagccaccaaaaaaaaaaaaaaaaaaaaaaaaaaaaaaaaaaaaaaaaaaaaaaaaaaaaaaaaaaaaaaaaagaauu

SEQ ID NO: 23522 - RNA, 1736 nt, Artificial Sequence
  mRNA product Design a-2 (hSL-A64-N5) comprising derived and/or modified sequence from LASV(LM776-SLE-2012;Clade IV)__AIT17824__GPCmut2 (opt1)
aggagaguccgcucagccagguugcagaagcggcuuagcguguguccuaaucuucucucugcguguagguaggccugugccgcaaacaagcuuaccaugggccagaucgugaccuucuuccaggaggucccccacgugaucgaggaggugaugaacaucguccugaucgcccucagcauccuggccgugcugaaggggcucuacaacuucgcgaccugcggccugguggggcuggucacguuccuccugcugugcggccgcuccugcaccaccagcguguacaaggggguguacgagcuccagacccuggagcugaacauggagacgcucaacaugugcaugccgcuguccugcaccaagaacaacagccaccacuacaucauggucggcaacgagaccggccuggagcucacgcugaccaacaccuccaucaucaaccacaaguucugcaaccugagcgacgcccacaagaagaaccucuacgaccacgcccugauguccaucaucagcaccuuccaccuguccauccccaacuucaaccaguacgaggccaugagcugcgacuucaacgggggcaagaucuccgugcaguacaaccucagccacuccuacgccggggacgcggccaaccacugcggcacgguggccaacgggguccugcagaccuucaugcggauggccuggggcggcagcuacaucgcgcuggacuccgggcacggcaagugggacugcaucaugaccagcuaccaguaccucaucauccagaacaccacgugggaggaccacugccaguucucccgccccagccccaucggguaccugggccugcucucccagcggacccgcgacaucuacaucagccggcgccgccggggcaccuucaccuggacgcucagcgacuccgaggggaaggacaccccgggcggguacugccugacccgguggaugcugaucgaggccgagcucaagugcuucggcaacaccgccguggccaagugcaacgagaagcacgacgaggaguucugcgacaugcugcgccuguucgacuucugcaagcaggccauccagcggcucaaggcgcccgcccagaugagcauccagcugaucaacaaggccgugaacgcccugaucaacgaccagcucaucaugaagaaccaccuccgcgacaucauggggauccccuacugcaacuacuccaaguacugguaccugaaccacacgaccaccggcaagaccagccugcccaagugcuggcuggucuccaacggcagcuaccugaacgagacgcacuucuccgacgacaucgagcagcaggccgacaacaugaucaccgagaugcuccagaaggaguacauggagcggcaggggaagacgccccugggccugguggaccucuucguguucagcaccuccuucuaccugaucagcaucuuccugcaccuggucaagaucccgacccaccgccacaucguggggaaguccugccccaagccccaccggcucaaccacaugggcaucugcagcugcgggcuguacaagcagcccggcgugccgguccgcuggaagcggugaggacuagucccuguucccagagcccacuuuuuuuucuuuuuuugaaauaaaauagccugucuuucagaucucaaaggcucuuuucagagccaccaaaaaaaaaaaaaaaaaaaaaaaaaaaaaaaaaaaaaaaaaaaaaaaaaaaaaaaaaaaaaaaaagaauu

SEQ ID NO: 23523 - RNA, 1736 nt, Artificial Sequence
  mRNA product Design a-2 (hSL-A64-N5) comprising derived and/or modified sequence from LASV(Mad39;Clade IV)__ANH09722__GPCmut2 (opt1)
aggagaguccgcucagccagguugcagaagcggcuuagcguguguccuaaucuucucucugcguguagguaggccugugccgcaaacaagcuuaccaugggccagaucgugaccuucuuccaggaggucccccacgugaucgaggaggugaugaacaucguccugaucgcccucagcauccuggccgugcugaaggggcucuacaacguggcgaccugcggccugaucgggcuggucacguuccuccugcugugcggccgcuccugcaccaccacccucuacaaggggguguacgagcugcaggcccuggagcucaacauggagacgcugaacaugugcaugccgcugagcugcaccaagaacaacucccaccacuacauccgggugggcaacgagaccggccucgagcugacgcugaccaacaccagccucaucaaccacaaguucugcaaccuguccgacgcccacaagaagaaccuguacgaccacgcccucaugagcaucaucuccaccuuccaccugagcauccccaacuucaaccaguacgaggccauguccugcgacuucaacgacgggaagaucagcguccaguacaaccugucccacacguacgcgggcgacaccgccaaccacugcgggaccguggccaacggcgugcuccagaccuucaugcgcauggccuggggcgggagcuacaucgcgcuggacuccggccgcgggggcugggacugcaucaugacgagcuaccaguaccugaucauccagaacaccaccugggaggaccacugccaguucucccggcccagccccaucggguaccucggccugcugucccagcggacccgcgacaucuacaucagccggcgccgccggggcacguucaccuggacccuguccgacagcgaggggaaggacaccccgggcggguacugccucacgcgguggaugcugaucgaggccgagcugaagugcuucggcaacaccgccgucgccaagugcaacgagaagcacgacgaggaguucugcgacaugcuccgccuguucgacuucugcaagcaggccauccagcggcugaaggcgcccgcccagaugagcauccagcucaucaacaaggccgugaacgcccugaucaacgaccagcugaucaugaagaaccaccuccgcgacaucauggggauccccuacugcaacuacuccaaguacugguaccugaaccacaccgugaccggcaagacgagccugcccaagugcuggcucgucuccaacggcagcuaccugaacgagacccacuucuccgacgacaucgagcagcaggccgacaacaugaucaccgagaugcugcagaaggaguacauggagcggcaggggaagacgccccucggccugguggaccuguucguguucagcaccuccuucuaccugaucagcaucuuccuccaccuggucaagaucccgacccaccgccacgugguggggaagcccugccccaagccccaccggcugaaccacaugggcaucugcuccugcggguucuacaagcagccgggcguccccgugcgcuggaagcggugaggacuagucccuguucccagagcccacuuuuuuuucuuuuuuugaaauaaaauagccugucuuucagaucucaaaggcucuuuucagagccaccaaaaaaaaaaaaaaaaaaaaaaaaaaaaaaaaaaaaaaaaaaaaaaaaaaaaaaaaaaaaaaaaagaauu

SEQ ID NO: 23524 - RNA, 1736 nt, Artificial Sequence
  mRNA product Design a-2 (hSL-A64-N5) comprising derived and/or modified sequence from LASV(Z0947-SLE-2011;Clade IV)__AIT17840__GPCmut2 (opt1)
aggagaguccgcucagccagguugcagaagcggcuuagcguguguccuaaucuucucucugcguguagguaggccugugccgcaaacaagcuuaccaugggccagaucgugaccuucuuccaggaggucccccacgugaucgaggaggugaugaacaucguccugaucgcccucagcauccuggccgugcugaaggggcucuacaacuucgcgaccugcggccugguggggcuggucacguuccuccugcugugcggccgcuccugcaccaucagccucuacaaggggguguacgagcugcagacccuggagcucaacauggagacccugaacaugugcaugccgcuguccugcaccaagaacaacagccaccacuacaucauggugggcaacgagaccggccucgagcugacccugacgaacaccuccaucaucaaccacaaguucugcaaccucagcgacgcccacaagaagaaccuguacgaccacgcccugauguccaucaucagcaccuuccaccucuccauccccaacuucaaccaguacgaggccaugagcugcgacuucaacgggggcaagaucuccguccaguacaaccugagccacuccuacgccggggacgcggccaaccacugcggcaccguggccaacggggugcugcagacguucaugcggauggccuggggcggcagcuacaucgcgcucgacuccgggcgcgaccggugggacugcaucaugaccagcuaccaguaccugaucauccagaacaccaccugggaggaccacugccaguucucccgccccagccccaucggcuaccuggggcuccugucccagcggacgcgcgacaucuacaucagccggcgccgccggggcaccuucaccuggacccugagcgacuccgagggcaaggacacgcccgggggcuacugccugacccgguggaugcucaucgaggccgagcugaagugcuucgggaacaccgccgucgccaagugcaacgagaagcacgacgaggaguucugcgacaugcugcgccucuucgacuucugcaagcaggccauccagcggcugaaggcgcccgcccagaugagcauccagcugaucaacaaggccgugaacgcccucaucaacgaccagcugaucaugaagaaccaccuccgcgacaucaugggcauccccuacugcaacuacuccaaguacugguaccugaaccacaccacgaccgggaagaccagccugcccaagugcuggcugguguccaacggcagcuaccucaacgagacccacuucuccgacgacaucgagcagcaggccgacaacaugaucacggagaugcugcagaaggaguacauggagcggcagggcaagaccccgcuggggcucgucgaccuguucguguucagcaccuccuucuaccugaucagcaucuuccugcaccucgugaagaucccgacccaccgccacaucgucggcaagcccugccccaagccccaccggcugaaccacauggggaucugcuccugcggccuguacaagcagccgggggugcccgugaaguggaagcgcugaggacuagucccuguucccagagcccacuuuuuuuucuuuuuuugaaauaaaauagccugucuuucagaucucaaaggcucuuuucagagccaccaaaaaaaaaaaaaaaaaaaaaaaaaaaaaaaaaaaaaaaaaaaaaaaaaaaaaaaaaaaaaaaaagaauu

SEQ ID NO: 23525 - RNA, 1736 nt, Artificial Sequence
  mRNA product Design a-2 (hSL-A64-N5) comprising derived and/or modified sequence from LASV(Josiah;Clade IV)__NP_694870__GPCmut2 (opt1)
aggagaguccgcucagccagguugcagaagcggcuuagcguguguccuaaucuucucucugcguguagguaggccugugccgcaaacaagcuuaccaugggccagaucgugaccuucuuccaggaggucccccacgugaucgaggaggugaugaacaucguccugaucgcccucagcgugcuggccgugcugaaggggcucuacaacuucgcgaccugcggccuggucgggcuggugacguuccuccugcugugcggccgcuccugcaccaccagccucuacaaggggguguacgagcugcagacccuggagcucaacauggagacgcugaacaugugcaugccgcuguccugcaccaagaacaacagccaccacuacaucauggucggcaacgagaccggccucgagcugacccugacgaacaccuccaucaucaaccacaaguucugcaaccucagcgacgcccacaagaagaaccuguacgaccacgcccugauguccaucaucagcaccuuccaccucuccauccccaacuucaaccaguacgaggccaugagcugcgacuucaacgggggcaagaucuccgugcaguacaaccugagccacuccuacgccggggacgcggccaaccacugcggcaccguggccaacgggguccugcagacguucaugcggauggccuggggcggcagcuacaucgcgcucgacuccgggcgcggcaacugggacugcaucaugaccagcuaccaguaccugaucauccagaacaccaccugggaggaccacugccaguucucccggcccagccccaucggguaccugggccuccugucccagcgcacgcgggacaucuacaucagccgccggcgccggggcaccuucaccuggacccugagcgacuccgaggggaaggacacgccgggcggguacugccucacccgcuggaugcugaucgaggccgagcugaagugcuucggcaacaccgccguggccaagugcaacgagaagcacgacgaggaguucugcgacaugcuccggcuguucgacuucugcaagcaggccauccagcgccugaaggcgcccgcccagaugagcauccagcucaucaacaaggccgugaacgcccugaucaacgaccagcugaucaugaagaaccaccuccgggacaucauggggauccccuacugcaacuacuccaaguacugguaccugaaccacaccacgaccggccgcaccagccugcccaagugcuggcucgucuccaacggcagcuaccugaacgagacccacuucuccgacgacaucgagcagcaggccgacaacaugaucacggagaugcugcagaaggaguacauggagcggcaggggaagaccccgcucggccugguggaccuguucguguucagcaccuccuucuaccugaucagcaucuuccuccaccuggucaagauccccacccaccgccacaucguggggaaguccugccccaagccccaccggcugaaccacaugggcaucugcagcugcgggcucuacaagcagccgggcgugcccgucaaguggaagcgcugaggacuagucccuguucccagagcccacuuuuuuuucuuuuuuugaaauaaaauagccugucuuucagaucucaaaggcucuuuucagagccaccaaaaaaaaaaaaaaaaaaaaaaaaaaaaaaaaaaaaaaaaaaaaaaaaaaaaaaaaaaaaaaaaagaauu

SEQ ID NO: 23526 - RNA, 1733 nt, Artificial Sequence
  mRNA product Design a-2 (hSL-A64-N5) comprising derived and/or modified sequence from LASV(LP;Clade I)__AAF86701__GPCmut2 (opt1)
aggagaguccgcucagccagguugcagaagcggcuuagcguguguccuaaucuucucucugcguguagguaggccugugccgcaaacaagcuuaccaugggccagaucaucaccuucuuccaggaggugccccacgucaucgaggaggugaugaacaucgugcugaucgcccucagccugcuggccauccucaaggggcuguacaacaucgcgaccugcggcaucaucgggcuggucgccuuccucuuccugugcggcaaguccugcagccugacgcucaagggcggguacgagcugcagacccuggagcucaacauggagacccugaacaugugcaugccgcuguccugcaccaagaacagcucccaccacuacauccgcgugggcaacgagacggggcucgagcugacccugaccaacaccagcaucaucaaccacaaguucugcaaccucuccgacgcccacaagaagaaccuguacgaccacgcccugaugagcaucaucuccacguuccaccucagcauccccaacuucaaccaguacgaggccauguccugcgacuucaacggcgggaagaucagcgugcaguacaaccugucccacagcuacgcgggcgacgccgccgagcacugcgggaccgucgccaacggcgugcugcagaccuucaugcggauggcguggggcgggcgcuacaucgcccucgacuccggcaaggggaacugggacugcaucaugaccagcuaccaguaccugaucauccagaacacgaccugggaggaccacugccaguucucccggcccagccccaucggcuaccugggccuccugucccagcgcacccgggacaucuacaucagccgccggcgccgggggaccuucacguggacccugagcgacuccgagggcaacgagacccccgggggcuacugccucacccgcuggaugcugaucgaggccgagcugaagugcuucgggaacacggccguggccaagugcaacgagaagcacgacgaggaguucugcgacaugcuccggcuguucgacuucugcaagcaggcgauccgccggcugaaggccccggcccagaugagcauccagcucaucaacaaggccgucaacgcccugaucaacgaccagcugaucaugaagaaccaccuccgcgacaucaugggcauccccuacugcaacuacuccaaguacugguaccugaaccacaccagcuccggccggaccagccugcccaagugcuggcucaucuccaacgggagcuaccugaacgagacccaguucuccgacgacaucgagcagcaggcggacaacaugaucacggagaugcugcagaaggaguacaucgagcgccagggcaagaccccgcucgggcugguggacaucuucaucuucagcaccuccuucuaccugaucagcaucuuccugcaccucaucaagauccccacccaccggcacaucgugggcaagcccugccccaagccgcaccgccugaaccacaugggggucugcuccugcggccuguacaagcaccccggcgugcccacgaaguggaagcggugaggacuagucccuguucccagagcccacuuuuuuuucuuuuuuugaaauaaaauagccugucuuucagaucucaaaggcucuuuucagagccaccaaaaaaaaaaaaaaaaaaaaaaaaaaaaaaaaaaaaaaaaaaaaaaaaaaaaaaaaaaaaaaaaagaauu

SEQ ID NO: 23527 - RNA, 1733 nt, Artificial Sequence
  mRNA product Design a-2 (hSL-A64-N5) comprising derived and/or modified sequence from LASV(803213;Clade II)__AAF86703__GPCmut2 (opt1)
aggagaguccgcucagccagguugcagaagcggcuuagcguguguccuaaucuucucucugcguguagguaggccugugccgcaaacaagcuuaccaugggccagaucaucaccuucuuccaggaggugccccacgucaucgaggaggugaugaacaucgugcugaucgcccucagccugcuggccauccucaaggggaucuacaacgucgcgaccugcggccuguucgggcugaucuccuuccuccugcugugcggccgcagcugcuccgugacguacaaggggguguacgagcuccagacccuggagcugaacauggccaaccucaacaugugcaugccgcugagcugcaccaagaacaacucccaccacuacaucauggucggcaacgagaccggccuggagcucacgcugaccaacaccagcaucaucaaccacaaguucugcaaccuguccgacgcccacaagaagaaccucuacgaccacgcccugaugagcaucaucuccaccuuccaccugagcauccccaacuucaaccaguacgaggccauguccugcgacuucaacgggggcaagaucagcgugcaguacaaccucucccacagcuucgcgguggacgccgccaaccacugcgggacgaucgccaacggcguccugcagaccuucaugcggauggcguggggcggguccuacaucgcccuggacagcggcaaggggaacugggacugcaucaugaccuccuaccaguaccucaucauccagaacaccacgugggaggaccacugccaguucagccgccccucccccaucggcuaccuggggcugcucagccagcggacccgcgacaucuacaucagccggcgccggcgcggcaccuucaccuggacgcuguccgacagcgagggcaacgaggcccccgggggcuacugccugacccgguggaugcucaucgaggccgagcugaagugcuucgggaacaccgccguggcgaagugcaacgagaagcacgacgaggaguucugcgacaugcugcgccucuucgacuucugcaagcaggccaucaagcggcugaagaccccggcccagauguccauccagcugaucaacaaggccgugaacgcccucaucaacgaccagcugaucaugaagaaccaccuccgcgacaucaugggcauccccuacugcaacuacagccgguacugguaccugaaccacacggucaccgggaagaccucccugccccgcugcuggcuggugagcaacggcuccuaccucaacgagacccacuucagcgacgacaucgagcagcaggcggacaacaugaucacggagaugcugcagaaggaguacauggaccggcagggcaagaccccgcuggggcucguggaccuguucgucuucuccaccagcuucuaccugaucuccaucuuccugcaccucgugaagauccccacccaccgccacaucgugggcaagcccugccccaagccgcaccggcugaaccacauggggaucugcagcugcggccuguacaagcaccccgggguccccgugaaguggaagcgcugaggacuagucccuguucccagagcccacuuuuuuuucuuuuuuugaaauaaaauagccugucuuucagaucucaaaggcucuuuucagagccaccaaaaaaaaaaaaaaaaaaaaaaaaaaaaaaaaaaaaaaaaaaaaaaaaaaaaaaaaaaaaaaaaagaauu

SEQ ID NO: 23528 - RNA, 1733 nt, Artificial Sequence
  mRNA product Design a-2 (hSL-A64-N5) comprising derived and/or modified sequence from LASV(GA391;Clade III)__CAA36645__GPCmut2 (opt1)
aggagaguccgcucagccagguugcagaagcggcuuagcguguguccuaaucuucucucugcguguagguaggccugugccgcaaacaagcuuaccaugggccagaucgugaccuucuuccaggaggucccccacgugaucgaggaggugaugaacaucguccugaucgcccucagcauccuggccauccugaaggggcucuacaacguggcgaccugcggccugaucgggcuggugacguuccuccugcuguccggccgcagcugcucccucaucuacaaggggaccuacgagcugcagacccuggagcucaacauggagacccugaacaugugcaugccgcugagcugcacgaagaacaacucccaccacuacauccgggucggcaacgagaccggccucgagcugacccugaccaacacgagcauccucaaccacaaguucugcaaccuguccgacgcccacaagcgcaaccuguacgaccacagccucauguccaucaucagcaccuuccaccuguccauccccaacuucaaccaguacgaggccaugagcugcgacuucaacgggggcaagaucaccgugcaguacaaccugucccacagcuucgccguggacgccgcggggcacugcggcacccucgccaacgggguccugcagacguucaugcggauggccuggggcggcuccuacaucgcccuggacagcgggcgcggcaacugggacugcaucaugaccuccuaccaguaccucaucauccagaacaccaccugggacgaccacugccaguucagccggcccucccccaucggguaccugggccugcucagccagcgcacgcgggacaucuacaucagccgccggcgccggggcaccuucaccuggacccuguccgacagcgaggggaacgagacgccgggcggguacugccugacccgcuggaugcucaucgaggcggagcugaagugcuucggcaacaccgccguggccaagugcaacgagaagcacgacgaggaguucugcgacaugcugcggcuguucgacuucugcaagcaggccauccgccggcugaagacccccgcccagauguccauccagcugaucaacaaggcggugaacgcccucaucaacgaccagcugaucaugaagaaccaccuccgcgacaucauggggauccccuacugcaacuacagccgguacugguaccucaaccacacguccaccggcaagaccagccugccccgcugcuggcugaucuccaacggcagcuaccucaacgagaccaaguucuccgacgacaucgagcagcaggccgacaacaugaucacggagaugcugcagaaggaguacaucgaccggcaggggaagaccccgcugggccuggucgaccucuucguguucagcaccuccuucuaccugaucagcaucuuccugcaccucgugaagauccccacccaccgccacaucgucgggaagcccugccccaagccgcaccggcugaaccacaugggcaucugcuccugcgggcuguacaagcagcccggcgugcccgugcgcuggaagcgcugaggacuagucccuguucccagagcccacuuuuuuuucuuuuuuugaaauaaaauagccugucuuucagaucucaaaggcucuuuucagagccaccaaaaaaaaaaaaaaaaaaaaaaaaaaaaaaaaaaaaaaaaaaaaaaaaaaaaaaaaaaaaaaaaagaauu

SEQ ID NO: 23529 - RNA, 1736 nt, Artificial Sequence
  mRNA product Design a-2 (hSL-A64-N5) comprising derived and/or modified sequence from LASV(AV;Clade V)__CCA30314__GPCmut2 (opt1)
aggagaguccgcucagccagguugcagaagcggcuuagcguguguccuaaucuucucucugcguguagguaggccugugccgcaaacaagcuuaccaugggccagaucgugaccuucuuccaggaggucccccacgugaucgaggaggugaugaacaucguccugaucgcccucagcauccuggccgugcugaaggggcucuacaacaucgcgaccugcggccugaucgggcugaucacguuccuccugcugugcggccgcuccugcagcuccaaccucuacaaggggguguacgagcugcagagccuggaccucaacauggagacccugaacaugugcaugccgcuguccugcaccaagaacaacagccaccacuacauccgggucggcaacgacaccggccucgagcugacgcugaccaacaccuccauccucaaccacaaguucugcaaccugagcgacgcccacaagaaggaccuguacgaccacgcccucauguccaucaucagcaccuuccaccuguccauccccaacuucaaccaguacgaggccaugagcugcgacuucaacgggggcaagaucuccgugcaguacaaccugagccacuccuacgccaucgacgcggccaaccacugcgggacgguggccaacggcauccuccagaccuucaugcgcauggccuggggcgggagcuacaucgcgcuggacuccggccgggggaacugggacugcaucaugaccagcuaccaguaccugaucauccagaacaccacgugggagaaccacugccaguucucccgccccagccccaucggcuaccucgggcugcugagccagcggacccgcgacaucuacaucucccggcgccggcgcggcaccuucaccuggacgcucagcgacuccgagggcaacgccacccccgggggcuacugccugacccgguggaugcugaucgaggccgagcucaagugcuucgggaacaccgccgucgccaagugcaacgagaagcacgacgaggaguucugcgacaugcugcgccuguucgacuucugcaagcaggcgaucagccggcucaaguccccggcccagaugagcauccagcugaucaacaaggccgugaacgcccugaucaacgaccagcucaucaugaagaaccaccuccgcgacaucaugggcauccccuacugcaacuacuccaaguacugguaccugaaccacacgaucaccgggaagaccagccugcccaagugcuggcugguguccaacggcagcuaccugaacgagacccacuucuccgacgacaucgagcagcaggccgacaacaugaucacggagaugcuccagaaggaguacauggagcggcagggcaagaccccgcuggggcuggucgaccuguucguguucagcaccuccuucuaccucaucagcaucuuccugcgccuggugaagauccccacccaccggcacaucgucggcaagcccugccccaagccgcaccgccucaaccacauggggaucugcuccugcggccuguacaagcagcccggggugcccgugcgguggaagcgcugaggacuagucccuguucccagagcccacuuuuuuuucuuuuuuugaaauaaaauagccugucuuucagaucucaaaggcucuuuucagagccaccaaaaaaaaaaaaaaaaaaaaaaaaaaaaaaaaaaaaaaaaaaaaaaaaaaaaaaaaaaaaaaaaagaauu

SEQ ID NO: 23530 - RNA, 1733 nt, Artificial Sequence
  mRNA product Design a-2 (hSL-A64-N5) comprising derived and/or modified sequence from LASV(Togo/2016/7082;Clade VI)__AMR44577__GPCmut2 (opt1)
aggagaguccgcucagccagguugcagaagcggcuuagcguguguccuaaucuucucucugcguguagguaggccugugccgcaaacaagcuuaccaugggccagaucaucaccuucuuccaggaggugccccacgucaucgaggaggugaugaacaucgugcugaucgcccucagccugcuggccauccucaagggggucuacaacguggcgaccugcggcaucaucgggcuggugacguuccuguuccucugcggccgcuccugcagccugaucuacaagggguccuacgagcugcagacccucgagcugaacauggagacccugaacaugugcaugccgcucagcugcaccaagaacuccagccaccacuacauccgggucggcaacgagacgggccuggagcugacccucaccaacaccuccaucaucaaccacaaguucugcaaccugagcgacgcccacaagcgcaaccuguacgaccacgcccucauguccauccugagcacguuccaccuguccauccccaacuucaaccaguacgaggccaugagcugcgacuucaacgggggcaagaucuccgugcaguacaaccucagccacgccuacgcgguggacgccgccgagcacugcgggaccgucgccaacggcgugcugcagaccuucaugcggauggcguggggcggguccuacaucgcccuggacagcggccgcgggaacugggacugcaucaugaccuccuaccaguaccucaucauccagaacacgaccugggaggaccacugccaguucagccggcccucccccaucggcuaccuggggcugcucagccagcgcacccgggacaucuacaucagccgccggcgccggggcaccuucacguggacccuguccgacagcgagggcaacgagacccccgggggcuacugccugacccgcuggaugcucaucgaggccgagcugaagugcuucgggaacacggccguggccaagugcaacgagaagcacgacgaggaguucugcgacaugcugcggcuguucgacuucugcaagcaggcgauccagcgccugaaguccccggcccagaugagcauccagcugaucaacaaggccgucaacgcccucaucaacgaccagcugaucaugaagaaccaccuccgggacaugaugggcauccccuacugcaacuacuccaaguacugguaccucaaccacaccagcuccgggcgcaccagccugcccaagugcuggcugguguccaacggcagcuaccucaacgagacccacuucuccgacgacaucgagcagcaggccgacaacaugaucacggagaugcugcagaaggaguacaucgaccggcagggcaagaccccgcuggggcucguggaccuguucgucuucagcaccuccuucuaccugaucagcaucuuccugcaccucaucaagauccccacccaccgccacaucgugggcaagcccugccccaagccgcaccggcugaaccacauggggaucugcuccugcggccuguacaagcagcccggggugcccacgcgcuggaagcggugaggacuagucccuguucccagagcccacuuuuuuuucuuuuuuugaaauaaaauagccugucuuucagaucucaaaggcucuuuucagagccaccaaaaaaaaaaaaaaaaaaaaaaaaaaaaaaaaaaaaaaaaaaaaaaaaaaaaaaaaaaaaaaaaagaauu

SEQ ID NO: 23531 - RNA, 1733 nt, Artificial Sequence
  mRNA product Design a-2 (hSL-A64-N5) comprising derived and/or modified sequence from LASV(KAK-428;Clade n.d. (VII))__ANH09740__GPCmut2 (opt1)
aggagaguccgcucagccagguugcagaagcggcuuagcguguguccuaaucuucucucugcguguagguaggccugugccgcaaacaagcuuaccaugggccagaucgugaccuucuuccaggaggucccccacgugaucgaggaggugaugaacaucguccugaucgcccucagccugcuggccauccucaaggggcuguacaacuucgcgaccugcggcgugaucgggcugaucacguuccuccugcugugcggccgcuccugcagcgccaccuacaaggggcaguacgagcuccagacccuggagcugaacauggagucccucaacaugugcaugccgcugagcugcaccaagaacaacucccaccacuacauccgggccggcaacaacacgggccuggagcucacccugaccaacaccagcaucaucucccacaaguucugcaaccugagcgacgcccacaagaagaaccucuacgaccacacgcugauguccaucaucaccaccuuccaccugagcauccccaacuucaaccaguacgaggccauguccugcgacuucaacgggggcaagaucagcauccaguacaaccucucccacagcuacgcgggggacgccgcccagcacugcggcaccguggccaacgggguccugcagacguucaugcgcauggcguggggcggcuccuaccuggcccucgacagcgggcggcgcggcugggacugcaucaucuccagcuaccaguaccugaucauccagaacaccaccugggacgaccacugccaguucucccggcccagccccaucggguaccugggcuucgugagccagaagacccgcgacaucuacaucucccggcgccggcgcggcacguucaccuggacccucagcgacuccgaggggcacgacaugccgggcggguacugccugacccgguggaugcugaucgaggccgaccucaagugcuucggcaacacggccguggccaagugcaacgagaagcacgacgaggaguucugcgacauguggcgccuguucgacuucugcaagcaggcgauccagcggcugaaggcccccgcccagaugaacauccagcucaucaacaaggccgucaacgcccugaucaacgaccagcugaugaugaagaaccaccuccgcgacaucauggggauccccuacugcaacuacagcaaguucugguaccugaacaacaccaccaccggccggacgucccugccccgcugcuggcucaucagcaacggcuccuaccugaacgagacccacuucagcgacgacaucgagcagcaggcggacaacaugaucaccgagaugcugcagaaggaguacauggaccggcaggggaagaccccgcucggccugguggaccuguucguguucuccacgagcuucuaccucaucaccaucuuccugcaccuggucaagauccccacccaccgccacaucguggggaagcccugccccaagccgcaccggcugaaccacaugggcaucugcuccugcgggcucuacaagcagcccggcgugcccguccgcuggaagcggugaggacuagucccuguucccagagcccacuuuuuuuucuuuuuuugaaauaaaauagccugucuuucagaucucaaaggcucuuuucagagccaccaaaaaaaaaaaaaaaaaaaaaaaaaaaaaaaaaaaaaaaaaaaaaaaaaaaaaaaaaaaaaaaaagaauu

SEQ ID NO: 23532 - RNA, 1733 nt, Artificial Sequence; identical to SEQ ID NO: 23526
  mRNA product Design a-2 (hSL-A64-N5) comprising derived and/or modified sequence from LASV(Pinneo-NIG-1969;Clade I)__AIT17836__GPCmut2 (opt1)

SEQ ID NO: 23533 - RNA, 1733 nt, Artificial Sequence
  mRNA product Design a-2 (hSL-A64-N5) comprising derived and/or modified sequence from LASV(ISTH0009-NIG-2011;Clade II)__AIT17404__GPCmut2 (opt1)
aggagaguccgcucagccagguugcagaagcggcuuagcguguguccuaaucuucucucugcguguagguaggccugugccgcaaacaagcuuaccaugggccagaucaucaccuucuuccaggaggugccccacgucaucgaggaggugaugaacaucgugcugaucgcccucagccugcuggccauccucaaggggaucuacaacgucgcgaccugcggccuguucgggcugguguccuuccuccugcugugcggccgcagcugcuccacgaccuacaaggggguguacgagcuccagacccuggagcuggacauggccagccucaacaugugcaugccgcuguccugcaccaagaacaacagccaccacuacaucauggucggcaacgagacgggccuggagcucacccugaccaacaccuccaucaucaaccacaaguucugcaaccugagcgacgcccacaagaagaaccucuacgaccacgcccugauguccaucaucagcacguuccaccuguccauccccaacuucaaccaguacgaggccaugagcugcgacuucaacgggggcaagaucuccgugcaguacaaccucagccacgcguacgccguggacgccgccaaccacugcgggaccaucgcgaacggcguccugcagaccuucaugcggauggccuggggcggguccuacaucgcccuggacagcggcaagggguccugggacugcaucaugaccagcuaccaguaccucaucauccagaacacgaccugggaggaccacugccaguucucccgccccagccccaucggcuaccuggggcugcucagccagcggacccgcgacaucuacaucucccggcgccggcgcggcaccuucacguggacccugagcgacuccgagggcaacgagacccccgggggcuacugccugacccgguggaugcucaucgaggccgagcugaagugcuucgggaacacggccguggcgaagugcaacgagaagcacgacgaggaguucugcgacaugcugcgccucuucgacuucugcaagcaggccauccggcgccugaagaccccggcccagaugagcauccagcugaucaacaaggccgugaacgcccucaucaacgaccagcugaucaugaagaaccaccuccgggacaucaugggcauccccuacugcaacuacuccaaguacugguaccugaaccacaccgucaccgggaagacgagccugccccgcugcuggcugguguccaacggcagcuaccucaacgagacccacuucuccgacgacaucgagcagcaggcggacaacaugaucaccgagcugcugcagaaggaguacauggaccggcagggcaagaccccgcucgggcugguggaccuguucgucuucagcacguccuucuaccugaucagcaucuuccuccaccugaucaagauccccacccaccgccacaucaccggcaagcccugccccaagccgcaccggcugaaccacauggggaucugcuccugcggccucuacaagcaccccggggugcccgugaaguggaagcgcugaggacuagucccuguucccagagcccacuuuuuuuucuuuuuuugaaauaaaauagccugucuuucagaucucaaaggcucuuuucagagccaccaaaaaaaaaaaaaaaaaaaaaaaaaaaaaaaaaaaaaaaaaaaaaaaaaaaaaaaaaaaaaaaaagaauu

SEQ ID NO: 23534 - RNA, 1733 nt, Artificial Sequence
  mRNA product Design a-2 (hSL-A64-N5) comprising derived and/or modified sequence from LASV(ISTH2010-NIG-2012;Clade II)__AIT17482__GPCmut2 (opt1)
aggagaguccgcucagccagguugcagaagcggcuuagcguguguccuaaucuucucucugcguguagguaggccugugccgcaaacaagcuuaccaugggccagaucaucaccuucuuccaggaggugccccacgucaucgaggaggugaugaacaucgugcugaucgcccucagccugcuggccauccucaaggggaucuacaacgucgcgaccugcggccuguucgggcugguguccuuccuccugcugugcggccgcagcugcuccacgaccuacaaggggguguacgagcuccagacccuggagcuggacauggccagccucaacaugugcaugccgcuguccugcaccaagaacaacagccaccacuacaucauggucggcaacgagacgggccuggagcucacccugaccaacaccuccaucaucaaccacaaguucugcaaccugagcgacgcccacaagaagaaccucuacgaccacgcccugauguccaucaucagcacguuccaccuguccauccccaacuucaaccaguacgaggccaugagcugcgacuucaacgggggcaagaucuccgugcaguacaaccucagccacgcguacgccguggacgccgccaaccacugcgggaccaucgcgaacggcguccugcagaccuucaugcggauggccuggggcggguccuacaucgcccuggacagcggcaagggguccugggacugcaucaugaccagcuaccaguaccucaucauccagaacaucacgugggaggaccacugccaguucucccgccccagccccaucggcuaccuggggcugcucagccagcggacccgcgacaucuacaucucccggcgccggcgcggcaccuucaccuggacgcugagcgacuccgagggcaacgagacccccgggggcuacugccugacccgguggaugcucaucgaggccgagcugaagugcuucgggaacaccgccguggcgaagugcaacgagaagcacgacgaggaguucugcgacaugcugcgccucuucgacuucugcaagcaggccauccggcgccugaagacgccggcccagaugagcauccagcugaucaacaaggccgugaacgcccucaucaacgaccagcugaucaugaagaaccaccuccgggacaucaugggcauccccuacugcaacuacuccaaguacugguaccugaaccacaccgucaccgggaagaccagccugccccgcugcuggcugguguccaacggcagcuaccucaacgagacgcacuucuccgacgacaucgagcagcaggcggacaacaugaucaccgagcugcugcagaaggaguacaucgaccggcagggcaagaccccgcucgggcugguggaccuguucgucuucagcaccuccuucuaccugaucagcaucuuccuccaccuggugaagauccccacgcaccgccacguggucggcaagcccugccccaagccgcaccggcugaaccacauggggaucugcuccugcggccucuacaagcaccccggggugcccgugaaguggaagcgcugaggacuagucccuguucccagagcccacuuuuuuuucuuuuuuugaaauaaaauagccugucuuucagaucucaaaggcucuuuucagagccaccaaaaaaaaaaaaaaaaaaaaaaaaaaaaaaaaaaaaaaaaaaaaaaaaaaaaaaaaaaaaaaaaagaauu

SEQ ID NO: 23535 - RNA, 1733 nt, Artificial Sequence
  mRNA product Design a-2 (hSL-A64-N5) comprising derived and/or modified sequence from LASV(Lassa virus/H.sapiens-wt/NGA/2015/ISTH_0543;Clade II)__AVO03639__GPCmut2 (opt1)
aggagaguccgcucagccagguugcagaagcggcuuagcguguguccuaaucuucucucugcguguagguaggccugugccgcaaacaagcuuaccaugggccagaucaucaccuucuuccaggaggugccccacgucaucgaggaggugaugaacaucgugcugaucgcccucagccugcuggccauccucaaggggaucuacaacgucgcgaccugcggccuguucgggcugguguccuuccuccugcugugcggccgcagcugcuccacgaccuacaaggggguguacgagcuccagacccuggagcuggacauggccaaccucaacaugugcaugccgcugagcugcaccaagaacaacucccaccacuacaucauggucggcaacgagacgggccuggagcucacccugaccaacaccagcaucaucaaccacaaguucugcaaccuguccgacgcccacaagaagaaccucuacgaccacgcccugaugagcaucaucuccacguuccaccugagcauccccaacuucaaccaguacgaggccauguccugcgacuucaacgggggcaagaucagcgugcaguacaaccucucccacaccuacgcgguggacgccgccaaccacugcgggaccaucgccaacggcguccugcagaccuucaugcggauggcguggggcgggagcuacaucgcccuggacuccggcaaggggagcugggacugcaucaugacguccuaccaguaccucgugauccagaacaccaccugggaggaccacugccaguucagccgccccucccccaucggcuaccuggggcugcucagccagcggacccgcgacaucuacaucagccggcgccggcgcggcacguucaccuggacccuguccgacagcgagggcaacgagacccccgggggcuacugccugacgcgguggaugcucaucgaggccgagcugaagugcuucgggaacaccgccguggccaagugcaacgagaagcacgacgaggaguucugcgacaugcugcgccucuucgacuucugcaagcaggcgauccggcgccugaagaccccggcccagauguccauccagcugaucaacaaggccgucaacgcccucaucaacgaccagcugaucaugaagaaccaccuccgggacaucaugggcauccccuacugcaacuacagcaaguacugguaccugaaccacaccgugacggggaagaccucccugccccgcugcuggcuggugagcaacggcuccuaccucaacgagacccacuucagcgacgacaucgagcagcaggccgacaacaugaucaccgagcugcugcagaaggaguacaucgaccggcagggcaagacgccgcucgggcuggucgaccuguucguguucuccaccagcuucuaccugaucuccaucuuccuccaccuggugaagauccccacccaccgccacaucaccggcaagcccugccccaagccgcaccggcugaaccacauggggaucugcagcugcggccucuacaagcaccccgggguccccgugaaguggaagcgcugaggacuagucccuguucccagagcccacuuuuuuuucuuuuuuugaaauaaaauagccugucuuucagaucucaaaggcucuuuucagagccaccaaaaaaaaaaaaaaaaaaaaaaaaaaaaaaaaaaaaaaaaaaaaaaaaaaaaaaaaaaaaaaaaagaauu

SEQ ID NO: 23536 - RNA, 1733 nt, Artificial Sequence
  mRNA product Design a-2 (hSL-A64-N5) comprising derived and/or modified sequence from LASV(Lassa virus/H.sapiens-wt/NGA/2016/ISTH_0009;Clade II)__AVO03571__GPCmut2 (opt1)
aggagaguccgcucagccagguugcagaagcggcuuagcguguguccuaaucuucucucugcguguagguaggccugugccgcaaacaagcuuaccaugggccagaucaucaccuucuuccaggaggugccccacgucaucgaggaggugaugaacaucgugcugaucgcccucagccugcuggccauccucaaggggaucuacaacgucgcgaccugcggccugcuggggcucguguccuuccugcugcucugcggccgcagcugcuccacgaccuacaaggggguguacgagcugcagacccuggagcucgacauggccagccugaacaugugcaugccgcuguccugcaccaagaacaacagccaccacuacaucauggucggcaacgagacgggccucgagcugacccugaccaacaccuccaucaucaaccacaaguucugcaaccucagcgacgcccacaagaagaaccuguacgaccacgcccugauguccaucaucagcacguuccaccucuccauccccaacuucaaccaguacgaggccaugagcugcgacuucaacgggggccggaucuccgugcaguacaaccugagccacuccuacgcgguggacgccgccaaccacugcgggaccaucgccaacggcguccugcagaccuucaugcgcauggcguggggcgggagcuacaucgcccucgacuccggcaaggggagcugggacugcaucaugaccuccuaccaguaccugaucauccagaacacgaccugggaggaccacugccaguucagccggcccagccccaucggcuaccuggggcuccugucccagcgcacccgggacaucuacaucagccgccggcgccggggcaccuucacguggacccuguccgacagcgagggcaacgagacccccgggggcuacugccucacccgcuggaugcugaucgaggccgagcugaagugcuucgggaacacggccguggccaagugcaacgagaagcacgacgaggaguucugcgacaugcuccggcuguucgacuucugcaagcaggcgauccgccggcugaagaccccggcccagauguccauccagcucaucaacaaggccgugaacgcccugaucaacgaccagcugaucaugaagaaccaccuccgcgacaucaugggcauccccuacugcaacuacagcaaguacugguaccugaaccacaccgucaccgggaagacgucccugccccggugcuggcucgugagcaacggcuccuaccugaacgagacccacuucagcgacgacaucgagcagcaggccgacaacaugaucaccgagcugcuccagaaggaguacaucgaccgccagggcaagaccccgcuggggcugguggaccuguucgucuucuccacgagcuucuaccucaucuccaucuuccugcaccuggugaagauccccacccaccggcacaucaccggcaagcccugccccaagccgcaccgccucaaccacauggggaucugcagcugcggccuguacaaccaccccggggugcccgucaaguggaagcggugaggacuagucccuguucccagagcccacuuuuuuuucuuuuuuugaaauaaaauagccugucuuucagaucucaaaggcucuuuucagagccaccaaaaaaaaaaaaaaaaaaaaaaaaaaaaaaaaaaaaaaaaaaaaaaaaaaaaaaaaaaaaaaaaagaauu

SEQ ID NO: 23537 - RNA, 1733 nt, Artificial Sequence
  mRNA product Design a-2 (hSL-A64-N5) comprising derived and/or modified sequence from LASV(Lassa virus/H.sapiens-wt/NGA/2016/ISTH_0017;Clade II)__AVO03567__GPCmut2 (opt1)
aggagaguccgcucagccagguugcagaagcggcuuagcguguguccuaaucuucucucugcguguagguaggccugugccgcaaacaagcuuaccaugggccagaucaucaccuucuuccaggaggugccccacgucaucgaggaggugaugaacaucgugcugaucgcccucagccugcuggccauccucaaggggaucuacaacgucgcgaccugcggccuguucgggcugguguccuuccuccugcugugcggccgcagcugcuccacgaccuacaaggggguguacgagcuccagacccuggagcuggacauggccagccucaacaugugcaugccgcuguccugcaccaagaacaacagccaccacuacaucauggucggcaacgagacgggccuggagcucacccugaccaacaccuccaucaucaaccacaaguucugcaaccugagcgacgcccacaagaagaaccucuacgaccacgcccugauguccaucaucagcacguuccaccuguccauccccaacuucaaccaguacgaggccaugagcugcgacuucaacgggggcaagaucuccgugcaguacaaccucagccacaccuacgcgaucgacgccgccaaccacugcgggaccaucgccaacggcgugcugcagaccuucaugcggauggcguggggcggguccuacaucgcccuggacagcggcaagggguccugggacugcaucaugacgagcuaccaguaccucaucauccagaacaccaccugggaggaccacugccaguucucccgccccagccccaucggcuaccuggggcugcucagccagcggacccgcgacaucuacaucucccggcgccggcgcggcacguucaccuggacccugagcgacuccgagggcaacgagacccccgggggcuacugccugacgcgguggaugcucaucgaggccgagcugaagugcuucgggaacaccgccgucgccaagugcaacgagaagcacgacgaggaguucugcgacaugcugcgccucuucgacuucugcaagcaggcgauccggcgccugaagaccccggcccagaugagcauccagcugaucaacaaggccgugaacgcccucaucaacgaccagcugaucaugaagaaccaccuccgggacaucaugggcauccccuacugcaacuacuccaaguacugguaccugaaccacaccgugacggggaagaccagccugccccgcugcuggcuggucuccaacggcagcuaccucaacgagacccacuucuccgacgacaucgagcagcaggccgacaacaugaucaccgagcugcugcagaaggaguacauggaccggcagggcaagacgccgcucgggcugguggaccuguucguguucagcaccuccuucuaccugaucagcaucuuccuccaccugguccgcauccccacccaccggcacgugaucggcaagcccugccccaagccgcaccgccugaaccacauggggaucugcuccugcggccucuacaagcaccccggggugcccgucaaguggaagcggugaggacuagucccuguucccagagcccacuuuuuuuucuuuuuuugaaauaaaauagccugucuuucagaucucaaaggcucuuuucagagccaccaaaaaaaaaaaaaaaaaaaaaaaaaaaaaaaaaaaaaaaaaaaaaaaaaaaaaaaaaaaaaaaaagaauu

SEQ ID NO: 23538 - RNA, 1733 nt, Artificial Sequence
  mRNA product Design a-2 (hSL-A64-N5) comprising derived and/or modified sequence from LASV(Lassa virus/H.sapiens-wt/NGA/2018/ISTH_0959;Clade II)__AVV65099__GPCmut2 (opt1)
aggagaguccgcucagccagguugcagaagcggcuuagcguguguccuaaucuucucucugcguguagguaggccugugccgcaaacaagcuuaccaugggccagaucaucaccuucuuccaggaggugccccacgucaucgaggaggugaugaacaucgugcugaucgcccucagccugcuggccauccucaaggggaucuacaacgucgugaccugcggccuguucgggcugguguccuuccuccugcugugcggccgcagcugcuccacgaccuacaagggggucuacgagcuccagacccuggagcuggacauggcgagccucaacaugugcaugccgcuguccugcaccaagaacaacagccaccacuacaucauggugggcaacgagacgggccuggagcucacccugaccaacaccuccaucaucaaccacaaguucugcaaccugagcgacgcccacaagaagaaccucuacgaccacgcccugauguccaucaucagcacguuccaccuguccauccccaacuucaaccaguacgaggccaugagcugcgacuucaacgggggcaagaucuccgugcaguacaaccucagccacgccuacgcgaucgacgccgccaaccacugcgggaccaucgccaacggcguccugcagaccuucaugcggauggcguggggcggguccuacaucgcccuggacagcggcaagggguccugggacugcaucaugaccagcuaccaguaccucaucauccagaacacgaccugggaggaccacugccaguucucccgccccagccccaucggcuaccuggggcugcucagccagcggacccgcgacaucuacaucucccggcgccggcgcggcaccuucacguggacccugagcgacuccgagggcaacgagacccccgggggcuacugccugacccgguggaugcucaucgaggccgagcugaagugcuucgggaacacggccguggccaagugcaacgagaagcacgacgaggaguucugcgacaugcugcgccucuucgacuucugcaagcaggcgauccggcgccugaagaccccggcccagaugagcauccagcugaucaacaaggccgugaacgcccucaucaacgaccagcugaucaugaagaaccaccuccgggacaucaugggcauccccuacugcaacuacuccaaguacugguaccugaaccacaccgucaccgggaagacgagccugccccgcugcuggcugguguccaacggcagcuaccucaacgagacccacuucuccgacgacaucgagcagcaggccgacaacaugaucaccgagcugcugcagaaggaguacaucgaccggcagggcaagaccccgcucgggcugguggaccuguucgucuucagcacguccuucuaccugaucagcaucuuccuccaccuggugaagauccccacccaccgccacgugaucggcaagcccugccccaagccgcaccggcugaaccacauggggaucugcuccugcggccucuacaagcaccccgggguccccgugaaguggaagcgcugaggacuagucccuguucccagagcccacuuuuuuuucuuuuuuugaaauaaaauagccugucuuucagaucucaaaggcucuuuucagagccaccaaaaaaaaaaaaaaaaaaaaaaaaaaaaaaaaaaaaaaaaaaaaaaaaaaaaaaaaaaaaaaaaagaauu

SEQ ID NO: 23539 - RNA, 1733 nt, Artificial Sequence
  mRNA product Design a-2 (hSL-A64-N5) comprising derived and/or modified sequence from LASV(LASV003-NIG-2008;Clade II)__AIT17580__GPCmut2 (opt1)
aggagaguccgcucagccagguugcagaagcggcuuagcguguguccuaaucuucucucugcguguagguaggccugugccgcaaacaagcuuaccaugggccagaucaucaccuucuuccaggaggugccccacgucaucgaggaggugaugaacaucgugcugaucgcccucagccugcuggccauccucaaggggaucuacaacgucgcgaccugcggccuguucgggcugguguccuuccuccugcugugcggccgcagcugcuccacgaccuacaaggggguguacgagcuccagacccuggagcuggacauggccagccucaacaugugcaugccgcuguccugcaccaagaacaacagccaccacuacaucauggucggcaacgagacgggccuggagcucacccugaccaacaccuccaucaucaaccacaaguucugcaaccugagcgacgcccacaagaagaaccucuacgaccacgcccugauguccaucaucagcacguuccaccuguccauccccaacuucaaccaguacgaggccaugagcugcgacuucaacgggggcaagaucuccgugcaguacaaccucagccacaccuacgcgguggacgccgccaaccacugcgggaccaucgccaacggcguccugcagaccuucaugcggauggcguggggcggguccuacaucgcccuggacagcggcaagggguccugggacugcaucaugacgagcuaccaguaccucaucauccagaacaccaccugggaggaccacugccaguucucccgccccagccccaucggcuaccuggggcugcucagccagcggacccgcgacaucuacaucucccggcgccggcgcggcacguucaccuggacccugagcgacuccgagagcaacgagaccccgggcggguacugccugacgcgguggaugcucaucgaggccgagcugaagugcuucggcaacaccgccguggccaagugcaacgagaagcacgacgaggaguucugcgacaugcugcgccucuucgacuucugcaagcaggcgauccggcgccugaaggcccccgcccagauguccauccagcugaucaacaaggccgugaacgcccucaucaacgaccagcugaucaugaagaaccaccuccgggacaucauggggauccccuacugcaacuacagcaaguacugguaccugaaccacaccgucaccggccgcacgucccugccccggugcuggcuggugagcaacggguccuaccucaacgagacccacuucagcgacgacaucgagcagcaggcggacaacaugaucaccgagcugcugcagaaggaguacauggaccgccagggcaagaccccgcucggccugguggaccuguucgucuucuccacgagcuucuaccugaucuccaucuuccuccaccuggugaagauccccacccaccggcacgugaucgggaagcccugccccaagccgcaccgccugaaccacaugggcaucugcagcugcgggcucuacaagcaccccggcguccccgugaaguggaagcggugaggacuagucccuguucccagagcccacuuuuuuuucuuuuuuugaaauaaaauagccugucuuucagaucucaaaggcucuuuucagagccaccaaaaaaaaaaaaaaaaaaaaaaaaaaaaaaaaaaaaaaaaaaaaaaaaaaaaaaaaaaaaaaaaagaauu

SEQ ID NO: 23540 - RNA, 1733 nt, Artificial Sequence
  mRNA product Design a-2 (hSL-A64-N5) comprising derived and/or modified sequence from LASV(LASV035-NIG-2009;Clade II)__AIT17588__GPCmut2 (opt1)
aggagaguccgcucagccagguugcagaagcggcuuagcguguguccuaaucuucucucugcguguagguaggccugugccgcaaacaagcuuaccaugggccagaucaucaccuucuuccaggaggugccccacgucaucgaggaggugaugaacaucgugcugaucgcccucagccugcuggccauccucaaggggaucuacaacgucgcgaccugcggccuguucgggcugguguccuuccuccugcugugcggccgcagcugcuccacgaccuacaaggggguguacgagcuccagacccuggagcuggacauggccagccucaacaugugcaugccgcuguccugcaccaagaacaacagccaccacuacaucauggucggcaacgagacgggccuggagcucacccugaccaacaccuccaucaucaaccacaaguucugcaaccugagcgacgcccacaagaagaaccucuacgaccacgcccugauguccaucaucagcacguuccaccuguccauccccaacuucaaccaguacgaggccaugagcugcgacuucaacgggggcaagaucuccgugcaguacaaccucagccacgcguacgccguggacgccgccaaccacugcgggaccaucgcgaacggcguccugcagaccuucaugcggauggccuggggcggguccuacaucgcccuggacagcggcaagggguccugggacugcaucaugaccagcuaccaguaccucaucauccagaacacgaccugggaggaccacugccaguucucccgccccagccccaucggcuaccuggggcugcucagccagcggacccgcgacaucuacaucucccggcgccggcgcggcaccuucacguggacccugagcgacuccgagggcaacgagacccccgggggcuacugccugacccgguggaugcucaucgaggccgagcugaagugcuucgggaacacggccguggcgaagugcaacgagaagcacgacgaggaguucugcgacaugcugcgccucuucgacuucugcaagcaggccauccggcgccugaaggccccggcccagaugagcauccagcugaucaacaaggccgugaacgcgcucaucaacgaccagcugaucaugaagaaccaccuccgggacaucaugggcauccccuacugcaacuacuccaaguacugguaccugaaccacaccgucaccgggaagaccagccugccccgcugcuggcugguguccaacggcagcuaccucaacgagacgcacuucuccgacgacaucgagcagcaggccgacaacaugaucaccgagcugcugcagaaggaguacaucgaccggcagggcaagaccccgcucgggcugguggaccuguucgucuucagcaccuccuucuaccugaucagcaucuuccuccaccuggugaagauccccacgcaccgccacgugaucggcaagcccugccccaagccgcaccggcugaaccacauggggaucugcuccugcggccucuacaagcaccccgggguccccgugaaguggaagcgcugaggacuagucccuguucccagagcccacuuuuuuuucuuuuuuugaaauaaaauagccugucuuucagaucucaaaggcucuuuucagagccaccaaaaaaaaaaaaaaaaaaaaaaaaaaaaaaaaaaaaaaaaaaaaaaaaaaaaaaaaaaaaaaaaagaauu

SEQ ID NO: 23541 - RNA, 1733 nt, Artificial Sequence
  mRNA product Design a-2 (hSL-A64-N5) comprising derived and/or modified sequence from LASV(LASV1000-NIG-2009;Clade II)__AIT17782__GPCmut2 (opt1)
aggagaguccgcucagccagguugcagaagcggcuuagcguguguccuaaucuucucucugcguguagguaggccugugccgcaaacaagcuuaccaugggccagaucaucaccuucuuccaggaggugccccacgucaucgaggaggugaugaacaucgugcugaucgcccucagccugcuggccauccucaaggggaucuacaacgucgcgaccugcggccuguucgggcugguguccuuccuccugcugugcggccgcagcugcuccacgaccuacaaggggguguacgagcuccagacccuggagcuggacauggccagccucaacaugugcaugccgcuguccugcaccaagaacaacagccaccacuacaucauggucggcaacgagacgggccuggagcucacccugaccaacaccuccaucaucaaccacaaguucugcaaccugagcgacgcccacaagaagaaccucuacgaccacgcccugauguccaucaucagcacguuccaccuguccauccccaacuucaaccaguacgaggccaugagcugcgacuucaacgggggcaagaucuccgugcaguacaaccucagccacaccuacgcgguggacgccgccaaccacugcgggaccaucgccaacggcguccugcagaccuucaugcggauggcguggggcggguccuacaucgcccuggacagcggcaagggguccugggacugcaucaugacgagcuaccaguaccucaucauccagaacaccaccugggaggaccacugccaguucucccgccccagccccaucggcuaccuggggcugcucagccagcggacccgcgacaucuacaucucccggcgccggcgcggcacguucaccuggacccugagcgacuccgagggcaacgagacccccgggggcuacugccugacgcgguggaugcucaucgaggccgagcugaagugcuucgggaacaccgccguggccaagugcaacgagaagcacgacgaggaguucugcgacaugcugcgccucuucgacuucugcaagcaggcgaucaagcggcugaagaccccggcccagaugagcauccagcugaucaacaaggccgugaacgcccucaucaacgaccagcugaucaugaagaaccaccuccgcgacaucaugggcauccccuacugcaacuacuccaaguacugguaccugaaccacaccgucacggggaagaccagccugccccggugcuggcugguguccaacggcagcuaccucaacgagacccacuucuccgacgacaucgagcagcaggccgacaacaugaucaccgagcugcugcagaaggaguacaucgaccgccagggcaagacgccgcucgggcugguggaccuguucgucuucagcaccuccuucuaccugaucagcaucuuccuccaccuggugaagauccccacccaccggcacguggucggcaagcccugccccaagccgcaccgccugaaccacauggggaucugcuccugcggccucuacaagcaccccggggugcccgugaaguggaagcggugaggacuagucccuguucccagagcccacuuuuuuuucuuuuuuugaaauaaaauagccugucuuucagaucucaaaggcucuuuucagagccaccaaaaaaaaaaaaaaaaaaaaaaaaaaaaaaaaaaaaaaaaaaaaaaaaaaaaaaaaaaaaaaaaagaauu

SEQ ID NO: 23542 - RNA, 1733 nt, Artificial Sequence
  mRNA product Design a-2 (hSL-A64-N5) comprising derived and/or modified sequence from LASV(LASV221-NIG-2010;Clade II)__AIT17624__GPCmut2 (opt1)
aggagaguccgcucagccagguugcagaagcggcuuagcguguguccuaaucuucucucugcguguagguaggccugugccgcaaacaagcuuaccaugggccagaucaucaccuucuuccaggaggugccccacgucaucgaggaggugaugaacaucgugcugaucgcccucagccugcuggccauccucaaggggaucuacaacgucgcgaccugcggccuguucgggcugguguccuuccuccugcugugcggccgcagcugcuccacgaccuacaaggggguguacgagcuccagacccuggagcuggacauggccagccucaacaugugcaugccgcuguccugcaccaagaacaacagccaccacuacaucauggucggcaacgagacgggccuggagcucacccugaccaacaccuccaucaucaaccacaaguucugcaaccugagcgacgcccacaagaagaaccucuacgaccacgcccugauguccaucaucagcacguuccaccuguccauccccaacuucaaccaguacgaggccaugagcugcgacuucaacgggggcaagaucuccgugcaguacaaccucagccacaccuacgcgaucgacgccgccaaccacugcgggaccaucgccaacggcgugcugcagaccuucaugcggauggcguggggcggguccuacaucgcccuggacagcggcaagggguccugggacugcaucaugacgagcuaccaguaccucaucauccagaacaccaccugggaggaccacugccaguucucccgccccagccccaucggcuaccuggggcugcucagccagcggacccgcgacaucuacaucucccggcgccggcgcggcacguucaccuggacccugagcgacuccgagggcaacgagacccccgggggcuacugccugacgcgguggaugcucaucgaggccgagcugaagugcuucgggaacaccgccgucgccaagugcaacgagaagcacgacgaggaguucugcgacaugcugcgccucuucgacuucugcaagcaggcgauccggcgccugaagaccccggcccagaugagcauccagcugaucaacaaggccgugaacgcccucaucaacgaccagcugaucaugaagaaccaccuccgggacaucaugggcauccccuacugcaacuacuccaaguacugguaccugaaccacaccgugacggggaagaccagccugccccgcugcuggcuggucuccaacggcagcuaccucaacgagacccacuucuccgacgacaucgagcagcaggccgacaacaugaucaccgagaugcugcagaaggaguacauggaccggcagggcaagacgccgcuggggcucguggaccuguucguguucagcaccuccuucuaccugaucagcaucuuccugcaccucgucaagauccccacccaccgccacgugaucggcaagcccugccccaagccgcaccggcugaaccacauggggaucugcuccugcggccuguacaagcaccccggggugcccgucaaguggaagcgcugaggacuagucccuguucccagagcccacuuuuuuuucuuuuuuugaaauaaaauagccugucuuucagaucucaaaggcucuuuucagagccaccaaaaaaaaaaaaaaaaaaaaaaaaaaaaaaaaaaaaaaaaaaaaaaaaaaaaaaaaaaaaaaaaagaauu

SEQ ID NO: 23543 - RNA, 1733 nt, Artificial Sequence
  mRNA product Design a-2 (hSL-A64-N5) comprising derived and/or modified sequence from LASV(LASV237-NIG-2010;Clade II)__AIT17638__GPCmut2 (opt1)
aggagaguccgcucagccagguugcagaagcggcuuagcguguguccuaaucuucucucugcguguagguaggccugugccgcaaacaagcuuaccaugggccagaucaucaccuucuuccaggaggugccccacgucaucgaggaggugaugaacaucgugcugaucgcccucagccugcuggccauccucaaggggaucuacaacgucgcgaccugcggccuguucgggcugguguccuuccuccugcugugcggccgcagcugcuccacgaccuacaaggggguguacgagcuccagacccuggagcuggacauggccagccucaacaugugcaugccgcuguccugcaccaagaacaacagccaccacuacaucauggucggcaacgagacgggccuggagcucacccugaccaacaccuccaucaucaaccacaaguucugcaaccugagcgacgcccacaagaaggaccucuacgaccacgcccugauguccaucaucagcacguuccaccuguccauccccaacuucaaccaguacgaggccaugagcugcgacuucaacgggggcaagaucuccgugcaguacaaccucagccacaccuacgcgguggacgccgccaaccacugcgggaccaucgccaacggcguccugcagaccuucaugcggauggcguggggcggguccuacaucgcccuggacagcggcaagggguccugggacugcaucaugacgagcuaccaguaccucaucauccagaacaccaccugggaggaccacugccaguucucccgccccagccccaucggcuaccuggggcugcucagccagcggacccgcgacaucuacaucucccggcgccggcgcggcacguucaccuggacccugagcgacuccgagggcaacgagacccccgggggcuacugccugacgcgguggaugcucaucgaggccgagcugaagugcuucgggaacaccgccguggccaagugcaacgagaagcacgacgaggaguucugcgacaugcugcgccucuucgacuucugcaagcaggcgauccggcgccugaagaccccggcccagaugagcauccagcugaucaacaaggccgugaacgcccucaucaacgaccagcugaucaugaagaaccaccuccgggacaucaugggcauccccuacugcaacuacuccaaguacugguaccugaaccacaccgucacggggaagaccagccugccccgcugcuggcugguguccaacggcagcuaccucaacgagacccacuucuccgacgacaucgagcagcaggccgacaacaugaucaccgagcugcugcagaaggaguacauggaccggcagggcaagacgccgcucgggcugguggaccuguucgucuucagcaccuccuucuaccugaucagcaucuuccuccaccugaucaagauccccacccaccgccacaucaccggcaagcccugccccaagccgcaccggcugaaccacauggggaucugcuccugcggccucuacaagcaccccggggugcccgugaaguggaagcgcugaggacuagucccuguucccagagcccacuuuuuuuucuuuuuuugaaauaaaauagccugucuuucagaucucaaaggcucuuuucagagccaccaaaaaaaaaaaaaaaaaaaaaaaaaaaaaaaaaaaaaaaaaaaaaaaaaaaaaaaaaaaaaaaaagaauu

SEQ ID NO: 23544 - RNA, 1733 nt, Artificial Sequence
  mRNA product Design a-2 (hSL-A64-N5) comprising derived and/or modified sequence from LASV(LASV253-NIG-2011;Clade II)__AIT17670__GPCmut2 (opt1)
aggagaguccgcucagccagguugcagaagcggcuuagcguguguccuaaucuucucucugcguguagguaggccugugccgcaaacaagcuuaccaugggccagaucaucaccuucuuccaggaggugccccacgucaucgaggaggugaugaacaucgugcugaucgcccucagccugcuggccauccucaaggggaucuacaacgucgcgaccugcggccuguucgggcugguguccuuccuccugcugugcggccgcagcugcuccacgaccuacaaggggguguacgagcuccagacccuggagcuggacauggccagccucaacaugugcaugccgcuguccugcaccaagaacaacagccaccacuacaucauggucggcaacgagacgggccuggagcucacccugaccaacaccuccaucaucaaccacaaguucugcaaccugagcgacgcccacaagaagaaccucuacgaccacgcccugauguccaucaucagcacguuccaccuguccauccccaacuucaaccaguacgaggccaugagcugcgacuucaacgggggcaagaucuccgugcaguacaaccucagccacaccuacgcgguggacgccgccaaccacugcgggaccaucgccaacggcguccugcagaccuucaugcggauggcguggggcggguccuacaucgcccuggacagcggcaagggguccugggacugcaucaugacgagcuaccaguaccucaucauccagaacaccaccugggaggaccacugccaguucucccgccccagccccaucggcuaccuggggcugcucagccagcggacccgcgacaucuacaucucccggcgccggcgcggcacguucaccuggacccugagcgacuccgagggcaacgagacccccgggggcuacugccugacgcgguggaugcucaucgaggccgagcugaagugcuucgggaacaccgccguggccaagugcaacgagaagcacgacgaggaguucugcgacaugcugcgccucuucgacuucugcaagcaggcgauccggcgccugaaggccccggcccagaugagcauccagcugaucaacaaggccgugaacgcccucaucaacgaccagcugaucaugaagaaccaccuccgggacaucaugggcauccccuacugcaacuacuccaaguacugguaccugaaccacaccgucaccgggcgcacgagccugccccggugcuggcugguguccaacggcagcuaccucaacgagacccacuucuccgacgacaucgagcagcaggcggacaacaugaucaccgagcugcugcagaaggaguacaucgaccgccagggcaagaccccgcucgggcugguggaccuguucgucuucagcacguccuucuaccugaucagcaucuuccuccaccuggugaagauccccacccaccggcacaucaucggcaagcccugccccaagccgcaccgccugaaccacauggggaucugcuccugcggccucuacaagcaccccggggugcccgucaaguggaagcggugaggacuagucccuguucccagagcccacuuuuuuuucuuuuuuugaaauaaaauagccugucuuucagaucucaaaggcucuuuucagagccaccaaaaaaaaaaaaaaaaaaaaaaaaaaaaaaaaaaaaaaaaaaaaaaaaaaaaaaaaaaaaaaaaagaauu

SEQ ID NO: 23545 - RNA, 1733 nt, Artificial Sequence
  mRNA product Design a-2 (hSL-A64-N5) comprising derived and/or modified sequence from LASV(LASV254-NIG-2011;Clade II)__AIT17674__GPCmut2 (opt1)
aggagaguccgcucagccagguugcagaagcggcuuagcguguguccuaaucuucucucugcguguagguaggccugugccgcaaacaagcuuaccaugggccagaucaucaccuucuuccaggaggugccccacgucaucgaggaggugaugaacaucgugcugaucgcccucagccugcuggccauccucaaggggaucuacaacgucgcgaccugcggccuguucgggcugguguccuuccuccugcugugcggccgcagcugcuccacgaccuacaaggggguguacgagcuccagacccuggagcuggacaugaccaaccucaacaugugcaugccgcugagcugcacgaagaacaacucccaccacuacaucauggucggcaacgagaccggccuggagcucacccugaccaacacgagcaucaucaaccacaaguucugcaaccuguccgacgcccacaagaagaaccucuacaaccacgcccugaugagcaucaucuccaccuuccaccugagcauccccaacuucaaccaguacgaggccauguccugcgacuucaacgggggcaagaucagcgugcaguacaaccucucccacagcuacgccguggacgcggccaaccacugcgggaccaucgccaacggcguccugcagaccuucaugcggauggccuggggcggguccuacaucgcgcuggacagcggcaaggggaacugggacugcaucaugacguccuaccaguaccucaucauccagaacaccaccugggaggaccacugccaguucagccgccccucccccaucggcuaccuggggcugcucagccagcggacccgcgacaucuacaucagccggcgccggcgcggcacguucaccuggacccuguccgacagcgagggcaacgagacccccgggggcuacugccugacgcgguggaugcucaucgaggccgagcugaagugcuucgggaacaccgccguggccaagugcaacgagaagcacgacgaggaguucugcgacaugcugcgccucuucgacuucugcaagcaggccauccggcgccugaagaccccggcgcaggccaacauccagcugaucaacaaggccgugaacgcccucaucaacgaccagcugaucaugaagaaccaccuccgggacaucaugggcauccccuacugcaacuacuccaaguacugguaccugaaccacaccgucacggggaagaccagccugccccgcugcuggcugguguccaacggcagcuaccucaacgagacccacuucuccgacgacaucgagcagcaggccgacaacaugaucaccgagcugcugcagaaggaguacauggaccggcagggcaagacgccgcucgggcugguggaccuguucgucuucagcaccuccuucuaccugaucagcaucuuccuccaccuggugaagauccccacccaccgccacgugaucggcaagcccugccccaagccgcaccggcugaaccacauggggaucugcuccugcggccucuacaagcaccccgggguccccgugaaguggaagcgcugaggacuagucccuguucccagagcccacuuuuuuuucuuuuuuugaaauaaaauagccugucuuucagaucucaaaggcucuuuucagagccaccaaaaaaaaaaaaaaaaaaaaaaaaaaaaaaaaaaaaaaaaaaaaaaaaaaaaaaaaaaaaaaaaagaauu

SEQ ID NO: 23546 - RNA, 1733 nt, Artificial Sequence
  mRNA product Design a-2 (hSL-A64-N5) comprising derived and/or modified sequence from LASV(Nig08-A19;Clade III)__ADU56618__GPCmut2 (opt1)
aggagaguccgcucagccagguugcagaagcggcuuagcguguguccuaaucuucucucugcguguagguaggccugugccgcaaacaagcuuaccaugggccagaucgugaccuucuuccaggaggucccccacgugaucgaggaggugaugaacaucguccugaucgcccucagcauccuggccauccugaaggggcucuacaacaucgcgaccugcggccugaucgggcuggugacguuccuccugcuguccggccgcagcugcuccaugaccuacaaggggguguacgagcuccagacccuggagcugaacaugaacacccucaacaugugcaugccgcugagcugcacgaagaacaacucccaccacuacaucauggucggcaacgagaccggccuggagcucacccugaccaacacgagccugcuccaccacaaguucugcaaccuguccgacgcccacaagaagaaccuguacgaccacacccucaugagcaucaucuccaccuuccaccugagcauccccaacuucaaccaguacgaggccauguccugcgacuucaacgggggcaagaucaccgugcaguacaaccugagccacuccuacgccaucgacgccgcgaaccacugcgggacgguggccaacggcguccuccagaccuucaugcggauggccuggggcgggagcuacaucgcccuggacuccggccgcgggaagugggacugcaucaugaccagcuaccaguaccugaucauccagaacaccacgugggaggaccacugccaguucucccggcccagccccaucggcuaccucgggcugcugucccagcgcacccgggacaucuacaucagccgccggcgccggggcaccuucaccuggacgcucagcgacuccgagggcaacgagacccccgggggcuacugccugacccgcuggaugcugaucgaggcggagcucaagugcuucgggaacaccgccguggccaagugcaacgagaagcacgacgaggaguucugcgacaugcugcggcuguucgacuucugcaagcaggccauccgccggcucaaggccccggcgcagaugagcauccagcugaucaacaaggccgugaacgcccugaucaacgaccagcucaucaugaagaaccaccuccgcgacaucaugggcauccccuacugcaacuacuccaaguacugguaccugaaccacacgagcaccgggcggaccucccugccccgcugcuggcuggucagcaacggcuccuaccugaacgagacccacuucagcgacgacaucgagcagcaggccgacaacaugaucacggagaugcuccagaaggaguaccuggaccggcagggcaagaccccgcuggggcugguggaccucuucguguucuccaccagcuucuaccugaucuccaucuuccugcaccucgucaagauccccacccaccgccacaucgugggcaagcccugccccaagccgcaccggcugaaccacauggggaucugcagcugcggccuguacaagcagcccggggugcccguccgcuggaagcggugaggacuagucccuguucccagagcccacuuuuuuuucuuuuuuugaaauaaaauagccugucuuucagaucucaaaggcucuuuucagagccaccaaaaaaaaaaaaaaaaaaaaaaaaaaaaaaaaaaaaaaaaaaaaaaaaaaaaaaaaaaaaaaaaagaauu

SEQ ID NO: 23547 - RNA, 1736 nt, Artificial Sequence
  mRNA product Design a-2 (hSL-A64-N5) comprising derived and/or modified sequence from LASV(G1180-SLE-2010;Clade IV)__AIT17168__GPCmut2 (opt1)
aggagaguccgcucagccagguugcagaagcggcuuagcguguguccuaaucuucucucugcguguagguaggccugugccgcaaacaagcuuaccaugggccagaucgugaccuucuuccaggaggucccccacgugaucgaggaggugaugaacaucguccugaucgcccucagcauccuggccgugcugaaggggcucuacaacuucgcgaccugcggccugguggggcugcucacguuccugcugcucugcggccgcuccugcaccgccagccgguacaagggggucuacgagcugcagacccuggagcucaacauggagacccugaacaugugcaugccgcuguccugcacgaagaacaacagccaccacuacaucauggugggcaacgagaccggccucgagcugacccugaccaacacguccaucaucaaccacaaguucugcaaccucagcgacgcccacaagaagaaccuguacgaccacgcccugauguccaucaucagcaccuuccaccucuccauccccaacuucaaccaguacgaggccaugagcugcgacuucaacgggggcaagaucuccgugcaguacaaccugagccacuccuacgcgggggacgccgccaaccacugcggcaccgucgccaacggggugcugcagaccuucaugcgcauggcguggggcggcagcuacaucgcccucgacuccgggcacggcagcugggacugcaucaugacguccuaccaguaccugaucauccagaacaccaccugggaggaccacugccaguucagccggcccucccccaucggguaccugggccuccugagccagcgcacccgggacaucuacaucagccgccggcgccggggcacguucaccuggacccuguccgacagcgaggggaaggacaccccgggcggguacugccucacgcgcuggaugcugaucgaggccgagcugaagugcuucggcaacaccgccguggccaagugcaacgagaagcacgacgaggaguucugcgacaugcuccggcuguucgacuucugcaagcaggcgauccagcgccugaaggcccccgcccagauguccauccagcucaucaacaaggccgucaacgcccugaucaacgaccagcugaucaugaagaaccaccuccgggacaucauggggauccccuacugcaacuacagcaaguacugguaccugaaccacaccaccacgggcaagaccucccugcccaagugcuggcucgugagcaacggcuccuaccugaacgagacccacuucagcgacgacaucgagcagcaggcggacaacaugaucaccgagaugcugcagaaggaguacauggagcgccaggggaagacgccgcucggccugguggaccuguucgucuucuccaccagcuucuaccugaucuccaucuuccuccaccuggugaagauccccacccaccggcacaucgugggcaagagcugccccaagccccaccgccugaaccacauggggaucugcuccugcgggcucuacaagcagccgggcguccccgugaaguggaagcggugaggacuagucccuguucccagagcccacuuuuuuuucuuuuuuugaaauaaaauagccugucuuucagaucucaaaggcucuuuucagagccaccaaaaaaaaaaaaaaaaaaaaaaaaaaaaaaaaaaaaaaaaaaaaaaaaaaaaaaaaaaaaaaaaagaauu

SEQ ID NO: 23548 - RNA, 1736 nt, Artificial Sequence
  mRNA product Design a-2 (hSL-A64-N5) comprising derived and/or modified sequence from LASV(G1442-SLE-2011;Clade IV)__AIT17180__GPCmut2 (opt1)
aggagaguccgcucagccagguugcagaagcggcuuagcguguguccuaaucuucucucugcguguagguaggccugugccgcaaacaagcuuaccaugggccagaucgugaccuucuuccaggaggucccccacgugaucgaggaggugaugaacaucguccugaucgcccucagcauccuggccgugcugaaggggcucuacaacguggcgaccugcggccugaucgggcuggucacguuccuccugcugugcggccgcuccugcaccaccacccucuacaaggggguguacgagcugcagacgcuggagcucaacauggagacccugaacaugugcaugccgcugagcugcaccaagaacaacucccaccacuacauccgggugggcaacgagaccggccucgagcugacgcugaccaacaccagcaucaucaaccacaaguucugcaaccucuccgacgcccacaagaagaaccuguacgaccacgcccugaugagcaucaucuccaccuuccaccucagcauccccaacuucaaccaguacgaggccauguccugcgacuucaacgggggcaagaucagcguccaguacaaccugucccacagcuacgccggggacgcggccaaccacugcggcacgguggccaacggggugcugcagaccuucaugcgcauggccuggggcggcuccuacaucgcgcucgacagcgggcggggcaacugggacugcaucaugaccuccuaccaguaccugaucauccagaacaccacgugggacgaccacugccaguucagccgccccucccccaucggguaccugggccuccugagccagcggacccgcgacgucuacaucucccggcgccggcgcggcaccuucaccuggacgcugagcgacagcgaggggaaggacaccccgggcggguacugccucacccgguggaugcugaucgaggccgagcugaagugcuucggcaacaccgccguggccaagugcaacgagaagcacgacgaggaguucugcgacaugcuccgccuguucgacuucugcaagcaggccauccagcggcugaaggcgcccgcccagauguccauccagcucaucaacaaggccgugaacgcccugaucaacgaccagcugaucaugaagaaccaccuccgcgacaucauggggauccccuacugcaacuacagcaaguacugguaccugaacaacacggccaccggcaagaccucccugcccaagugcuggcucaucagcaacggcuccuaccugaacgagacccacuucagcgacgacaucgagcaggaggcggacaacaugaucacggagaugcugcagaaggaguacauggagcggcaggggaagaccccgcucggccuggucgaccuguucguguucuccaccagcuucuaccugaucuccaucuuccuccaccuggugaagauccccacccaccgccacaucgucggcaagagcugccccaagccccaccggcugaaccacauggggaucugcuccugcgggcucuacaagcagccgggcgugcccgugcgcuggaagcggugaggacuagucccuguucccagagcccacuuuuuuuucuuuuuuugaaauaaaauagccugucuuucagaucucaaaggcucuuuucagagccaccaaaaaaaaaaaaaaaaaaaaaaaaaaaaaaaaaaaaaaaaaaaaaaaaaaaaaaaaaaaaaaaaagaauu

SEQ ID NO: 23549 - RNA, 1736 nt, Artificial Sequence
  mRNA product Design a-2 (hSL-A64-N5) comprising derived and/or modified sequence from LASV(G3010-SLE-2013;Clade IV)__AIT17344__GPCmut2 (opt1)
aggagaguccgcucagccagguugcagaagcggcuuagcguguguccuaaucuucucucugcguguagguaggccugugccgcaaacaagcuuaccaugggccagaucgugaccuucuuccaggaggucccccacgugaucgaggaggugaugaacaucguccugaucgcccucagcauccuggccgugcugaaggggcucuacaacuucgcgaccugcggccugguggggcuggucacguuccuccugcugugcggccgcuccugcaccaccagccucuacaaggggguguacgagcugcagacccuggagcucaacauggagacgcugaacaugugcaugccgcuguccugcaccaagaacaacagccaccacuacaucauggugggcaacgagaccggccucgagcugacccugacgaacaccuccaucaucaaccacaaguucugcaaccucagcgacgcccacaagaagaaccuguacaaccacgcccugauguccaucaucagcaccuuccaccucuccauccccaacuucaaccaguacgaggccaugagcugcgacuucaacgggggcaagaucuccguccaguacaaccugagccacuccuacgccggggacgcggccagccacugcggcaccguggccaacggggugcugcagacguucaugcggauggccuggggcggcuccuacaucgcgcucgacagcggguacggcaagugggacugcaucaugaccuccuaccaguaccugaucauccagaacaccaccugggaggaccacugccaguucagccgccccucccccaucggguaccugggccuccugagccagcggacgcgcgacaucuacaucagccggcgccggcgcggcaccuucaccuggacccuguccgacagcgaggggaaggacacgccgggcggguacugccucacccgguggaugcugaucgaggccgagcugaagugcuucggcaacaccgccgucgccaagugcaacgagaagcacgacgaggaguucugcgacaugcuccgccuguucgacuucugcaagcaggccauccagcggcugaagacccccgcgcagauguccauccagcucaucaacaaggccgugaacgcccugaucaacgaccagcugaucaugaagaaccaccuccgcgacaucauggggauccccuacugcaacuacagcaaguacugguaccugaaccacacgaccaccggcaagaccucccugcccaagugcuggcucgugagcaacggcuccuaccugaacgagacgcacuucagcgacgacaucgagcagcaggccgacaacaugaucaccgagaugcugcagaaggaguacauggagcggcaggggaagaccccgcucggccuggucgaccuguucguguucuccaccagcuucuaccugaucuccaucuuccuccaccuggugaagauccccacgcaccgccacaucgucggcaagagcugccccaagccccaccggcugaaccacauggggaucugcuccugcgggcucuacaagcagccgggcgugcccgugcgcuggaagcggugaggacuagucccuguucccagagcccacuuuuuuuucuuuuuuugaaauaaaauagccugucuuucagaucucaaaggcucuuuucagagccaccaaaaaaaaaaaaaaaaaaaaaaaaaaaaaaaaaaaaaaaaaaaaaaaaaaaaaaaaaaaaaaaaagaauu

SEQ ID NO: 23550 - RNA, 1736 nt, Artificial Sequence
  mRNA product Design a-2 (hSL-A64-N5) comprising derived and/or modified sequence from LASV(G502-SLE-2009;Clade IV)__AIT17126__GPCmut2 (opt1)
aggagaguccgcucagccagguugcagaagcggcuuagcguguguccuaaucuucucucugcguguagguaggccugugccgcaaacaagcuuaccaugggccagaucgugaccuucuuccaggaggucccccacgugaucgaggaggugaugaacaucguccugaucgcccucagcauccuggccgugcugaaggggcucuacaacuucgcgaccugcggccugguggggcugcucacguuccugcugcucugcggccgcuccugcaccaccgggcuguacaagggcgucuacgagcugcagacccucgagcugaacauggagacgcugaacaugugcaugccgcucagcugcaccaagaacaacucccaccacuacaucauggugggcaacgagaccgggcuggagcugacccucacgaacaccagcaucaucaaccacaaguucugcaaccuguccgacgcccacaagaagaaccuguacgaccacgcccucaugagcaucaucuccaccuuccaccugagcauccccaacuucaaccaguacgaggccauguccugcgacuucaacggcgggaagaucagcgugcaguacaaccugucccacagcuacgccggcgacgcggccgaccacugcgggaccgucgccaacggcgugcuccagacguucaugcggauggccuggggcggguccuacaucgcgcuggacagcggccgcgggcggugggacugcaucaugaccuccuaccaguaccugaucauccagaacaccaccugggaggaccacugccaguucagccgccccucccccaucggcuaccucggccugcugagccagcggacgcgcgacaucuacaucucccggcgccggcgcgggaccuucaccuggacccucagcgacagcgagggcaaggacacgcccgggggcuacugccugacccgguggaugcugaucgaggccgagcucaagugcuucgggaacaccgccguggccaagugcaacgagaagcacgacgaggaguucugcgacaugcugcgccuguucgacuucugcaagcaggccauccagcggcucaaggcgccggcccagauguccauccagcugaucaacaaggccgucaacgcccugaucaacgaccagcucgugaugaagaaccaccuccgcgacaucaugggcauccccuacugcaacuacagccgguacugguaccugaaccacaccacgaccggccgcaccucccugcccaagugcuggcuggugagcaacggguccuaccugaacgagacccacuucagcgacgacaucgagcagcaggccgacaacaugaucacggagaugcuccagaaggaguacauggagcggcagggcaagaccccgcuggggcuggucgaccuguucguguucuccaccagcuucuaccucaucuccaucuuccugcaccuggugaagauccccacccaccgccacaucgucggcaagagcugccccaagccccaccggcucaaccacauggggaucugcuccugcggccuguacaagcagccgggcgugcccgugaaguggaagcgcugaggacuagucccuguucccagagcccacuuuuuuuucuuuuuuugaaauaaaauagccugucuuucagaucucaaaggcucuuuucagagccaccaaaaaaaaaaaaaaaaaaaaaaaaaaaaaaaaaaaaaaaaaaaaaaaaaaaaaaaaaaaaaaaaagaauu

SEQ ID NO: 23551 - RNA, 1736 nt, Artificial Sequence
  mRNA product Design a-2 (hSL-A64-N5) comprising derived and/or modified sequence from LASV(G733-SLE-2010;Clade IV)__AIT17154__GPCmut2 (opt1)
aggagaguccgcucagccagguugcagaagcggcuuagcguguguccuaaucuucucucugcguguagguaggccugugccgcaaacaagcuuaccaugggccagaucgugaccuucuuccaggaggucccccacgugaucgaggaggugaugaacaucguccugaucgcccucagcauccuggccgugcugaaggggcucuacaacuucgcgaccugcggcaucguggggcuggucuccuuccugcuccugugcggccgcagcugcacgaccucccuguacaaggggguguacgagcuccagacccuggagcugaacauggagacccucaacaugugcaugccgcugagcugcacgaagaacaacucccaccacuacaucauggugggcaacgagaccggccuggagcucacccugaccaacacgagcaucaucaaccacaaguucugcaaccuguccgacgcccacaagaagaaccucuacgaccacgcccugaugagcaucaucuccaccuuccaccugagcauccccaacuucaaccaguacgaggccauguccugcgacuucaacgggggcaagaucagcguccaguacaaccucucccacagcuacgccggggacgcggccaaccacugcggcaccaucgccaacggggugcugcagaccuucaugcggauggccuggggcggcuccuacaucgcgcuggacagcgggcgcgaccggugggacugcaucaugacguccuaccaguaccucaucauccagaacaccaccugggaggaccacugccaguucagccgccccucccccaucggcuaccuggggcugcucagccagcggacccgcgacaucuacaucagccggcgccggcgcggcacguucaccuggacccuguccgacagcgagggcaaggacacccccgggggcuacugccugacgcgguggaugcucaucgaggccgagcugaagugcuucgggaacaccgccguggccaagugcaacgagaagcacgacgaggaguucugcgacaugcugcgccucuucgacuucugcaagcaggccauccagcggcugaaggcgccggcccagauguccauccagcugaucaacaaggccgucaacgcccucaucaacgaccagcugaucaugaagaaccaccuccgcgacaucaugggcauccccuacugcaacuacagcaaguacugguaccugaaccacaccaccacggggaagaccucccugcccaagugcuggcuggugagcaacggcuccuaccucaacgagacccacuucagcgacgacaucgagcagcaggccgacaacaugaucaccgagaugcugcagaaggaguacauggagcggcagggcaagacgccgcuggggcucguggaccuguucgucuucuccaccagcuucuaccugaucuccaucuuccugcaccucgugaagauccccacccaccgccacguggucggcaagagcugccccaagccccaccggcugaaccacauggggaucugcuccugcggccuguacgggcagccgggcgugcccgugaaguggaagcgcugaggacuagucccuguucccagagcccacuuuuuuuucuuuuuuugaaauaaaauagccugucuuucagaucucaaaggcucuuuucagagccaccaaaaaaaaaaaaaaaaaaaaaaaaaaaaaaaaaaaaaaaaaaaaaaaaaaaaaaaaaaaaaaaaagaauu

SEQ ID NO: 23552 - RNA, 1736 nt, Artificial Sequence
  mRNA product Design a-2 (hSL-A64-N5) comprising derived and/or modified sequence from MOPV/LASV reassortant(IGS-1;Clade IV)__AFY05576__GPCmut2 (opt1)
aggagaguccgcucagccagguugcagaagcggcuuagcguguguccuaaucuucucucugcguguagguaggccugugccgcaaacaagcuuaccaugggccagaucgugaccuucuuccaggaggucccccacgugaucgaggaggugaugaacaucguccugaucgcccucagcgugcuggccgugcugaaggggcucuacaacuucgcgaccugcggccuggucgggcuggugacguuccuccugcugugcggccgcuccugcaccaccagccucuacaaggggguguacgagcugcagacccuggagcucaacauggagacgcugaacaugugcaugccgcuguccugcaccaagaacaacagccaccacuacaucauggucggcaacgagaccggccucgagcugacccugacgaacaccuccaucaucaaccacaaguucugcaaccucagcgacgcccacaagaagaaccuguacgaccacgcccugauguccaucaucagcaccuuccaccucuccauccccaacuucaaccaguacgaggccaugagcugcgacuucaacgggggcaagaucuccgugcaguacaaccugagccacuccuacgccggggacgcggccaaccacugcggcaccguggccaacgggguccugcagacguucaugcggauggccuggggcggcagcuacaucgcgcucgacuccgggcgcggcaacugggacugcaucaugaccagcuaccaguaccugaucauccagaacaccaccugggaggaccacugccaguucucccggcccagccccaucggguaccugggccuccugucccagcgcacgcgggacaucuacaucagccgccggcgccggggcaccuucaccuggacccugagcgacuccgagggggaggacacgccgggcggguacugccucacccgcuggaugcugaucgaggccgagcugaagugcuucggcaacaccgccguggccaagugcaacgagaagcacgacgaggaguucugcgacaugcuccggcuguucgacuucugcaagcaggccauccagcgccugaaggcgcccgcccagaugagcauccagcucaucaacaaggccgugaacgcccugaucaacgaccagcugaucaugaagaaccaccuccgggacaucauggggauccccuacugcaacuacuccaaguacugguaccugaaccacaccacgaccggccgcaccagccugcccaagugcuggcucgucuccaacggcagcuaccugaacgagacccacuucuccgacgacaucgagcagcaggccgacaacaugaucacggagaugcugcagaaggaguacauggagcggcaggggaagaccccgcucggccugguggaccuguucguguucagcaccuccuucuaccugaucagcaucuuccuccaccuggucaagauccccacccaccgccacaucguggggaaguccugccccaagccccaccggcugaaccacaugggcaucugcagcugcgggcucuacaagcagccgggcgugcccgucaaguggaagcgcugaggacuagucccuguucccagagcccacuuuuuuuucuuuuuuugaaauaaaauagccugucuuucagaucucaaaggcucuuuucagagccaccaaaaaaaaaaaaaaaaaaaaaaaaaaaaaaaaaaaaaaaaaaaaaaaaaaaaaaaaaaaaaaaaagaauu

SEQ ID NO: 23553 - RNA, 1736 nt, Artificial Sequence
  mRNA product Design a-2 (hSL-A64-N5) comprising derived and/or modified sequence from LASV(LM765-SLE-2012;Clade IV)__AIT17814__GPCmut2 (opt1)
aggagaguccgcucagccagguugcagaagcggcuuagcguguguccuaaucuucucucugcguguagguaggccugugccgcaaacaagcuuaccaugggccagaucgugaccuucuuccaggaggucccccacgugaucgaggaggugaugaacaucguccugaucgcccucagcauccuggccgugcugaaggggcucuacaacuucgcgaccugcggccugguggggcuggucacguuccuccugcugugcggccgcuccugcaccaccagccucuacaaggggguguacgagcugcagacccuggagcucaacauggagacgcugaacaugugcaugccgcuguccugcaccaagaacaacagccaccacuacaucauggugggcaacgagaccggccucgagcugacccugacgaacaccuccaucaucgaccacaaguucugcaaccucagcgacgcccaccggaagaaccuguacgaccacgcccugauguccaucaucagcaccuuccaccucuccauccccaacuucaaccaguacgaggccaugagcugcgacuucaacgggggcaagaucuccguccaguacaaccugagccacuccuacgccaaggacgcggccgaccacugcgggaccguggccaacggcgugcugcagacguucaugcgcauggccuggggcgggagcuacaucgcgcucgacuccggccgggggcgcugggacugcaucaugaccagcuaccaguaccugaucauccagaacaccaccugggaggaccacugccaguucucccggcccagccccaucggcuaccuggggcuccugucccagcgcacgcgggacaucuacaucagccgccggcgccggggcaccuucaccuggacccugagcgacuccgagggcaaggacacgcccgggggcuacugccucacccgcuggaugcugaucgaggccgagcugaagugcuucgggaacaccgccgucgccaagugcaacgagaagcacgacgaggaguucugcgacaugcuccggcuguucgacuucugcaagcaggccauccagcgccugaaggcgccggcccagaugagcauccagcucaucaacaaggccgugaacgcccugaucaacgaccagcugaucaugaagaaccaccuccgggacaucaugggcauccccuacugcaacuacuccaaguacugguaccugaaccacaccacgaccgggaagaccagccugcccaagugcuggcucguguccaacggcagcuaccugaacgagacccacuucuccgacgacaucgagcagcaggccgacaacaugaucacggagaugcugcagaaggaguacauggagcgccagggcaagaccccgcucgggcuggucgaccuguucguguucagcaccuccuucuaccugaucagcaucuuccuccaccuggugaagauccccacccaccggcacaucgucggcaagcccugccccaagccgcaccgccugaaccacauggggaucugcuccugcggccucuacaagcagcccggggugcccgugaaguggaagcggugaggacuagucccuguucccagagcccacuuuuuuuucuuuuuuugaaauaaaauagccugucuuucagaucucaaaggcucuuuucagagccaccaaaaaaaaaaaaaaaaaaaaaaaaaaaaaaaaaaaaaaaaaaaaaaaaaaaaaaaaaaaaaaaaagaauu

SEQ ID NO: 23554 - RNA, 1736 nt, Artificial Sequence
  mRNA product Design a-2 (hSL-A64-N5) comprising derived and/or modified sequence from LASV(LM776-SLE-2012;Clade IV)__AIT17824__GPCmut2 (opt1)
aggagaguccgcucagccagguugcagaagcggcuuagcguguguccuaaucuucucucugcguguagguaggccugugccgcaaacaagcuuaccaugggccagaucgugaccuucuuccaggaggucccccacgugaucgaggaggugaugaacaucguccugaucgcccucagcauccuggccgugcugaaggggcucuacaacuucgcgaccugcggccugguggggcuggucacguuccuccugcugugcggccgcuccugcaccaccagcguguacaaggggguguacgagcuccagacccuggagcugaacauggagacgcucaacaugugcaugccgcuguccugcaccaagaacaacagccaccacuacaucauggucggcaacgagaccggccuggagcucacccugacgaacaccuccaucaucaaccacaaguucugcaaccugagcgacgcccacaagaagaaccucuacgaccacgcccugauguccaucaucagcaccuuccaccuguccauccccaacuucaaccaguacgaggccaugagcugcgacuucaacgggggcaagaucuccgugcaguacaaccucagccacuccuacgccggggacgcggccaaccacugcggcaccguggccaacgggguccugcagacguucaugcggauggccuggggcggcagcuacaucgcgcuggacuccgggcacggcaagugggacugcaucaugaccagcuaccaguaccucaucauccagaacaccaccugggaggaccacugccaguucucccgccccagccccaucggguaccugggccugcucucccagcggacgcgcgacaucuacaucagccggcgccggcgcggcaccuucaccuggacccugagcgacuccgaggggaaggacacgccgggcggguacugccugacccgguggaugcucaucgaggccgagcugaagugcuucggcaacaccgccguggccaagugcaacgagaagcacgacgaggaguucugcgacaugcugcgccucuucgacuucugcaagcaggccauccagcggcugaaggcgcccgcccagaugagcauccagcugaucaacaaggccgugaacgcccucaucaacgaccagcugaucaugaagaaccaccuccgcgacaucauggggauccccuacugcaacuacuccaaguacugguaccugaaccacaccacgaccggcaagaccagccugcccaagugcuggcuggucuccaacggcagcuaccucaacgagacccacuucuccgacgacaucgagcagcaggccgacaacaugaucacggagaugcugcagaaggaguacauggagcggcaggggaagaccccgcugggccucguggaccuguucguguucagcaccuccuucuaccugaucagcaucuuccugcaccucgucaagauccccacccaccgccacaucguggggaaguccugccccaagccccaccggcugaaccacaugggcaucugcagcugcgggcuguacaagcagccgggcgugcccguccgcuggaagcggugaggacuagucccuguucccagagcccacuuuuuuuucuuuuuuugaaauaaaauagccugucuuucagaucucaaaggcucuuuucagagccaccaaaaaaaaaaaaaaaaaaaaaaaaaaaaaaaaaaaaaaaaaaaaaaaaaaaaaaaaaaaaaaaaagaauu

SEQ ID NO: 23555 - RNA, 1736 nt, Artificial Sequence
  mRNA product Design a-2 (hSL-A64-N5) comprising derived and/or modified sequence from LASV(Mad39;Clade IV)__ANH09722__GPCmut2 (opt1)
aggagaguccgcucagccagguugcagaagcggcuuagcguguguccuaaucuucucucugcguguagguaggccugugccgcaaacaagcuuaccaugggccagaucgugaccuucuuccaggaggucccccacgugaucgaggaggugaugaacaucguccugaucgcccucagcauccuggccgugcugaaggggcucuacaacguggcgaccugcggccugaucgggcuggucacguuccuccugcugugcggccgcuccugcaccaccacccucuacaaggggguguacgagcugcaggcccuggagcucaacauggagacgcugaacaugugcaugccgcugagcugcaccaagaacaacucccaccacuacauccgggugggcaacgagaccggccucgagcugacccugacgaacaccagccucaucaaccacaaguucugcaaccuguccgacgcccacaagaagaaccuguacgaccacgcccucaugagcaucaucuccaccuuccaccugagcauccccaacuucaaccaguacgaggccauguccugcgacuucaacgacgggaagaucagcguccaguacaaccugucccacaccuacgcgggcgacacggccaaccacugcgggaccguggccaacggcgugcuccagaccuucaugcgcauggccuggggcgggagcuacaucgcgcuggacuccggccgcgggggcugggacugcaucaugaccagcuaccaguaccugaucauccagaacacgaccugggaggaccacugccaguucucccggcccagccccaucggguaccucggccugcugucccagcggacccgcgacaucuacaucagccggcgccggcgcggcaccuucacguggacccucuccgacagcgaggggaaggacaccccgggcggguacugccugacccgguggaugcugaucgaggccgagcucaagugcuucggcaacacggccgucgccaagugcaacgagaagcacgacgaggaguucugcgacaugcugcgccuguucgacuucugcaagcaggccauccagcggcucaaggcgcccgcccagaugagcauccagcugaucaacaaggccgugaacgcccugaucaacgaccagcucaucaugaagaaccaccuccgcgacaucauggggauccccuacugcaacuacuccaaguacugguaccugaaccacaccgugaccggcaagaccagccugcccaagugcuggcuggucuccaacggcagcuaccugaacgagacgcacuucuccgacgacaucgagcagcaggccgacaacaugaucaccgagaugcuccagaaggaguacauggagcggcaggggaagaccccgcugggccugguggaccuguucguguucagcaccuccuucuaccucaucagcaucuuccugcaccuggucaagauccccacgcaccgccacgugguggggaagcccugccccaagccgcaccggcucaaccacaugggcaucugcuccugcggguucuacaagcagcccggcguccccgugcgcuggaagcggugaggacuagucccuguucccagagcccacuuuuuuuucuuuuuuugaaauaaaauagccugucuuucagaucucaaaggcucuuuucagagccaccaaaaaaaaaaaaaaaaaaaaaaaaaaaaaaaaaaaaaaaaaaaaaaaaaaaaaaaaaaaaaaaaagaauu

SEQ ID NO: 23556 - RNA, 1736 nt, Artificial Sequence
  mRNA product Design a-2 (hSL-A64-N5) comprising derived and/or modified sequence from LASV(Z0947-SLE-2011;Clade IV)__AIT17840__GPCmut2 (opt1)
aggagaguccgcucagccagguugcagaagcggcuuagcguguguccuaaucuucucucugcguguagguaggccugugccgcaaacaagcuuaccaugggccagaucgugaccuucuuccaggaggucccccacgugaucgaggaggugaugaacaucguccugaucgcccucagcauccuggccgugcugaaggggcucuacaacuucgcgaccugcggccugguggggcuggucacguuccuccugcugugcggccgcuccugcaccaucagccucuacaaggggguguacgagcugcagacccuggagcucaacauggagacccugaacaugugcaugccgcuguccugcacgaagaacaacagccaccacuacaucauggugggcaacgagaccggccucgagcugacccugaccaacacguccaucaucaaccacaaguucugcaaccucagcgacgcccacaagaagaaccuguacgaccacgcccugauguccaucaucagcaccuuccaccucuccauccccaacuucaaccaguacgaggccaugagcugcgacuucaacgggggcaagaucuccguccaguacaaccugagccacuccuacgccggggacgcggccaaccacugcggcaccguggccaacggggugcugcagaccuucaugcggauggccuggggcggcagcuacaucgcgcucgacuccgggcgcgaccggugggacugcaucaugacgagcuaccaguaccugaucauccagaacaccaccugggaggaccacugccaguucucccgccccagccccaucggcuaccuggggcuccugucccagcggacccgcgacaucuacaucagccggcgccggcgcggcacguucaccuggacccugagcgacuccgagggcaaggacacccccgggggcuacugccucacgcgguggaugcugaucgaggccgagcugaagugcuucgggaacaccgccgucgccaagugcaacgagaagcacgacgaggaguucugcgacaugcuccgccuguucgacuucugcaagcaggccauccagcggcugaaggcgccggcccagaugagcauccagcucaucaacaaggccgugaacgcccugaucaacgaccagcugaucaugaagaaccaccuccgcgacaucaugggcauccccuacugcaacuacuccaaguacugguaccugaaccacaccaccacggggaagaccagccugcccaagugcuggcucguguccaacggcagcuaccugaacgagacccacuucuccgacgacaucgagcagcaggccgacaacaugaucaccgagaugcugcagaaggaguacauggagcggcagggcaagacgccgcucgggcuggucgaccuguucguguucagcaccuccuucuaccugaucagcaucuuccuccaccuggugaagauccccacccaccgccacaucgucggcaagcccugccccaagccgcaccggcugaaccacauggggaucugcuccugcggccucuacaagcagcccggggugcccgugaaguggaagcgcugaggacuagucccuguucccagagcccacuuuuuuuucuuuuuuugaaauaaaauagccugucuuucagaucucaaaggcucuuuucagagccaccaaaaaaaaaaaaaaaaaaaaaaaaaaaaaaaaaaaaaaaaaaaaaaaaaaaaaaaaaaaaaaaaagaauu

SEQ ID NO: 23557 - RNA, 1736 nt, Artificial Sequence
  mRNA product Design a-2 (hSL-A64-N5) comprising derived and/or modified sequence from LASV(Josiah;Clade IV)__NP_694870__GPCmut2 (opt4)
aggagaguccgcucagccagguugcagaagcggcuuagcguguguccuaaucuucucucugcguguagguaggccugugccgcaaacaagcuuaccaugggccagaucgugaccuucuuccaggaggugccccacgugaucgaggaggugaugaacaucgugcugaucgcccugagcgugcuggccgugcugaagggccuguacaacuucgccaccugcggccuggugggccuggugaccuuccugcugcugugcggcagaagcugcaccaccagccuguacaagggcguguacgagcugcagacccuggagcugaacauggagacccugaacaugugcaugccccugagcugcaccaagaacaacagccaccacuacaucauggugggcaacgagaccggccuggagcugacccugaccaacaccagcaucaucaaccacaaguucugcaaccugagcgacgcccacaagaagaaccuguacgaccacgcccugaugagcaucaucagcaccuuccaccugagcauccccaacuucaaccaguacgaggccaugagcugcgacuucaacggcggcaagaucagcgugcaguacaaccugagccacagcuacgccggcgacgccgccaaccacugcggcaccguggccaacggcgugcugcagaccuucaugagaauggccuggggcggcagcuacaucgcccuggacagcggcagaggcaacugggacugcaucaugaccagcuaccaguaccugaucauccagaacaccaccugggaggaccacugccaguucagcagacccagccccaucggcuaccugggccugcugagccagagaaccagagacaucuacaucagcagaagaagaagaggcaccuucaccuggacccugagcgacagcgagggcaaggacacccccggcggcuacugccugaccagauggaugcugaucgaggccgagcugaagugcuucggcaacaccgccguggccaagugcaacgagaagcacgacgaggaguucugcgacaugcugagacuguucgacuucugcaagcaggccauccagagacugaaggcccccgcccagaugagcauccagcugaucaacaaggccgugaacgcccugaucaacgaccagcugaucaugaagaaccaccugagagacaucaugggcauccccuacugcaacuacagcaaguacugguaccugaaccacaccaccaccggcagaaccagccugcccaagugcuggcuggugagcaacggcagcuaccugaacgagacccacuucagcgacgacaucgagcagcaggccgacaacaugaucaccgagaugcugcagaaggaguacauggagagacagggcaagaccccccugggccugguggaccuguucguguucagcaccagcuucuaccugaucagcaucuuccugcaccuggugaagauccccacccacagacacaucgugggcaagagcugccccaagccccacagacugaaccacaugggcaucugcagcugcggccuguacaagcagcccggcgugcccgugaaguggaagagaugaggacuagucccuguucccagagcccacuuuuuuuucuuuuuuugaaauaaaauagccugucuuucagaucucaaaggcucuuuucagagccaccaaaaaaaaaaaaaaaaaaaaaaaaaaaaaaaaaaaaaaaaaaaaaaaaaaaaaaaaaaaaaaaaagaauu

SEQ ID NO: 23558 - RNA, 1733 nt, Artificial Sequence
  mRNA product Design a-2 (hSL-A64-N5) comprising derived and/or modified sequence from LASV(LP;Clade I)__AAF86701__GPCmut2 (opt4)
aggagaguccgcucagccagguugcagaagcggcuuagcguguguccuaaucuucucucugcguguagguaggccugugccgcaaacaagcuuaccaugggccagaucaucaccuucuuccaggaggugccccacgugaucgaggaggugaugaacaucgugcugaucgcccugagccugcuggccauccugaagggccuguacaacaucgccaccugcggcaucaucggccugguggccuuccuguuccugugcggcaagagcugcagccugacccugaagggcggcuacgagcugcagacccuggagcugaacauggagacccugaacaugugcaugccccugagcugcaccaagaacagcagccaccacuacaucagagugggcaacgagaccggccuggagcugacccugaccaacaccagcaucaucaaccacaaguucugcaaccugagcgacgcccacaagaagaaccuguacgaccacgcccugaugagcaucaucagcaccuuccaccugagcauccccaacuucaaccaguacgaggccaugagcugcgacuucaacggcggcaagaucagcgugcaguacaaccugagccacagcuacgccggcgacgccgccgagcacugcggcaccguggccaacggcgugcugcagaccuucaugagaauggccuggggcggcagauacaucgcccuggacagcggcaagggcaacugggacugcaucaugaccagcuaccaguaccugaucauccagaacaccaccugggaggaccacugccaguucagcagacccagccccaucggcuaccugggccugcugagccagagaaccagagacaucuacaucagcagaagaagaagaggcaccuucaccuggacccugagcgacagcgagggcaacgagacccccggcggcuacugccugaccagauggaugcugaucgaggccgagcugaagugcuucggcaacaccgccguggccaagugcaacgagaagcacgacgaggaguucugcgacaugcugagacuguucgacuucugcaagcaggccaucagaagacugaaggcccccgcccagaugagcauccagcugaucaacaaggccgugaacgcccugaucaacgaccagcugaucaugaagaaccaccugagagacaucaugggcauccccuacugcaacuacagcaaguacugguaccugaaccacaccagcagcggcagaaccagccugcccaagugcuggcugaucagcaacggcagcuaccugaacgagacccaguucagcgacgacaucgagcagcaggccgacaacaugaucaccgagaugcugcagaaggaguacaucgagagacagggcaagaccccccugggccugguggacaucuucaucuucagcaccagcuucuaccugaucagcaucuuccugcaccugaucaagauccccacccacagacacaucgugggcaagcccugccccaagccccacagacugaaccacaugggcgugugcagcugcggccuguacaagcaccccggcgugcccaccaaguggaagagaugaggacuagucccuguucccagagcccacuuuuuuuucuuuuuuugaaauaaaauagccugucuuucagaucucaaaggcucuuuucagagccaccaaaaaaaaaaaaaaaaaaaaaaaaaaaaaaaaaaaaaaaaaaaaaaaaaaaaaaaaaaaaaaaaagaauu

SEQ ID NO: 23559 - RNA, 1733 nt, Artificial Sequence
  mRNA product Design a-2 (hSL-A64-N5) comprising derived and/or modified sequence from LASV(803213;Clade II)__AAF86703__GPCmut2 (opt4)
aggagaguccgcucagccagguugcagaagcggcuuagcguguguccuaaucuucucucugcguguagguaggccugugccgcaaacaagcuuaccaugggccagaucaucaccuucuuccaggaggugccccacgugaucgaggaggugaugaacaucgugcugaucgcccugagccugcuggccauccugaagggcaucuacaacguggccaccugcggccuguucggccugaucagcuuccugcugcugugcggcagaagcugcagcgugaccuacaagggcguguacgagcugcagacccuggagcugaacauggccaaccugaacaugugcaugccccugagcugcaccaagaacaacagccaccacuacaucauggugggcaacgagaccggccuggagcugacccugaccaacaccagcaucaucaaccacaaguucugcaaccugagcgacgcccacaagaagaaccuguacgaccacgcccugaugagcaucaucagcaccuuccaccugagcauccccaacuucaaccaguacgaggccaugagcugcgacuucaacggcggcaagaucagcgugcaguacaaccugagccacagcuucgccguggacgccgccaaccacugcggcaccaucgccaacggcgugcugcagaccuucaugagaauggccuggggcggcagcuacaucgcccuggacagcggcaagggcaacugggacugcaucaugaccagcuaccaguaccugaucauccagaacaccaccugggaggaccacugccaguucagcagacccagccccaucggcuaccugggccugcugagccagagaaccagagacaucuacaucagcagaagaagaagaggcaccuucaccuggacccugagcgacagcgagggcaacgaggcccccggcggcuacugccugaccagauggaugcugaucgaggccgagcugaagugcuucggcaacaccgccguggccaagugcaacgagaagcacgacgaggaguucugcgacaugcugagacuguucgacuucugcaagcaggccaucaagagacugaagacccccgcccagaugagcauccagcugaucaacaaggccgugaacgcccugaucaacgaccagcugaucaugaagaaccaccugagagacaucaugggcauccccuacugcaacuacagcagauacugguaccugaaccacaccgugaccggcaagaccagccugcccagaugcuggcuggugagcaacggcagcuaccugaacgagacccacuucagcgacgacaucgagcagcaggccgacaacaugaucaccgagaugcugcagaaggaguacauggacagacagggcaagaccccccugggccugguggaccuguucguguucagcaccagcuucuaccugaucagcaucuuccugcaccuggugaagauccccacccacagacacaucgugggcaagcccugccccaagccccacagacugaaccacaugggcaucugcagcugcggccuguacaagcaccccggcgugcccgugaaguggaagagaugaggacuagucccuguucccagagcccacuuuuuuuucuuuuuuugaaauaaaauagccugucuuucagaucucaaaggcucuuuucagagccaccaaaaaaaaaaaaaaaaaaaaaaaaaaaaaaaaaaaaaaaaaaaaaaaaaaaaaaaaaaaaaaaaagaauu

SEQ ID NO: 23560 - RNA, 1733 nt, Artificial Sequence
  mRNA product Design a-2 (hSL-A64-N5) comprising derived and/or modified sequence from LASV(GA391;Clade III)__CAA36645__GPCmut2 (opt4)
aggagaguccgcucagccagguugcagaagcggcuuagcguguguccuaaucuucucucugcguguagguaggccugugccgcaaacaagcuuaccaugggccagaucgugaccuucuuccaggaggugccccacgugaucgaggaggugaugaacaucgugcugaucgcccugagcauccuggccauccugaagggccuguacaacguggccaccugcggccugaucggccuggugaccuuccugcugcugagcggcagaagcugcagccugaucuacaagggcaccuacgagcugcagacccuggagcugaacauggagacccugaacaugugcaugccccugagcugcaccaagaacaacagccaccacuacaucagagugggcaacgagaccggccuggagcugacccugaccaacaccagcauccugaaccacaaguucugcaaccugagcgacgcccacaagagaaaccuguacgaccacagccugaugagcaucaucagcaccuuccaccugagcauccccaacuucaaccaguacgaggccaugagcugcgacuucaacggcggcaagaucaccgugcaguacaaccugagccacagcuucgccguggacgccgccggccacugcggcacccuggccaacggcgugcugcagaccuucaugagaauggccuggggcggcagcuacaucgcccuggacagcggcagaggcaacugggacugcaucaugaccagcuaccaguaccugaucauccagaacaccaccugggacgaccacugccaguucagcagacccagccccaucggcuaccugggccugcugagccagagaaccagagacaucuacaucagcagaagaagaagaggcaccuucaccuggacccugagcgacagcgagggcaacgagacccccggcggcuacugccugaccagauggaugcugaucgaggccgagcugaagugcuucggcaacaccgccguggccaagugcaacgagaagcacgacgaggaguucugcgacaugcugagacuguucgacuucugcaagcaggccaucagaagacugaagacccccgcccagaugagcauccagcugaucaacaaggccgugaacgcccugaucaacgaccagcugaucaugaagaaccaccugagagacaucaugggcauccccuacugcaacuacagcagauacugguaccugaaccacaccagcaccggcaagaccagccugcccagaugcuggcugaucagcaacggcagcuaccugaacgagaccaaguucagcgacgacaucgagcagcaggccgacaacaugaucaccgagaugcugcagaaggaguacaucgacagacagggcaagaccccccugggccugguggaccuguucguguucagcaccagcuucuaccugaucagcaucuuccugcaccuggugaagauccccacccacagacacaucgugggcaagcccugccccaagccccacagacugaaccacaugggcaucugcagcugcggccuguacaagcagcccggcgugcccgugagauggaagagaugaggacuagucccuguucccagagcccacuuuuuuuucuuuuuuugaaauaaaauagccugucuuucagaucucaaaggcucuuuucagagccaccaaaaaaaaaaaaaaaaaaaaaaaaaaaaaaaaaaaaaaaaaaaaaaaaaaaaaaaaaaaaaaaaagaauu

SEQ ID NO: 23561 - RNA, 1736 nt, Artificial Sequence
  mRNA product Design a-2 (hSL-A64-N5) comprising derived and/or modified sequence from LASV(AV;Clade V)__CCA30314__GPCmut2 (opt4)
aggagaguccgcucagccagguugcagaagcggcuuagcguguguccuaaucuucucucugcguguagguaggccugugccgcaaacaagcuuaccaugggccagaucgugaccuucuuccaggaggugccccacgugaucgaggaggugaugaacaucgugcugaucgcccugagcauccuggccgugcugaagggccuguacaacaucgccaccugcggccugaucggccugaucaccuuccugcugcugugcggcagaagcugcagcagcaaccuguacaagggcguguacgagcugcagagccuggaccugaacauggagacccugaacaugugcaugccccugagcugcaccaagaacaacagccaccacuacaucagagugggcaacgacaccggccuggagcugacccugaccaacaccagcauccugaaccacaaguucugcaaccugagcgacgcccacaagaaggaccuguacgaccacgcccugaugagcaucaucagcaccuuccaccugagcauccccaacuucaaccaguacgaggccaugagcugcgacuucaacggcggcaagaucagcgugcaguacaaccugagccacagcuacgccaucgacgccgccaaccacugcggcaccguggccaacggcauccugcagaccuucaugagaauggccuggggcggcagcuacaucgcccuggacagcggcagaggcaacugggacugcaucaugaccagcuaccaguaccugaucauccagaacaccaccugggagaaccacugccaguucagcagacccagccccaucggcuaccugggccugcugagccagagaaccagagacaucuacaucagcagaagaagaagaggcaccuucaccuggacccugagcgacagcgagggcaacgccacccccggcggcuacugccugaccagauggaugcugaucgaggccgagcugaagugcuucggcaacaccgccguggccaagugcaacgagaagcacgacgaggaguucugcgacaugcugagacuguucgacuucugcaagcaggccaucagcagacugaagagccccgcccagaugagcauccagcugaucaacaaggccgugaacgcccugaucaacgaccagcugaucaugaagaaccaccugagagacaucaugggcauccccuacugcaacuacagcaaguacugguaccugaaccacaccaucaccggcaagaccagccugcccaagugcuggcuggugagcaacggcagcuaccugaacgagacccacuucagcgacgacaucgagcagcaggccgacaacaugaucaccgagaugcugcagaaggaguacauggagagacagggcaagaccccccugggccugguggaccuguucguguucagcaccagcuucuaccugaucagcaucuuccugagacuggugaagauccccacccacagacacaucgugggcaagcccugccccaagccccacagacugaaccacaugggcaucugcagcugcggccuguacaagcagcccggcgugcccgugagauggaagagaugaggacuagucccuguucccagagcccacuuuuuuuucuuuuuuugaaauaaaauagccugucuuucagaucucaaaggcucuuuucagagccaccaaaaaaaaaaaaaaaaaaaaaaaaaaaaaaaaaaaaaaaaaaaaaaaaaaaaaaaaaaaaaaaaagaauu

SEQ ID NO: 23562 - RNA, 1733 nt, Artificial Sequence
  mRNA product Design a-2 (hSL-A64-N5) comprising derived and/or modified sequence from LASV(Togo/2016/7082;Clade VI)__AMR44577__GPCmut2 (opt4)
aggagaguccgcucagccagguugcagaagcggcuuagcguguguccuaaucuucucucugcguguagguaggccugugccgcaaacaagcuuaccaugggccagaucaucaccuucuuccaggaggugccccacgugaucgaggaggugaugaacaucgugcugaucgcccugagccugcuggccauccugaagggcguguacaacguggccaccugcggcaucaucggccuggugaccuuccuguuccugugcggcagaagcugcagccugaucuacaagggcagcuacgagcugcagacccuggagcugaacauggagacccugaacaugugcaugccccugagcugcaccaagaacagcagccaccacuacaucagagugggcaacgagaccggccuggagcugacccugaccaacaccagcaucaucaaccacaaguucugcaaccugagcgacgcccacaagagaaaccuguacgaccacgcccugaugagcauccugagcaccuuccaccugagcauccccaacuucaaccaguacgaggccaugagcugcgacuucaacggcggcaagaucagcgugcaguacaaccugagccacgccuacgccguggacgccgccgagcacugcggcaccguggccaacggcgugcugcagaccuucaugagaauggccuggggcggcagcuacaucgcccuggacagcggcagaggcaacugggacugcaucaugaccagcuaccaguaccugaucauccagaacaccaccugggaggaccacugccaguucagcagacccagccccaucggcuaccugggccugcugagccagagaaccagagacaucuacaucagcagaagaagaagaggcaccuucaccuggacccugagcgacagcgagggcaacgagacccccggcggcuacugccugaccagauggaugcugaucgaggccgagcugaagugcuucggcaacaccgccguggccaagugcaacgagaagcacgacgaggaguucugcgacaugcugagacuguucgacuucugcaagcaggccauccagagacugaagagccccgcccagaugagcauccagcugaucaacaaggccgugaacgcccugaucaacgaccagcugaucaugaagaaccaccugagagacaugaugggcauccccuacugcaacuacagcaaguacugguaccugaaccacaccagcagcggcagaaccagccugcccaagugcuggcuggugagcaacggcagcuaccugaacgagacccacuucagcgacgacaucgagcagcaggccgacaacaugaucaccgagaugcugcagaaggaguacaucgacagacagggcaagaccccccugggccugguggaccuguucguguucagcaccagcuucuaccugaucagcaucuuccugcaccugaucaagauccccacccacagacacaucgugggcaagcccugccccaagccccacagacugaaccacaugggcaucugcagcugcggccuguacaagcagcccggcgugcccaccagauggaagagaugaggacuagucccuguucccagagcccacuuuuuuuucuuuuuuugaaauaaaauagccugucuuucagaucucaaaggcucuuuucagagccaccaaaaaaaaaaaaaaaaaaaaaaaaaaaaaaaaaaaaaaaaaaaaaaaaaaaaaaaaaaaaaaaaagaauu

SEQ ID NO: 23563 - RNA, 1733 nt, Artificial Sequence
  mRNA product Design a-2 (hSL-A64-N5) comprising derived and/or modified sequence from LASV(KAK-428;Clade n.d. (VII))__ANH09740__GPCmut2 (opt4)
aggagaguccgcucagccagguugcagaagcggcuuagcguguguccuaaucuucucucugcguguagguaggccugugccgcaaacaagcuuaccaugggccagaucgugaccuucuuccaggaggugccccacgugaucgaggaggugaugaacaucgugcugaucgcccugagccugcuggccauccugaagggccuguacaacuucgccaccugcggcgugaucggccugaucaccuuccugcugcugugcggcagaagcugcagcgccaccuacaagggccaguacgagcugcagacccuggagcugaacauggagagccugaacaugugcaugccccugagcugcaccaagaacaacagccaccacuacaucagagccggcaacaacaccggccuggagcugacccugaccaacaccagcaucaucagccacaaguucugcaaccugagcgacgcccacaagaagaaccuguacgaccacacccugaugagcaucaucaccaccuuccaccugagcauccccaacuucaaccaguacgaggccaugagcugcgacuucaacggcggcaagaucagcauccaguacaaccugagccacagcuacgccggcgacgccgcccagcacugcggcaccguggccaacggcgugcugcagaccuucaugagaauggccuggggcggcagcuaccuggcccuggacagcggcagaagaggcugggacugcaucaucagcagcuaccaguaccugaucauccagaacaccaccugggacgaccacugccaguucagcagacccagccccaucggcuaccugggcuucgugagccagaagaccagagacaucuacaucagcagaagaagaagaggcaccuucaccuggacccugagcgacagcgagggccacgacaugcccggcggcuacugccugaccagauggaugcugaucgaggccgaccugaagugcuucggcaacaccgccguggccaagugcaacgagaagcacgacgaggaguucugcgacauguggagacuguucgacuucugcaagcaggccauccagagacugaaggcccccgcccagaugaacauccagcugaucaacaaggccgugaacgcccugaucaacgaccagcugaugaugaagaaccaccugagagacaucaugggcauccccuacugcaacuacagcaaguucugguaccugaacaacaccaccaccggcagaaccagccugcccagaugcuggcugaucagcaacggcagcuaccugaacgagacccacuucagcgacgacaucgagcagcaggccgacaacaugaucaccgagaugcugcagaaggaguacauggacagacagggcaagaccccccugggccugguggaccuguucguguucagcaccagcuucuaccugaucaccaucuuccugcaccuggugaagauccccacccacagacacaucgugggcaagcccugccccaagccccacagacugaaccacaugggcaucugcagcugcggccuguacaagcagcccggcgugcccgugagauggaagagaugaggacuagucccuguucccagagcccacuuuuuuuucuuuuuuugaaauaaaauagccugucuuucagaucucaaaggcucuuuucagagccaccaaaaaaaaaaaaaaaaaaaaaaaaaaaaaaaaaaaaaaaaaaaaaaaaaaaaaaaaaaaaaaaaagaauu

SEQ ID NO: 23564 - RNA, 1733 nt, Artificial Sequence; identical to SEQ ID NO: 23558
  mRNA product Design a-2 (hSL-A64-N5) comprising derived and/or modified sequence from LASV(Pinneo-NIG-1969;Clade I)__AIT17836__GPCmut2 (opt4)

SEQ ID NO: 23565 - RNA, 1733 nt, Artificial Sequence
  mRNA product Design a-2 (hSL-A64-N5) comprising derived and/or modified sequence from LASV(ISTH0009-NIG-2011;Clade II)__AIT17404__GPCmut2 (opt4)
aggagaguccgcucagccagguugcagaagcggcuuagcguguguccuaaucuucucucugcguguagguaggccugugccgcaaacaagcuuaccaugggccagaucaucaccuucuuccaggaggugccccacgugaucgaggaggugaugaacaucgugcugaucgcccugagccugcuggccauccugaagggcaucuacaacguggccaccugcggccuguucggccuggugagcuuccugcugcugugcggcagaagcugcagcaccaccuacaagggcguguacgagcugcagacccuggagcuggacauggccagccugaacaugugcaugccccugagcugcaccaagaacaacagccaccacuacaucauggugggcaacgagaccggccuggagcugacccugaccaacaccagcaucaucaaccacaaguucugcaaccugagcgacgcccacaagaagaaccuguacgaccacgcccugaugagcaucaucagcaccuuccaccugagcauccccaacuucaaccaguacgaggccaugagcugcgacuucaacggcggcaagaucagcgugcaguacaaccugagccacgccuacgccguggacgccgccaaccacugcggcaccaucgccaacggcgugcugcagaccuucaugagaauggccuggggcggcagcuacaucgcccuggacagcggcaagggcagcugggacugcaucaugaccagcuaccaguaccugaucauccagaacaccaccugggaggaccacugccaguucagcagacccagccccaucggcuaccugggccugcugagccagagaaccagagacaucuacaucagcagaagaagaagaggcaccuucaccuggacccugagcgacagcgagggcaacgagacccccggcggcuacugccugaccagauggaugcugaucgaggccgagcugaagugcuucggcaacaccgccguggccaagugcaacgagaagcacgacgaggaguucugcgacaugcugagacuguucgacuucugcaagcaggccaucagaagacugaagacccccgcccagaugagcauccagcugaucaacaaggccgugaacgcccugaucaacgaccagcugaucaugaagaaccaccugagagacaucaugggcauccccuacugcaacuacagcaaguacugguaccugaaccacaccgugaccggcaagaccagccugcccagaugcuggcuggugagcaacggcagcuaccugaacgagacccacuucagcgacgacaucgagcagcaggccgacaacaugaucaccgagcugcugcagaaggaguacauggacagacagggcaagaccccccugggccugguggaccuguucguguucagcaccagcuucuaccugaucagcaucuuccugcaccugaucaagauccccacccacagacacaucaccggcaagcccugccccaagccccacagacugaaccacaugggcaucugcagcugcggccuguacaagcaccccggcgugcccgugaaguggaagagaugaggacuagucccuguucccagagcccacuuuuuuuucuuuuuuugaaauaaaauagccugucuuucagaucucaaaggcucuuuucagagccaccaaaaaaaaaaaaaaaaaaaaaaaaaaaaaaaaaaaaaaaaaaaaaaaaaaaaaaaaaaaaaaaaagaauu

SEQ ID NO: 23566 - RNA, 1733 nt, Artificial Sequence
  mRNA product Design a-2 (hSL-A64-N5) comprising derived and/or modified sequence from LASV(ISTH2010-NIG-2012;Clade II)__AIT17482__GPCmut2 (opt4)
aggagaguccgcucagccagguugcagaagcggcuuagcguguguccuaaucuucucucugcguguagguaggccugugccgcaaacaagcuuaccaugggccagaucaucaccuucuuccaggaggugccccacgugaucgaggaggugaugaacaucgugcugaucgcccugagccugcuggccauccugaagggcaucuacaacguggccaccugcggccuguucggccuggugagcuuccugcugcugugcggcagaagcugcagcaccaccuacaagggcguguacgagcugcagacccuggagcuggacauggccagccugaacaugugcaugccccugagcugcaccaagaacaacagccaccacuacaucauggugggcaacgagaccggccuggagcugacccugaccaacaccagcaucaucaaccacaaguucugcaaccugagcgacgcccacaagaagaaccuguacgaccacgcccugaugagcaucaucagcaccuuccaccugagcauccccaacuucaaccaguacgaggccaugagcugcgacuucaacggcggcaagaucagcgugcaguacaaccugagccacgccuacgccguggacgccgccaaccacugcggcaccaucgccaacggcgugcugcagaccuucaugagaauggccuggggcggcagcuacaucgcccuggacagcggcaagggcagcugggacugcaucaugaccagcuaccaguaccugaucauccagaacaucaccugggaggaccacugccaguucagcagacccagccccaucggcuaccugggccugcugagccagagaaccagagacaucuacaucagcagaagaagaagaggcaccuucaccuggacccugagcgacagcgagggcaacgagacccccggcggcuacugccugaccagauggaugcugaucgaggccgagcugaagugcuucggcaacaccgccguggccaagugcaacgagaagcacgacgaggaguucugcgacaugcugagacuguucgacuucugcaagcaggccaucagaagacugaagacccccgcccagaugagcauccagcugaucaacaaggccgugaacgcccugaucaacgaccagcugaucaugaagaaccaccugagagacaucaugggcauccccuacugcaacuacagcaaguacugguaccugaaccacaccgugaccggcaagaccagccugcccagaugcuggcuggugagcaacggcagcuaccugaacgagacccacuucagcgacgacaucgagcagcaggccgacaacaugaucaccgagcugcugcagaaggaguacaucgacagacagggcaagaccccccugggccugguggaccuguucguguucagcaccagcuucuaccugaucagcaucuuccugcaccuggugaagauccccacccacagacacguggugggcaagcccugccccaagccccacagacugaaccacaugggcaucugcagcugcggccuguacaagcaccccggcgugcccgugaaguggaagagaugaggacuagucccuguucccagagcccacuuuuuuuucuuuuuuugaaauaaaauagccugucuuucagaucucaaaggcucuuuucagagccaccaaaaaaaaaaaaaaaaaaaaaaaaaaaaaaaaaaaaaaaaaaaaaaaaaaaaaaaaaaaaaaaaagaauu

SEQ ID NO: 23567 - RNA, 1733 nt, Artificial Sequence
  mRNA product Design a-2 (hSL-A64-N5) comprising derived and/or modified sequence from LASV(Lassa virus/H.sapiens-wt/NGA/2015/ISTH_0543;Clade II)__AVO03639__GPCmut2 (opt4)
aggagaguccgcucagccagguugcagaagcggcuuagcguguguccuaaucuucucucugcguguagguaggccugugccgcaaacaagcuuaccaugggccagaucaucaccuucuuccaggaggugccccacgugaucgaggaggugaugaacaucgugcugaucgcccugagccugcuggccauccugaagggcaucuacaacguggccaccugcggccuguucggccuggugagcuuccugcugcugugcggcagaagcugcagcaccaccuacaagggcguguacgagcugcagacccuggagcuggacauggccaaccugaacaugugcaugccccugagcugcaccaagaacaacagccaccacuacaucauggugggcaacgagaccggccuggagcugacccugaccaacaccagcaucaucaaccacaaguucugcaaccugagcgacgcccacaagaagaaccuguacgaccacgcccugaugagcaucaucagcaccuuccaccugagcauccccaacuucaaccaguacgaggccaugagcugcgacuucaacggcggcaagaucagcgugcaguacaaccugagccacaccuacgccguggacgccgccaaccacugcggcaccaucgccaacggcgugcugcagaccuucaugagaauggccuggggcggcagcuacaucgcccuggacagcggcaagggcagcugggacugcaucaugaccagcuaccaguaccuggugauccagaacaccaccugggaggaccacugccaguucagcagacccagccccaucggcuaccugggccugcugagccagagaaccagagacaucuacaucagcagaagaagaagaggcaccuucaccuggacccugagcgacagcgagggcaacgagacccccggcggcuacugccugaccagauggaugcugaucgaggccgagcugaagugcuucggcaacaccgccguggccaagugcaacgagaagcacgacgaggaguucugcgacaugcugagacuguucgacuucugcaagcaggccaucagaagacugaagacccccgcccagaugagcauccagcugaucaacaaggccgugaacgcccugaucaacgaccagcugaucaugaagaaccaccugagagacaucaugggcauccccuacugcaacuacagcaaguacugguaccugaaccacaccgugaccggcaagaccagccugcccagaugcuggcuggugagcaacggcagcuaccugaacgagacccacuucagcgacgacaucgagcagcaggccgacaacaugaucaccgagcugcugcagaaggaguacaucgacagacagggcaagaccccccugggccugguggaccuguucguguucagcaccagcuucuaccugaucagcaucuuccugcaccuggugaagauccccacccacagacacaucaccggcaagcccugccccaagccccacagacugaaccacaugggcaucugcagcugcggccuguacaagcaccccggcgugcccgugaaguggaagagaugaggacuagucccuguucccagagcccacuuuuuuuucuuuuuuugaaauaaaauagccugucuuucagaucucaaaggcucuuuucagagccaccaaaaaaaaaaaaaaaaaaaaaaaaaaaaaaaaaaaaaaaaaaaaaaaaaaaaaaaaaaaaaaaaagaauu

SEQ ID NO: 23568 - RNA, 1733 nt, Artificial Sequence
  mRNA product Design a-2 (hSL-A64-N5) comprising derived and/or modified sequence from LASV(Lassa virus/H.sapiens-wt/NGA/2016/ISTH_0009;Clade II)__AVO03571__GPCmut2 (opt4)
aggagaguccgcucagccagguugcagaagcggcuuagcguguguccuaaucuucucucugcguguagguaggccugugccgcaaacaagcuuaccaugggccagaucaucaccuucuuccaggaggugccccacgugaucgaggaggugaugaacaucgugcugaucgcccugagccugcuggccauccugaagggcaucuacaacguggccaccugcggccugcugggccuggugagcuuccugcugcugugcggcagaagcugcagcaccaccuacaagggcguguacgagcugcagacccuggagcuggacauggccagccugaacaugugcaugccccugagcugcaccaagaacaacagccaccacuacaucauggugggcaacgagaccggccuggagcugacccugaccaacaccagcaucaucaaccacaaguucugcaaccugagcgacgcccacaagaagaaccuguacgaccacgcccugaugagcaucaucagcaccuuccaccugagcauccccaacuucaaccaguacgaggccaugagcugcgacuucaacggcggcagaaucagcgugcaguacaaccugagccacagcuacgccguggacgccgccaaccacugcggcaccaucgccaacggcgugcugcagaccuucaugagaauggccuggggcggcagcuacaucgcccuggacagcggcaagggcagcugggacugcaucaugaccagcuaccaguaccugaucauccagaacaccaccugggaggaccacugccaguucagcagacccagccccaucggcuaccugggccugcugagccagagaaccagagacaucuacaucagcagaagaagaagaggcaccuucaccuggacccugagcgacagcgagggcaacgagacccccggcggcuacugccugaccagauggaugcugaucgaggccgagcugaagugcuucggcaacaccgccguggccaagugcaacgagaagcacgacgaggaguucugcgacaugcugagacuguucgacuucugcaagcaggccaucagaagacugaagacccccgcccagaugagcauccagcugaucaacaaggccgugaacgcccugaucaacgaccagcugaucaugaagaaccaccugagagacaucaugggcauccccuacugcaacuacagcaaguacugguaccugaaccacaccgugaccggcaagaccagccugcccagaugcuggcuggugagcaacggcagcuaccugaacgagacccacuucagcgacgacaucgagcagcaggccgacaacaugaucaccgagcugcugcagaaggaguacaucgacagacagggcaagaccccccugggccugguggaccuguucguguucagcaccagcuucuaccugaucagcaucuuccugcaccuggugaagauccccacccacagacacaucaccggcaagcccugccccaagccccacagacugaaccacaugggcaucugcagcugcggccuguacaaccaccccggcgugcccgugaaguggaagagaugaggacuagucccuguucccagagcccacuuuuuuuucuuuuuuugaaauaaaauagccugucuuucagaucucaaaggcucuuuucagagccaccaaaaaaaaaaaaaaaaaaaaaaaaaaaaaaaaaaaaaaaaaaaaaaaaaaaaaaaaaaaaaaaaagaauu

SEQ ID NO: 23569 - RNA, 1733 nt, Artificial Sequence
  mRNA product Design a-2 (hSL-A64-N5) comprising derived and/or modified sequence from LASV(Lassa virus/H.sapiens-wt/NGA/2016/ISTH_0017;Clade II)__AVO03567__GPCmut2 (opt4)
aggagaguccgcucagccagguugcagaagcggcuuagcguguguccuaaucuucucucugcguguagguaggccugugccgcaaacaagcuuaccaugggccagaucaucaccuucuuccaggaggugccccacgugaucgaggaggugaugaacaucgugcugaucgcccugagccugcuggccauccugaagggcaucuacaacguggccaccugcggccuguucggccuggugagcuuccugcugcugugcggcagaagcugcagcaccaccuacaagggcguguacgagcugcagacccuggagcuggacauggccagccugaacaugugcaugccccugagcugcaccaagaacaacagccaccacuacaucauggugggcaacgagaccggccuggagcugacccugaccaacaccagcaucaucaaccacaaguucugcaaccugagcgacgcccacaagaagaaccuguacgaccacgcccugaugagcaucaucagcaccuuccaccugagcauccccaacuucaaccaguacgaggccaugagcugcgacuucaacggcggcaagaucagcgugcaguacaaccugagccacaccuacgccaucgacgccgccaaccacugcggcaccaucgccaacggcgugcugcagaccuucaugagaauggccuggggcggcagcuacaucgcccuggacagcggcaagggcagcugggacugcaucaugaccagcuaccaguaccugaucauccagaacaccaccugggaggaccacugccaguucagcagacccagccccaucggcuaccugggccugcugagccagagaaccagagacaucuacaucagcagaagaagaagaggcaccuucaccuggacccugagcgacagcgagggcaacgagacccccggcggcuacugccugaccagauggaugcugaucgaggccgagcugaagugcuucggcaacaccgccguggccaagugcaacgagaagcacgacgaggaguucugcgacaugcugagacuguucgacuucugcaagcaggccaucagaagacugaagacccccgcccagaugagcauccagcugaucaacaaggccgugaacgcccugaucaacgaccagcugaucaugaagaaccaccugagagacaucaugggcauccccuacugcaacuacagcaaguacugguaccugaaccacaccgugaccggcaagaccagccugcccagaugcuggcuggugagcaacggcagcuaccugaacgagacccacuucagcgacgacaucgagcagcaggccgacaacaugaucaccgagcugcugcagaaggaguacauggacagacagggcaagaccccccugggccugguggaccuguucguguucagcaccagcuucuaccugaucagcaucuuccugcaccuggugagaauccccacccacagacacgugaucggcaagcccugccccaagccccacagacugaaccacaugggcaucugcagcugcggccuguacaagcaccccggcgugcccgugaaguggaagagaugaggacuagucccuguucccagagcccacuuuuuuuucuuuuuuugaaauaaaauagccugucuuucagaucucaaaggcucuuuucagagccaccaaaaaaaaaaaaaaaaaaaaaaaaaaaaaaaaaaaaaaaaaaaaaaaaaaaaaaaaaaaaaaaaagaauu

SEQ ID NO: 23570 - RNA, 1733 nt, Artificial Sequence
  mRNA product Design a-2 (hSL-A64-N5) comprising derived and/or modified sequence from LASV(Lassa virus/H.sapiens-wt/NGA/2018/ISTH_0959;Clade II)__AVV65099__GPCmut2 (opt4)
aggagaguccgcucagccagguugcagaagcggcuuagcguguguccuaaucuucucucugcguguagguaggccugugccgcaaacaagcuuaccaugggccagaucaucaccuucuuccaggaggugccccacgugaucgaggaggugaugaacaucgugcugaucgcccugagccugcuggccauccugaagggcaucuacaacguggugaccugcggccuguucggccuggugagcuuccugcugcugugcggcagaagcugcagcaccaccuacaagggcguguacgagcugcagacccuggagcuggacauggccagccugaacaugugcaugccccugagcugcaccaagaacaacagccaccacuacaucauggugggcaacgagaccggccuggagcugacccugaccaacaccagcaucaucaaccacaaguucugcaaccugagcgacgcccacaagaagaaccuguacgaccacgcccugaugagcaucaucagcaccuuccaccugagcauccccaacuucaaccaguacgaggccaugagcugcgacuucaacggcggcaagaucagcgugcaguacaaccugagccacgccuacgccaucgacgccgccaaccacugcggcaccaucgccaacggcgugcugcagaccuucaugagaauggccuggggcggcagcuacaucgcccuggacagcggcaagggcagcugggacugcaucaugaccagcuaccaguaccugaucauccagaacaccaccugggaggaccacugccaguucagcagacccagccccaucggcuaccugggccugcugagccagagaaccagagacaucuacaucagcagaagaagaagaggcaccuucaccuggacccugagcgacagcgagggcaacgagacccccggcggcuacugccugaccagauggaugcugaucgaggccgagcugaagugcuucggcaacaccgccguggccaagugcaacgagaagcacgacgaggaguucugcgacaugcugagacuguucgacuucugcaagcaggccaucagaagacugaagacccccgcccagaugagcauccagcugaucaacaaggccgugaacgcccugaucaacgaccagcugaucaugaagaaccaccugagagacaucaugggcauccccuacugcaacuacagcaaguacugguaccugaaccacaccgugaccggcaagaccagccugcccagaugcuggcuggugagcaacggcagcuaccugaacgagacccacuucagcgacgacaucgagcagcaggccgacaacaugaucaccgagcugcugcagaaggaguacaucgacagacagggcaagaccccccugggccugguggaccuguucguguucagcaccagcuucuaccugaucagcaucuuccugcaccuggugaagauccccacccacagacacgugaucggcaagcccugccccaagccccacagacugaaccacaugggcaucugcagcugcggccuguacaagcaccccggcgugcccgugaaguggaagagaugaggacuagucccuguucccagagcccacuuuuuuuucuuuuuuugaaauaaaauagccugucuuucagaucucaaaggcucuuuucagagccaccaaaaaaaaaaaaaaaaaaaaaaaaaaaaaaaaaaaaaaaaaaaaaaaaaaaaaaaaaaaaaaaaagaauu

SEQ ID NO: 23571 - RNA, 1733 nt, Artificial Sequence
  mRNA product Design a-2 (hSL-A64-N5) comprising derived and/or modified sequence from LASV(LASV003-NIG-2008;Clade II)__AIT17580__GPCmut2 (opt4)
aggagaguccgcucagccagguugcagaagcggcuuagcguguguccuaaucuucucucugcguguagguaggccugugccgcaaacaagcuuaccaugggccagaucaucaccuucuuccaggaggugccccacgugaucgaggaggugaugaacaucgugcugaucgcccugagccugcuggccauccugaagggcaucuacaacguggccaccugcggccuguucggccuggugagcuuccugcugcugugcggcagaagcugcagcaccaccuacaagggcguguacgagcugcagacccuggagcuggacauggccagccugaacaugugcaugccccugagcugcaccaagaacaacagccaccacuacaucauggugggcaacgagaccggccuggagcugacccugaccaacaccagcaucaucaaccacaaguucugcaaccugagcgacgcccacaagaagaaccuguacgaccacgcccugaugagcaucaucagcaccuuccaccugagcauccccaacuucaaccaguacgaggccaugagcugcgacuucaacggcggcaagaucagcgugcaguacaaccugagccacaccuacgccguggacgccgccaaccacugcggcaccaucgccaacggcgugcugcagaccuucaugagaauggccuggggcggcagcuacaucgcccuggacagcggcaagggcagcugggacugcaucaugaccagcuaccaguaccugaucauccagaacaccaccugggaggaccacugccaguucagcagacccagccccaucggcuaccugggccugcugagccagagaaccagagacaucuacaucagcagaagaagaagaggcaccuucaccuggacccugagcgacagcgagagcaacgagacccccggcggcuacugccugaccagauggaugcugaucgaggccgagcugaagugcuucggcaacaccgccguggccaagugcaacgagaagcacgacgaggaguucugcgacaugcugagacuguucgacuucugcaagcaggccaucagaagacugaaggcccccgcccagaugagcauccagcugaucaacaaggccgugaacgcccugaucaacgaccagcugaucaugaagaaccaccugagagacaucaugggcauccccuacugcaacuacagcaaguacugguaccugaaccacaccgugaccggcagaaccagccugcccagaugcuggcuggugagcaacggcagcuaccugaacgagacccacuucagcgacgacaucgagcagcaggccgacaacaugaucaccgagcugcugcagaaggaguacauggacagacagggcaagaccccccugggccugguggaccuguucguguucagcaccagcuucuaccugaucagcaucuuccugcaccuggugaagauccccacccacagacacgugaucggcaagcccugccccaagccccacagacugaaccacaugggcaucugcagcugcggccuguacaagcaccccggcgugcccgugaaguggaagagaugaggacuagucccuguucccagagcccacuuuuuuuucuuuuuuugaaauaaaauagccugucuuucagaucucaaaggcucuuuucagagccaccaaaaaaaaaaaaaaaaaaaaaaaaaaaaaaaaaaaaaaaaaaaaaaaaaaaaaaaaaaaaaaaaagaauu

SEQ ID NO: 23572 - RNA, 1733 nt, Artificial Sequence
  mRNA product Design a-2 (hSL-A64-N5) comprising derived and/or modified sequence from LASV(LASV035-NIG-2009;Clade II)__AIT17588__GPCmut2 (opt4)
aggagaguccgcucagccagguugcagaagcggcuuagcguguguccuaaucuucucucugcguguagguaggccugugccgcaaacaagcuuaccaugggccagaucaucaccuucuuccaggaggugccccacgugaucgaggaggugaugaacaucgugcugaucgcccugagccugcuggccauccugaagggcaucuacaacguggccaccugcggccuguucggccuggugagcuuccugcugcugugcggcagaagcugcagcaccaccuacaagggcguguacgagcugcagacccuggagcuggacauggccagccugaacaugugcaugccccugagcugcaccaagaacaacagccaccacuacaucauggugggcaacgagaccggccuggagcugacccugaccaacaccagcaucaucaaccacaaguucugcaaccugagcgacgcccacaagaagaaccuguacgaccacgcccugaugagcaucaucagcaccuuccaccugagcauccccaacuucaaccaguacgaggccaugagcugcgacuucaacggcggcaagaucagcgugcaguacaaccugagccacgccuacgccguggacgccgccaaccacugcggcaccaucgccaacggcgugcugcagaccuucaugagaauggccuggggcggcagcuacaucgcccuggacagcggcaagggcagcugggacugcaucaugaccagcuaccaguaccugaucauccagaacaccaccugggaggaccacugccaguucagcagacccagccccaucggcuaccugggccugcugagccagagaaccagagacaucuacaucagcagaagaagaagaggcaccuucaccuggacccugagcgacagcgagggcaacgagacccccggcggcuacugccugaccagauggaugcugaucgaggccgagcugaagugcuucggcaacaccgccguggccaagugcaacgagaagcacgacgaggaguucugcgacaugcugagacuguucgacuucugcaagcaggccaucagaagacugaaggcccccgcccagaugagcauccagcugaucaacaaggccgugaacgcccugaucaacgaccagcugaucaugaagaaccaccugagagacaucaugggcauccccuacugcaacuacagcaaguacugguaccugaaccacaccgugaccggcaagaccagccugcccagaugcuggcuggugagcaacggcagcuaccugaacgagacccacuucagcgacgacaucgagcagcaggccgacaacaugaucaccgagcugcugcagaaggaguacaucgacagacagggcaagaccccccugggccugguggaccuguucguguucagcaccagcuucuaccugaucagcaucuuccugcaccuggugaagauccccacccacagacacgugaucggcaagcccugccccaagccccacagacugaaccacaugggcaucugcagcugcggccuguacaagcaccccggcgugcccgugaaguggaagagaugaggacuagucccuguucccagagcccacuuuuuuuucuuuuuuugaaauaaaauagccugucuuucagaucucaaaggcucuuuucagagccaccaaaaaaaaaaaaaaaaaaaaaaaaaaaaaaaaaaaaaaaaaaaaaaaaaaaaaaaaaaaaaaaaagaauu

SEQ ID NO: 23573 - RNA, 1733 nt, Artificial Sequence
  mRNA product Design a-2 (hSL-A64-N5) comprising derived and/or modified sequence from LASV(LASV1000-NIG-2009;Clade II)__AIT17782__GPCmut2 (opt4)
aggagaguccgcucagccagguugcagaagcggcuuagcguguguccuaaucuucucucugcguguagguaggccugugccgcaaacaagcuuaccaugggccagaucaucaccuucuuccaggaggugccccacgugaucgaggaggugaugaacaucgugcugaucgcccugagccugcuggccauccugaagggcaucuacaacguggccaccugcggccuguucggccuggugagcuuccugcugcugugcggcagaagcugcagcaccaccuacaagggcguguacgagcugcagacccuggagcuggacauggccagccugaacaugugcaugccccugagcugcaccaagaacaacagccaccacuacaucauggugggcaacgagaccggccuggagcugacccugaccaacaccagcaucaucaaccacaaguucugcaaccugagcgacgcccacaagaagaaccuguacgaccacgcccugaugagcaucaucagcaccuuccaccugagcauccccaacuucaaccaguacgaggccaugagcugcgacuucaacggcggcaagaucagcgugcaguacaaccugagccacaccuacgccguggacgccgccaaccacugcggcaccaucgccaacggcgugcugcagaccuucaugagaauggccuggggcggcagcuacaucgcccuggacagcggcaagggcagcugggacugcaucaugaccagcuaccaguaccugaucauccagaacaccaccugggaggaccacugccaguucagcagacccagccccaucggcuaccugggccugcugagccagagaaccagagacaucuacaucagcagaagaagaagaggcaccuucaccuggacccugagcgacagcgagggcaacgagacccccggcggcuacugccugaccagauggaugcugaucgaggccgagcugaagugcuucggcaacaccgccguggccaagugcaacgagaagcacgacgaggaguucugcgacaugcugagacuguucgacuucugcaagcaggccaucaagagacugaagacccccgcccagaugagcauccagcugaucaacaaggccgugaacgcccugaucaacgaccagcugaucaugaagaaccaccugagagacaucaugggcauccccuacugcaacuacagcaaguacugguaccugaaccacaccgugaccggcaagaccagccugcccagaugcuggcuggugagcaacggcagcuaccugaacgagacccacuucagcgacgacaucgagcagcaggccgacaacaugaucaccgagcugcugcagaaggaguacaucgacagacagggcaagaccccccugggccugguggaccuguucguguucagcaccagcuucuaccugaucagcaucuuccugcaccuggugaagauccccacccacagacacguggugggcaagcccugccccaagccccacagacugaaccacaugggcaucugcagcugcggccuguacaagcaccccggcgugcccgugaaguggaagagaugaggacuagucccuguucccagagcccacuuuuuuuucuuuuuuugaaauaaaauagccugucuuucagaucucaaaggcucuuuucagagccaccaaaaaaaaaaaaaaaaaaaaaaaaaaaaaaaaaaaaaaaaaaaaaaaaaaaaaaaaaaaaaaaaagaauu

SEQ ID NO: 23574 - RNA, 1733 nt, Artificial Sequence
  mRNA product Design a-2 (hSL-A64-N5) comprising derived and/or modified sequence from LASV(LASV221-NIG-2010;Clade II)__AIT17624__GPCmut2 (opt4)
aggagaguccgcucagccagguugcagaagcggcuuagcguguguccuaaucuucucucugcguguagguaggccugugccgcaaacaagcuuaccaugggccagaucaucaccuucuuccaggaggugccccacgugaucgaggaggugaugaacaucgugcugaucgcccugagccugcuggccauccugaagggcaucuacaacguggccaccugcggccuguucggccuggugagcuuccugcugcugugcggcagaagcugcagcaccaccuacaagggcguguacgagcugcagacccuggagcuggacauggccagccugaacaugugcaugccccugagcugcaccaagaacaacagccaccacuacaucauggugggcaacgagaccggccuggagcugacccugaccaacaccagcaucaucaaccacaaguucugcaaccugagcgacgcccacaagaagaaccuguacgaccacgcccugaugagcaucaucagcaccuuccaccugagcauccccaacuucaaccaguacgaggccaugagcugcgacuucaacggcggcaagaucagcgugcaguacaaccugagccacaccuacgccaucgacgccgccaaccacugcggcaccaucgccaacggcgugcugcagaccuucaugagaauggccuggggcggcagcuacaucgcccuggacagcggcaagggcagcugggacugcaucaugaccagcuaccaguaccugaucauccagaacaccaccugggaggaccacugccaguucagcagacccagccccaucggcuaccugggccugcugagccagagaaccagagacaucuacaucagcagaagaagaagaggcaccuucaccuggacccugagcgacagcgagggcaacgagacccccggcggcuacugccugaccagauggaugcugaucgaggccgagcugaagugcuucggcaacaccgccguggccaagugcaacgagaagcacgacgaggaguucugcgacaugcugagacuguucgacuucugcaagcaggccaucagaagacugaagacccccgcccagaugagcauccagcugaucaacaaggccgugaacgcccugaucaacgaccagcugaucaugaagaaccaccugagagacaucaugggcauccccuacugcaacuacagcaaguacugguaccugaaccacaccgugaccggcaagaccagccugcccagaugcuggcuggugagcaacggcagcuaccugaacgagacccacuucagcgacgacaucgagcagcaggccgacaacaugaucaccgagaugcugcagaaggaguacauggacagacagggcaagaccccccugggccugguggaccuguucguguucagcaccagcuucuaccugaucagcaucuuccugcaccuggugaagauccccacccacagacacgugaucggcaagcccugccccaagccccacagacugaaccacaugggcaucugcagcugcggccuguacaagcaccccggcgugcccgugaaguggaagagaugaggacuagucccuguucccagagcccacuuuuuuuucuuuuuuugaaauaaaauagccugucuuucagaucucaaaggcucuuuucagagccaccaaaaaaaaaaaaaaaaaaaaaaaaaaaaaaaaaaaaaaaaaaaaaaaaaaaaaaaaaaaaaaaaagaauu

SEQ ID NO: 23575 - RNA, 1733 nt, Artificial Sequence
  mRNA product Design a-2 (hSL-A64-N5) comprising derived and/or modified sequence from LASV(LASV237-NIG-2010;Clade II)__AIT17638__GPCmut2 (opt4)
aggagaguccgcucagccagguugcagaagcggcuuagcguguguccuaaucuucucucugcguguagguaggccugugccgcaaacaagcuuaccaugggccagaucaucaccuucuuccaggaggugccccacgugaucgaggaggugaugaacaucgugcugaucgcccugagccugcuggccauccugaagggcaucuacaacguggccaccugcggccuguucggccuggugagcuuccugcugcugugcggcagaagcugcagcaccaccuacaagggcguguacgagcugcagacccuggagcuggacauggccagccugaacaugugcaugccccugagcugcaccaagaacaacagccaccacuacaucauggugggcaacgagaccggccuggagcugacccugaccaacaccagcaucaucaaccacaaguucugcaaccugagcgacgcccacaagaaggaccuguacgaccacgcccugaugagcaucaucagcaccuuccaccugagcauccccaacuucaaccaguacgaggccaugagcugcgacuucaacggcggcaagaucagcgugcaguacaaccugagccacaccuacgccguggacgccgccaaccacugcggcaccaucgccaacggcgugcugcagaccuucaugagaauggccuggggcggcagcuacaucgcccuggacagcggcaagggcagcugggacugcaucaugaccagcuaccaguaccugaucauccagaacaccaccugggaggaccacugccaguucagcagacccagccccaucggcuaccugggccugcugagccagagaaccagagacaucuacaucagcagaagaagaagaggcaccuucaccuggacccugagcgacagcgagggcaacgagacccccggcggcuacugccugaccagauggaugcugaucgaggccgagcugaagugcuucggcaacaccgccguggccaagugcaacgagaagcacgacgaggaguucugcgacaugcugagacuguucgacuucugcaagcaggccaucagaagacugaagacccccgcccagaugagcauccagcugaucaacaaggccgugaacgcccugaucaacgaccagcugaucaugaagaaccaccugagagacaucaugggcauccccuacugcaacuacagcaaguacugguaccugaaccacaccgugaccggcaagaccagccugcccagaugcuggcuggugagcaacggcagcuaccugaacgagacccacuucagcgacgacaucgagcagcaggccgacaacaugaucaccgagcugcugcagaaggaguacauggacagacagggcaagaccccccugggccugguggaccuguucguguucagcaccagcuucuaccugaucagcaucuuccugcaccugaucaagauccccacccacagacacaucaccggcaagcccugccccaagccccacagacugaaccacaugggcaucugcagcugcggccuguacaagcaccccggcgugcccgugaaguggaagagaugaggacuagucccuguucccagagcccacuuuuuuuucuuuuuuugaaauaaaauagccugucuuucagaucucaaaggcucuuuucagagccaccaaaaaaaaaaaaaaaaaaaaaaaaaaaaaaaaaaaaaaaaaaaaaaaaaaaaaaaaaaaaaaaaagaauu

SEQ ID NO: 23576 - RNA, 1733 nt, Artificial Sequence
  mRNA product Design a-2 (hSL-A64-N5) comprising derived and/or modified sequence from LASV(LASV253-NIG-2011;Clade II)__AIT17670__GPCmut2 (opt4)
aggagaguccgcucagccagguugcagaagcggcuuagcguguguccuaaucuucucucugcguguagguaggccugugccgcaaacaagcuuaccaugggccagaucaucaccuucuuccaggaggugccccacgugaucgaggaggugaugaacaucgugcugaucgcccugagccugcuggccauccugaagggcaucuacaacguggccaccugcggccuguucggccuggugagcuuccugcugcugugcggcagaagcugcagcaccaccuacaagggcguguacgagcugcagacccuggagcuggacauggccagccugaacaugugcaugccccugagcugcaccaagaacaacagccaccacuacaucauggugggcaacgagaccggccuggagcugacccugaccaacaccagcaucaucaaccacaaguucugcaaccugagcgacgcccacaagaagaaccuguacgaccacgcccugaugagcaucaucagcaccuuccaccugagcauccccaacuucaaccaguacgaggccaugagcugcgacuucaacggcggcaagaucagcgugcaguacaaccugagccacaccuacgccguggacgccgccaaccacugcggcaccaucgccaacggcgugcugcagaccuucaugagaauggccuggggcggcagcuacaucgcccuggacagcggcaagggcagcugggacugcaucaugaccagcuaccaguaccugaucauccagaacaccaccugggaggaccacugccaguucagcagacccagccccaucggcuaccugggccugcugagccagagaaccagagacaucuacaucagcagaagaagaagaggcaccuucaccuggacccugagcgacagcgagggcaacgagacccccggcggcuacugccugaccagauggaugcugaucgaggccgagcugaagugcuucggcaacaccgccguggccaagugcaacgagaagcacgacgaggaguucugcgacaugcugagacuguucgacuucugcaagcaggccaucagaagacugaaggcccccgcccagaugagcauccagcugaucaacaaggccgugaacgcccugaucaacgaccagcugaucaugaagaaccaccugagagacaucaugggcauccccuacugcaacuacagcaaguacugguaccugaaccacaccgugaccggcagaaccagccugcccagaugcuggcuggugagcaacggcagcuaccugaacgagacccacuucagcgacgacaucgagcagcaggccgacaacaugaucaccgagcugcugcagaaggaguacaucgacagacagggcaagaccccccugggccugguggaccuguucguguucagcaccagcuucuaccugaucagcaucuuccugcaccuggugaagauccccacccacagacacaucaucggcaagcccugccccaagccccacagacugaaccacaugggcaucugcagcugcggccuguacaagcaccccggcgugcccgugaaguggaagagaugaggacuagucccuguucccagagcccacuuuuuuuucuuuuuuugaaauaaaauagccugucuuucagaucucaaaggcucuuuucagagccaccaaaaaaaaaaaaaaaaaaaaaaaaaaaaaaaaaaaaaaaaaaaaaaaaaaaaaaaaaaaaaaaaagaauu

SEQ ID NO: 23577 - RNA, 1733 nt, Artificial Sequence
  mRNA product Design a-2 (hSL-A64-N5) comprising derived and/or modified sequence from LASV(LASV254-NIG-2011;Clade II)__AIT17674__GPCmut2 (opt4)
aggagaguccgcucagccagguugcagaagcggcuuagcguguguccuaaucuucucucugcguguagguaggccugugccgcaaacaagcuuaccaugggccagaucaucaccuucuuccaggaggugccccacgugaucgaggaggugaugaacaucgugcugaucgcccugagccugcuggccauccugaagggcaucuacaacguggccaccugcggccuguucggccuggugagcuuccugcugcugugcggcagaagcugcagcaccaccuacaagggcguguacgagcugcagacccuggagcuggacaugaccaaccugaacaugugcaugccccugagcugcaccaagaacaacagccaccacuacaucauggugggcaacgagaccggccuggagcugacccugaccaacaccagcaucaucaaccacaaguucugcaaccugagcgacgcccacaagaagaaccuguacaaccacgcccugaugagcaucaucagcaccuuccaccugagcauccccaacuucaaccaguacgaggccaugagcugcgacuucaacggcggcaagaucagcgugcaguacaaccugagccacagcuacgccguggacgccgccaaccacugcggcaccaucgccaacggcgugcugcagaccuucaugagaauggccuggggcggcagcuacaucgcccuggacagcggcaagggcaacugggacugcaucaugaccagcuaccaguaccugaucauccagaacaccaccugggaggaccacugccaguucagcagacccagccccaucggcuaccugggccugcugagccagagaaccagagacaucuacaucagcagaagaagaagaggcaccuucaccuggacccugagcgacagcgagggcaacgagacccccggcggcuacugccugaccagauggaugcugaucgaggccgagcugaagugcuucggcaacaccgccguggccaagugcaacgagaagcacgacgaggaguucugcgacaugcugagacuguucgacuucugcaagcaggccaucagaagacugaagacccccgcccaggccaacauccagcugaucaacaaggccgugaacgcccugaucaacgaccagcugaucaugaagaaccaccugagagacaucaugggcauccccuacugcaacuacagcaaguacugguaccugaaccacaccgugaccggcaagaccagccugcccagaugcuggcuggugagcaacggcagcuaccugaacgagacccacuucagcgacgacaucgagcagcaggccgacaacaugaucaccgagcugcugcagaaggaguacauggacagacagggcaagaccccccugggccugguggaccuguucguguucagcaccagcuucuaccugaucagcaucuuccugcaccuggugaagauccccacccacagacacgugaucggcaagcccugccccaagccccacagacugaaccacaugggcaucugcagcugcggccuguacaagcaccccggcgugcccgugaaguggaagagaugaggacuagucccuguucccagagcccacuuuuuuuucuuuuuuugaaauaaaauagccugucuuucagaucucaaaggcucuuuucagagccaccaaaaaaaaaaaaaaaaaaaaaaaaaaaaaaaaaaaaaaaaaaaaaaaaaaaaaaaaaaaaaaaaagaauu

SEQ ID NO: 23578 - RNA, 1733 nt, Artificial Sequence
  mRNA product Design a-2 (hSL-A64-N5) comprising derived and/or modified sequence from LASV(Nig08-A19;Clade III)__ADU56618__GPCmut2 (opt4)
aggagaguccgcucagccagguugcagaagcggcuuagcguguguccuaaucuucucucugcguguagguaggccugugccgcaaacaagcuuaccaugggccagaucgugaccuucuuccaggaggugccccacgugaucgaggaggugaugaacaucgugcugaucgcccugagcauccuggccauccugaagggccuguacaacaucgccaccugcggccugaucggccuggugaccuuccugcugcugagcggcagaagcugcagcaugaccuacaagggcguguacgagcugcagacccuggagcugaacaugaacacccugaacaugugcaugccccugagcugcaccaagaacaacagccaccacuacaucauggugggcaacgagaccggccuggagcugacccugaccaacaccagccugcugcaccacaaguucugcaaccugagcgacgcccacaagaagaaccuguacgaccacacccugaugagcaucaucagcaccuuccaccugagcauccccaacuucaaccaguacgaggccaugagcugcgacuucaacggcggcaagaucaccgugcaguacaaccugagccacagcuacgccaucgacgccgccaaccacugcggcaccguggccaacggcgugcugcagaccuucaugagaauggccuggggcggcagcuacaucgcccuggacagcggcagaggcaagugggacugcaucaugaccagcuaccaguaccugaucauccagaacaccaccugggaggaccacugccaguucagcagacccagccccaucggcuaccugggccugcugagccagagaaccagagacaucuacaucagcagaagaagaagaggcaccuucaccuggacccugagcgacagcgagggcaacgagacccccggcggcuacugccugaccagauggaugcugaucgaggccgagcugaagugcuucggcaacaccgccguggccaagugcaacgagaagcacgacgaggaguucugcgacaugcugagacuguucgacuucugcaagcaggccaucagaagacugaaggcccccgcccagaugagcauccagcugaucaacaaggccgugaacgcccugaucaacgaccagcugaucaugaagaaccaccugagagacaucaugggcauccccuacugcaacuacagcaaguacugguaccugaaccacaccagcaccggcagaaccagccugcccagaugcuggcuggugagcaacggcagcuaccugaacgagacccacuucagcgacgacaucgagcagcaggccgacaacaugaucaccgagaugcugcagaaggaguaccuggacagacagggcaagaccccccugggccugguggaccuguucguguucagcaccagcuucuaccugaucagcaucuuccugcaccuggugaagauccccacccacagacacaucgugggcaagcccugccccaagccccacagacugaaccacaugggcaucugcagcugcggccuguacaagcagcccggcgugcccgugagauggaagagaugaggacuagucccuguucccagagcccacuuuuuuuucuuuuuuugaaauaaaauagccugucuuucagaucucaaaggcucuuuucagagccaccaaaaaaaaaaaaaaaaaaaaaaaaaaaaaaaaaaaaaaaaaaaaaaaaaaaaaaaaaaaaaaaaagaauu

SEQ ID NO: 23579 - RNA, 1736 nt, Artificial Sequence
  mRNA product Design a-2 (hSL-A64-N5) comprising derived and/or modified sequence from LASV(G1180-SLE-2010;Clade IV)__AIT17168__GPCmut2 (opt4)
aggagaguccgcucagccagguugcagaagcggcuuagcguguguccuaaucuucucucugcguguagguaggccugugccgcaaacaagcuuaccaugggccagaucgugaccuucuuccaggaggugccccacgugaucgaggaggugaugaacaucgugcugaucgcccugagcauccuggccgugcugaagggccuguacaacuucgccaccugcggccuggugggccugcugaccuuccugcugcugugcggcagaagcugcaccgccagcagauacaagggcguguacgagcugcagacccuggagcugaacauggagacccugaacaugugcaugccccugagcugcaccaagaacaacagccaccacuacaucauggugggcaacgagaccggccuggagcugacccugaccaacaccagcaucaucaaccacaaguucugcaaccugagcgacgcccacaagaagaaccuguacgaccacgcccugaugagcaucaucagcaccuuccaccugagcauccccaacuucaaccaguacgaggccaugagcugcgacuucaacggcggcaagaucagcgugcaguacaaccugagccacagcuacgccggcgacgccgccaaccacugcggcaccguggccaacggcgugcugcagaccuucaugagaauggccuggggcggcagcuacaucgcccuggacagcggccacggcagcugggacugcaucaugaccagcuaccaguaccugaucauccagaacaccaccugggaggaccacugccaguucagcagacccagccccaucggcuaccugggccugcugagccagagaaccagagacaucuacaucagcagaagaagaagaggcaccuucaccuggacccugagcgacagcgagggcaaggacacccccggcggcuacugccugaccagauggaugcugaucgaggccgagcugaagugcuucggcaacaccgccguggccaagugcaacgagaagcacgacgaggaguucugcgacaugcugagacuguucgacuucugcaagcaggccauccagagacugaaggcccccgcccagaugagcauccagcugaucaacaaggccgugaacgcccugaucaacgaccagcugaucaugaagaaccaccugagagacaucaugggcauccccuacugcaacuacagcaaguacugguaccugaaccacaccaccaccggcaagaccagccugcccaagugcuggcuggugagcaacggcagcuaccugaacgagacccacuucagcgacgacaucgagcagcaggccgacaacaugaucaccgagaugcugcagaaggaguacauggagagacagggcaagaccccccugggccugguggaccuguucguguucagcaccagcuucuaccugaucagcaucuuccugcaccuggugaagauccccacccacagacacaucgugggcaagagcugccccaagccccacagacugaaccacaugggcaucugcagcugcggccuguacaagcagcccggcgugcccgugaaguggaagagaugaggacuagucccuguucccagagcccacuuuuuuuucuuuuuuugaaauaaaauagccugucuuucagaucucaaaggcucuuuucagagccaccaaaaaaaaaaaaaaaaaaaaaaaaaaaaaaaaaaaaaaaaaaaaaaaaaaaaaaaaaaaaaaaaagaauu

SEQ ID NO: 23580 - RNA, 1736 nt, Artificial Sequence
  mRNA product Design a-2 (hSL-A64-N5) comprising derived and/or modified sequence from LASV(G1442-SLE-2011;Clade IV)__AIT17180__GPCmut2 (opt4)
aggagaguccgcucagccagguugcagaagcggcuuagcguguguccuaaucuucucucugcguguagguaggccugugccgcaaacaagcuuaccaugggccagaucgugaccuucuuccaggaggugccccacgugaucgaggaggugaugaacaucgugcugaucgcccugagcauccuggccgugcugaagggccuguacaacguggccaccugcggccugaucggccuggugaccuuccugcugcugugcggcagaagcugcaccaccacccuguacaagggcguguacgagcugcagacccuggagcugaacauggagacccugaacaugugcaugccccugagcugcaccaagaacaacagccaccacuacaucagagugggcaacgagaccggccuggagcugacccugaccaacaccagcaucaucaaccacaaguucugcaaccugagcgacgcccacaagaagaaccuguacgaccacgcccugaugagcaucaucagcaccuuccaccugagcauccccaacuucaaccaguacgaggccaugagcugcgacuucaacggcggcaagaucagcgugcaguacaaccugagccacagcuacgccggcgacgccgccaaccacugcggcaccguggccaacggcgugcugcagaccuucaugagaauggccuggggcggcagcuacaucgcccuggacagcggcagaggcaacugggacugcaucaugaccagcuaccaguaccugaucauccagaacaccaccugggacgaccacugccaguucagcagacccagccccaucggcuaccugggccugcugagccagagaaccagagacguguacaucagcagaagaagaagaggcaccuucaccuggacccugagcgacagcgagggcaaggacacccccggcggcuacugccugaccagauggaugcugaucgaggccgagcugaagugcuucggcaacaccgccguggccaagugcaacgagaagcacgacgaggaguucugcgacaugcugagacuguucgacuucugcaagcaggccauccagagacugaaggcccccgcccagaugagcauccagcugaucaacaaggccgugaacgcccugaucaacgaccagcugaucaugaagaaccaccugagagacaucaugggcauccccuacugcaacuacagcaaguacugguaccugaacaacaccgccaccggcaagaccagccugcccaagugcuggcugaucagcaacggcagcuaccugaacgagacccacuucagcgacgacaucgagcaggaggccgacaacaugaucaccgagaugcugcagaaggaguacauggagagacagggcaagaccccccugggccugguggaccuguucguguucagcaccagcuucuaccugaucagcaucuuccugcaccuggugaagauccccacccacagacacaucgugggcaagagcugccccaagccccacagacugaaccacaugggcaucugcagcugcggccuguacaagcagcccggcgugcccgugagauggaagagaugaggacuagucccuguucccagagcccacuuuuuuuucuuuuuuugaaauaaaauagccugucuuucagaucucaaaggcucuuuucagagccaccaaaaaaaaaaaaaaaaaaaaaaaaaaaaaaaaaaaaaaaaaaaaaaaaaaaaaaaaaaaaaaaaagaauu

SEQ ID NO: 23581 - RNA, 1736 nt, Artificial Sequence
  mRNA product Design a-2 (hSL-A64-N5) comprising derived and/or modified sequence from LASV(G3010-SLE-2013;Clade IV)__AIT17344__GPCmut2 (opt4)
aggagaguccgcucagccagguugcagaagcggcuuagcguguguccuaaucuucucucugcguguagguaggccugugccgcaaacaagcuuaccaugggccagaucgugaccuucuuccaggaggugccccacgugaucgaggaggugaugaacaucgugcugaucgcccugagcauccuggccgugcugaagggccuguacaacuucgccaccugcggccuggugggccuggugaccuuccugcugcugugcggcagaagcugcaccaccagccuguacaagggcguguacgagcugcagacccuggagcugaacauggagacccugaacaugugcaugccccugagcugcaccaagaacaacagccaccacuacaucauggugggcaacgagaccggccuggagcugacccugaccaacaccagcaucaucaaccacaaguucugcaaccugagcgacgcccacaagaagaaccuguacaaccacgcccugaugagcaucaucagcaccuuccaccugagcauccccaacuucaaccaguacgaggccaugagcugcgacuucaacggcggcaagaucagcgugcaguacaaccugagccacagcuacgccggcgacgccgccagccacugcggcaccguggccaacggcgugcugcagaccuucaugagaauggccuggggcggcagcuacaucgcccuggacagcggcuacggcaagugggacugcaucaugaccagcuaccaguaccugaucauccagaacaccaccugggaggaccacugccaguucagcagacccagccccaucggcuaccugggccugcugagccagagaaccagagacaucuacaucagcagaagaagaagaggcaccuucaccuggacccugagcgacagcgagggcaaggacacccccggcggcuacugccugaccagauggaugcugaucgaggccgagcugaagugcuucggcaacaccgccguggccaagugcaacgagaagcacgacgaggaguucugcgacaugcugagacuguucgacuucugcaagcaggccauccagagacugaagacccccgcccagaugagcauccagcugaucaacaaggccgugaacgcccugaucaacgaccagcugaucaugaagaaccaccugagagacaucaugggcauccccuacugcaacuacagcaaguacugguaccugaaccacaccaccaccggcaagaccagccugcccaagugcuggcuggugagcaacggcagcuaccugaacgagacccacuucagcgacgacaucgagcagcaggccgacaacaugaucaccgagaugcugcagaaggaguacauggagagacagggcaagaccccccugggccugguggaccuguucguguucagcaccagcuucuaccugaucagcaucuuccugcaccuggugaagauccccacccacagacacaucgugggcaagagcugccccaagccccacagacugaaccacaugggcaucugcagcugcggccuguacaagcagcccggcgugcccgugagauggaagagaugaggacuagucccuguucccagagcccacuuuuuuuucuuuuuuugaaauaaaauagccugucuuucagaucucaaaggcucuuuucagagccaccaaaaaaaaaaaaaaaaaaaaaaaaaaaaaaaaaaaaaaaaaaaaaaaaaaaaaaaaaaaaaaaaagaauu

SEQ ID NO: 23582 - RNA, 1736 nt, Artificial Sequence
  mRNA product Design a-2 (hSL-A64-N5) comprising derived and/or modified sequence from LASV(G502-SLE-2009;Clade IV)__AIT17126__GPCmut2 (opt4)
aggagaguccgcucagccagguugcagaagcggcuuagcguguguccuaaucuucucucugcguguagguaggccugugccgcaaacaagcuuaccaugggccagaucgugaccuucuuccaggaggugccccacgugaucgaggaggugaugaacaucgugcugaucgcccugagcauccuggccgugcugaagggccuguacaacuucgccaccugcggccuggugggccugcugaccuuccugcugcugugcggcagaagcugcaccaccggccuguacaagggcguguacgagcugcagacccuggagcugaacauggagacccugaacaugugcaugccccugagcugcaccaagaacaacagccaccacuacaucauggugggcaacgagaccggccuggagcugacccugaccaacaccagcaucaucaaccacaaguucugcaaccugagcgacgcccacaagaagaaccuguacgaccacgcccugaugagcaucaucagcaccuuccaccugagcauccccaacuucaaccaguacgaggccaugagcugcgacuucaacggcggcaagaucagcgugcaguacaaccugagccacagcuacgccggcgacgccgccgaccacugcggcaccguggccaacggcgugcugcagaccuucaugagaauggccuggggcggcagcuacaucgcccuggacagcggcagaggcagaugggacugcaucaugaccagcuaccaguaccugaucauccagaacaccaccugggaggaccacugccaguucagcagacccagccccaucggcuaccugggccugcugagccagagaaccagagacaucuacaucagcagaagaagaagaggcaccuucaccuggacccugagcgacagcgagggcaaggacacccccggcggcuacugccugaccagauggaugcugaucgaggccgagcugaagugcuucggcaacaccgccguggccaagugcaacgagaagcacgacgaggaguucugcgacaugcugagacuguucgacuucugcaagcaggccauccagagacugaaggcccccgcccagaugagcauccagcugaucaacaaggccgugaacgcccugaucaacgaccagcuggugaugaagaaccaccugagagacaucaugggcauccccuacugcaacuacagcagauacugguaccugaaccacaccaccaccggcagaaccagccugcccaagugcuggcuggugagcaacggcagcuaccugaacgagacccacuucagcgacgacaucgagcagcaggccgacaacaugaucaccgagaugcugcagaaggaguacauggagagacagggcaagaccccccugggccugguggaccuguucguguucagcaccagcuucuaccugaucagcaucuuccugcaccuggugaagauccccacccacagacacaucgugggcaagagcugccccaagccccacagacugaaccacaugggcaucugcagcugcggccuguacaagcagcccggcgugcccgugaaguggaagagaugaggacuagucccuguucccagagcccacuuuuuuuucuuuuuuugaaauaaaauagccugucuuucagaucucaaaggcucuuuucagagccaccaaaaaaaaaaaaaaaaaaaaaaaaaaaaaaaaaaaaaaaaaaaaaaaaaaaaaaaaaaaaaaaaagaauu

SEQ ID NO: 23583 - RNA, 1736 nt, Artificial Sequence
  mRNA product Design a-2 (hSL-A64-N5) comprising derived and/or modified sequence from LASV(G733-SLE-2010;Clade IV)__AIT17154__GPCmut2 (opt4)
aggagaguccgcucagccagguugcagaagcggcuuagcguguguccuaaucuucucucugcguguagguaggccugugccgcaaacaagcuuaccaugggccagaucgugaccuucuuccaggaggugccccacgugaucgaggaggugaugaacaucgugcugaucgcccugagcauccuggccgugcugaagggccuguacaacuucgccaccugcggcaucgugggccuggugagcuuccugcugcugugcggcagaagcugcaccaccagccuguacaagggcguguacgagcugcagacccuggagcugaacauggagacccugaacaugugcaugccccugagcugcaccaagaacaacagccaccacuacaucauggugggcaacgagaccggccuggagcugacccugaccaacaccagcaucaucaaccacaaguucugcaaccugagcgacgcccacaagaagaaccuguacgaccacgcccugaugagcaucaucagcaccuuccaccugagcauccccaacuucaaccaguacgaggccaugagcugcgacuucaacggcggcaagaucagcgugcaguacaaccugagccacagcuacgccggcgacgccgccaaccacugcggcaccaucgccaacggcgugcugcagaccuucaugagaauggccuggggcggcagcuacaucgcccuggacagcggcagagacagaugggacugcaucaugaccagcuaccaguaccugaucauccagaacaccaccugggaggaccacugccaguucagcagacccagccccaucggcuaccugggccugcugagccagagaaccagagacaucuacaucagcagaagaagaagaggcaccuucaccuggacccugagcgacagcgagggcaaggacacccccggcggcuacugccugaccagauggaugcugaucgaggccgagcugaagugcuucggcaacaccgccguggccaagugcaacgagaagcacgacgaggaguucugcgacaugcugagacuguucgacuucugcaagcaggccauccagagacugaaggcccccgcccagaugagcauccagcugaucaacaaggccgugaacgcccugaucaacgaccagcugaucaugaagaaccaccugagagacaucaugggcauccccuacugcaacuacagcaaguacugguaccugaaccacaccaccaccggcaagaccagccugcccaagugcuggcuggugagcaacggcagcuaccugaacgagacccacuucagcgacgacaucgagcagcaggccgacaacaugaucaccgagaugcugcagaaggaguacauggagagacagggcaagaccccccugggccugguggaccuguucguguucagcaccagcuucuaccugaucagcaucuuccugcaccuggugaagauccccacccacagacacguggugggcaagagcugccccaagccccacagacugaaccacaugggcaucugcagcugcggccuguacggccagcccggcgugcccgugaaguggaagagaugaggacuagucccuguucccagagcccacuuuuuuuucuuuuuuugaaauaaaauagccugucuuucagaucucaaaggcucuuuucagagccaccaaaaaaaaaaaaaaaaaaaaaaaaaaaaaaaaaaaaaaaaaaaaaaaaaaaaaaaaaaaaaaaaagaauu

SEQ ID NO: 23584 - RNA, 1736 nt, Artificial Sequence
  mRNA product Design a-2 (hSL-A64-N5) comprising derived and/or modified sequence from MOPV/LASV reassortant(IGS-1;Clade IV)__AFY05576__GPCmut2 (opt4)
aggagaguccgcucagccagguugcagaagcggcuuagcguguguccuaaucuucucucugcguguagguaggccugugccgcaaacaagcuuaccaugggccagaucgugaccuucuuccaggaggugccccacgugaucgaggaggugaugaacaucgugcugaucgcccugagcgugcuggccgugcugaagggccuguacaacuucgccaccugcggccuggugggccuggugaccuuccugcugcugugcggcagaagcugcaccaccagccuguacaagggcguguacgagcugcagacccuggagcugaacauggagacccugaacaugugcaugccccugagcugcaccaagaacaacagccaccacuacaucauggugggcaacgagaccggccuggagcugacccugaccaacaccagcaucaucaaccacaaguucugcaaccugagcgacgcccacaagaagaaccuguacgaccacgcccugaugagcaucaucagcaccuuccaccugagcauccccaacuucaaccaguacgaggccaugagcugcgacuucaacggcggcaagaucagcgugcaguacaaccugagccacagcuacgccggcgacgccgccaaccacugcggcaccguggccaacggcgugcugcagaccuucaugagaauggccuggggcggcagcuacaucgcccuggacagcggcagaggcaacugggacugcaucaugaccagcuaccaguaccugaucauccagaacaccaccugggaggaccacugccaguucagcagacccagccccaucggcuaccugggccugcugagccagagaaccagagacaucuacaucagcagaagaagaagaggcaccuucaccuggacccugagcgacagcgagggcgaggacacccccggcggcuacugccugaccagauggaugcugaucgaggccgagcugaagugcuucggcaacaccgccguggccaagugcaacgagaagcacgacgaggaguucugcgacaugcugagacuguucgacuucugcaagcaggccauccagagacugaaggcccccgcccagaugagcauccagcugaucaacaaggccgugaacgcccugaucaacgaccagcugaucaugaagaaccaccugagagacaucaugggcauccccuacugcaacuacagcaaguacugguaccugaaccacaccaccaccggcagaaccagccugcccaagugcuggcuggugagcaacggcagcuaccugaacgagacccacuucagcgacgacaucgagcagcaggccgacaacaugaucaccgagaugcugcagaaggaguacauggagagacagggcaagaccccccugggccugguggaccuguucguguucagcaccagcuucuaccugaucagcaucuuccugcaccuggugaagauccccacccacagacacaucgugggcaagagcugccccaagccccacagacugaaccacaugggcaucugcagcugcggccuguacaagcagcccggcgugcccgugaaguggaagagaugaggacuagucccuguucccagagcccacuuuuuuuucuuuuuuugaaauaaaauagccugucuuucagaucucaaaggcucuuuucagagccaccaaaaaaaaaaaaaaaaaaaaaaaaaaaaaaaaaaaaaaaaaaaaaaaaaaaaaaaaaaaaaaaaagaauu

SEQ ID NO: 23585 - RNA, 1736 nt, Artificial Sequence
  mRNA product Design a-2 (hSL-A64-N5) comprising derived and/or modified sequence from LASV(LM765-SLE-2012;Clade IV)__AIT17814__GPCmut2 (opt4)
aggagaguccgcucagccagguugcagaagcggcuuagcguguguccuaaucuucucucugcguguagguaggccugugccgcaaacaagcuuaccaugggccagaucgugaccuucuuccaggaggugccccacgugaucgaggaggugaugaacaucgugcugaucgcccugagcauccuggccgugcugaagggccuguacaacuucgccaccugcggccuggugggccuggugaccuuccugcugcugugcggcagaagcugcaccaccagccuguacaagggcguguacgagcugcagacccuggagcugaacauggagacccugaacaugugcaugccccugagcugcaccaagaacaacagccaccacuacaucauggugggcaacgagaccggccuggagcugacccugaccaacaccagcaucaucgaccacaaguucugcaaccugagcgacgcccacagaaagaaccuguacgaccacgcccugaugagcaucaucagcaccuuccaccugagcauccccaacuucaaccaguacgaggccaugagcugcgacuucaacggcggcaagaucagcgugcaguacaaccugagccacagcuacgccaaggacgccgccgaccacugcggcaccguggccaacggcgugcugcagaccuucaugagaauggccuggggcggcagcuacaucgcccuggacagcggcagaggcagaugggacugcaucaugaccagcuaccaguaccugaucauccagaacaccaccugggaggaccacugccaguucagcagacccagccccaucggcuaccugggccugcugagccagagaaccagagacaucuacaucagcagaagaagaagaggcaccuucaccuggacccugagcgacagcgagggcaaggacacccccggcggcuacugccugaccagauggaugcugaucgaggccgagcugaagugcuucggcaacaccgccguggccaagugcaacgagaagcacgacgaggaguucugcgacaugcugagacuguucgacuucugcaagcaggccauccagagacugaaggcccccgcccagaugagcauccagcugaucaacaaggccgugaacgcccugaucaacgaccagcugaucaugaagaaccaccugagagacaucaugggcauccccuacugcaacuacagcaaguacugguaccugaaccacaccaccaccggcaagaccagccugcccaagugcuggcuggugagcaacggcagcuaccugaacgagacccacuucagcgacgacaucgagcagcaggccgacaacaugaucaccgagaugcugcagaaggaguacauggagagacagggcaagaccccccugggccugguggaccuguucguguucagcaccagcuucuaccugaucagcaucuuccugcaccuggugaagauccccacccacagacacaucgugggcaagcccugccccaagccccacagacugaaccacaugggcaucugcagcugcggccuguacaagcagcccggcgugcccgugaaguggaagagaugaggacuagucccuguucccagagcccacuuuuuuuucuuuuuuugaaauaaaauagccugucuuucagaucucaaaggcucuuuucagagccaccaaaaaaaaaaaaaaaaaaaaaaaaaaaaaaaaaaaaaaaaaaaaaaaaaaaaaaaaaaaaaaaaagaauu

SEQ ID NO: 23586 - RNA, 1736 nt, Artificial Sequence
  mRNA product Design a-2 (hSL-A64-N5) comprising derived and/or modified sequence from LASV(LM776-SLE-2012;Clade IV)__AIT17824__GPCmut2 (opt4)
aggagaguccgcucagccagguugcagaagcggcuuagcguguguccuaaucuucucucugcguguagguaggccugugccgcaaacaagcuuaccaugggccagaucgugaccuucuuccaggaggugccccacgugaucgaggaggugaugaacaucgugcugaucgcccugagcauccuggccgugcugaagggccuguacaacuucgccaccugcggccuggugggccuggugaccuuccugcugcugugcggcagaagcugcaccaccagcguguacaagggcguguacgagcugcagacccuggagcugaacauggagacccugaacaugugcaugccccugagcugcaccaagaacaacagccaccacuacaucauggugggcaacgagaccggccuggagcugacccugaccaacaccagcaucaucaaccacaaguucugcaaccugagcgacgcccacaagaagaaccuguacgaccacgcccugaugagcaucaucagcaccuuccaccugagcauccccaacuucaaccaguacgaggccaugagcugcgacuucaacggcggcaagaucagcgugcaguacaaccugagccacagcuacgccggcgacgccgccaaccacugcggcaccguggccaacggcgugcugcagaccuucaugagaauggccuggggcggcagcuacaucgcccuggacagcggccacggcaagugggacugcaucaugaccagcuaccaguaccugaucauccagaacaccaccugggaggaccacugccaguucagcagacccagccccaucggcuaccugggccugcugagccagagaaccagagacaucuacaucagcagaagaagaagaggcaccuucaccuggacccugagcgacagcgagggcaaggacacccccggcggcuacugccugaccagauggaugcugaucgaggccgagcugaagugcuucggcaacaccgccguggccaagugcaacgagaagcacgacgaggaguucugcgacaugcugagacuguucgacuucugcaagcaggccauccagagacugaaggcccccgcccagaugagcauccagcugaucaacaaggccgugaacgcccugaucaacgaccagcugaucaugaagaaccaccugagagacaucaugggcauccccuacugcaacuacagcaaguacugguaccugaaccacaccaccaccggcaagaccagccugcccaagugcuggcuggugagcaacggcagcuaccugaacgagacccacuucagcgacgacaucgagcagcaggccgacaacaugaucaccgagaugcugcagaaggaguacauggagagacagggcaagaccccccugggccugguggaccuguucguguucagcaccagcuucuaccugaucagcaucuuccugcaccuggugaagauccccacccacagacacaucgugggcaagagcugccccaagccccacagacugaaccacaugggcaucugcagcugcggccuguacaagcagcccggcgugcccgugagauggaagagaugaggacuagucccuguucccagagcccacuuuuuuuucuuuuuuugaaauaaaauagccugucuuucagaucucaaaggcucuuuucagagccaccaaaaaaaaaaaaaaaaaaaaaaaaaaaaaaaaaaaaaaaaaaaaaaaaaaaaaaaaaaaaaaaaagaauu

SEQ ID NO: 23587 - RNA, 1736 nt, Artificial Sequence
  mRNA product Design a-2 (hSL-A64-N5) comprising derived and/or modified sequence from LASV(Mad39;Clade IV)__ANH09722__GPCmut2 (opt4)
aggagaguccgcucagccagguugcagaagcggcuuagcguguguccuaaucuucucucugcguguagguaggccugugccgcaaacaagcuuaccaugggccagaucgugaccuucuuccaggaggugccccacgugaucgaggaggugaugaacaucgugcugaucgcccugagcauccuggccgugcugaagggccuguacaacguggccaccugcggccugaucggccuggugaccuuccugcugcugugcggcagaagcugcaccaccacccuguacaagggcguguacgagcugcaggcccuggagcugaacauggagacccugaacaugugcaugccccugagcugcaccaagaacaacagccaccacuacaucagagugggcaacgagaccggccuggagcugacccugaccaacaccagccugaucaaccacaaguucugcaaccugagcgacgcccacaagaagaaccuguacgaccacgcccugaugagcaucaucagcaccuuccaccugagcauccccaacuucaaccaguacgaggccaugagcugcgacuucaacgacggcaagaucagcgugcaguacaaccugagccacaccuacgccggcgacaccgccaaccacugcggcaccguggccaacggcgugcugcagaccuucaugagaauggccuggggcggcagcuacaucgcccuggacagcggcagaggcggcugggacugcaucaugaccagcuaccaguaccugaucauccagaacaccaccugggaggaccacugccaguucagcagacccagccccaucggcuaccugggccugcugagccagagaaccagagacaucuacaucagcagaagaagaagaggcaccuucaccuggacccugagcgacagcgagggcaaggacacccccggcggcuacugccugaccagauggaugcugaucgaggccgagcugaagugcuucggcaacaccgccguggccaagugcaacgagaagcacgacgaggaguucugcgacaugcugagacuguucgacuucugcaagcaggccauccagagacugaaggcccccgcccagaugagcauccagcugaucaacaaggccgugaacgcccugaucaacgaccagcugaucaugaagaaccaccugagagacaucaugggcauccccuacugcaacuacagcaaguacugguaccugaaccacaccgugaccggcaagaccagccugcccaagugcuggcuggugagcaacggcagcuaccugaacgagacccacuucagcgacgacaucgagcagcaggccgacaacaugaucaccgagaugcugcagaaggaguacauggagagacagggcaagaccccccugggccugguggaccuguucguguucagcaccagcuucuaccugaucagcaucuuccugcaccuggugaagauccccacccacagacacguggugggcaagcccugccccaagccccacagacugaaccacaugggcaucugcagcugcggcuucuacaagcagcccggcgugcccgugagauggaagagaugaggacuagucccuguucccagagcccacuuuuuuuucuuuuuuugaaauaaaauagccugucuuucagaucucaaaggcucuuuucagagccaccaaaaaaaaaaaaaaaaaaaaaaaaaaaaaaaaaaaaaaaaaaaaaaaaaaaaaaaaaaaaaaaaagaauu

SEQ ID NO: 23588 - RNA, 1736 nt, Artificial Sequence
  mRNA product Design a-2 (hSL-A64-N5) comprising derived and/or modified sequence from LASV(Z0947-SLE-2011;Clade IV)__AIT17840__GPCmut2 (opt4)
aggagaguccgcucagccagguugcagaagcggcuuagcguguguccuaaucuucucucugcguguagguaggccugugccgcaaacaagcuuaccaugggccagaucgugaccuucuuccaggaggugccccacgugaucgaggaggugaugaacaucgugcugaucgcccugagcauccuggccgugcugaagggccuguacaacuucgccaccugcggccuggugggccuggugaccuuccugcugcugugcggcagaagcugcaccaucagccuguacaagggcguguacgagcugcagacccuggagcugaacauggagacccugaacaugugcaugccccugagcugcaccaagaacaacagccaccacuacaucauggugggcaacgagaccggccuggagcugacccugaccaacaccagcaucaucaaccacaaguucugcaaccugagcgacgcccacaagaagaaccuguacgaccacgcccugaugagcaucaucagcaccuuccaccugagcauccccaacuucaaccaguacgaggccaugagcugcgacuucaacggcggcaagaucagcgugcaguacaaccugagccacagcuacgccggcgacgccgccaaccacugcggcaccguggccaacggcgugcugcagaccuucaugagaauggccuggggcggcagcuacaucgcccuggacagcggcagagacagaugggacugcaucaugaccagcuaccaguaccugaucauccagaacaccaccugggaggaccacugccaguucagcagacccagccccaucggcuaccugggccugcugagccagagaaccagagacaucuacaucagcagaagaagaagaggcaccuucaccuggacccugagcgacagcgagggcaaggacacccccggcggcuacugccugaccagauggaugcugaucgaggccgagcugaagugcuucggcaacaccgccguggccaagugcaacgagaagcacgacgaggaguucugcgacaugcugagacuguucgacuucugcaagcaggccauccagagacugaaggcccccgcccagaugagcauccagcugaucaacaaggccgugaacgcccugaucaacgaccagcugaucaugaagaaccaccugagagacaucaugggcauccccuacugcaacuacagcaaguacugguaccugaaccacaccaccaccggcaagaccagccugcccaagugcuggcuggugagcaacggcagcuaccugaacgagacccacuucagcgacgacaucgagcagcaggccgacaacaugaucaccgagaugcugcagaaggaguacauggagagacagggcaagaccccccugggccugguggaccuguucguguucagcaccagcuucuaccugaucagcaucuuccugcaccuggugaagauccccacccacagacacaucgugggcaagcccugccccaagccccacagacugaaccacaugggcaucugcagcugcggccuguacaagcagcccggcgugcccgugaaguggaagagaugaggacuagucccuguucccagagcccacuuuuuuuucuuuuuuugaaauaaaauagccugucuuucagaucucaaaggcucuuuucagagccaccaaaaaaaaaaaaaaaaaaaaaaaaaaaaaaaaaaaaaaaaaaaaaaaaaaaaaaaaaaaaaaaaagaauu

SEQ ID NO: 23589 - RNA, 1736 nt, Artificial Sequence
  mRNA product Design a-2 (hSL-A64-N5) comprising derived and/or modified sequence from LASV(Josiah;Clade IV)__NP_694870__GPCmut2 (opt5)
aggagaguccgcucagccagguugcagaagcggcuuagcguguguccuaaucuucucucugcguguagguaggccugugccgcaaacaagcuuaccaugggccagaucgugaccuucuuucaagaggucccccacguuauugaagaggugaugaacaucgugcugauugcccucagcguccuggcugugcuuaaggggcuguacaauuucgccacaugcggacucguuggccuggugacguuucuucugcucugugggagauccugcaccacaucucuguauaaaggagucuacgaacugcagacccucgagcugaacauggaaacacuuaauauguguaugccucugagcugcaccaagaacaauucccaucacuauaucauggugggcaacgagacagggcucgagcugacccuuacgaauaccucuauuaucaaccauaaauucuguaaucugagcgacgcgcacaagaaaaaccucuacgaucaugcucugauguccaucauuucuacauuucaccugagcaucccgaauuucaaccaguaugaagccauguccugcgacuuuaauggaggcaagauuagcguucaguacaaccucucucacuccuaugccggcgaugcugccaaucauugugggaccguggcuaacggaguccugcaaacauucaugcggauggccuggggcgggagcuacaucgcgcuugacucuggacgcggcaacugggauugcauuaugaccuccuaccaguaucugaucauucagaauacgacaugggaggaccacugucaguuuagcagacccucuccuaucggguaccucggacugcuuucccaacggacccgcgauaucuauauuagcagacggcgcagaggcacauucaccuggacccuguccgacucugaaggcaaggauacacccgggggauacugccucacgcgguggaugcugaucgaggccgagcugaaauguuuuggcaacaccgcuguggccaagugcaaugaaaaacaugacgaggaguucugcgauaugcuccgccuguuugacuucuguaagcaggcuauucagagacuuaaagccccugcgcagaugagcauccaacugauuaacaaggccgugaaugcucucaucaacgaucagcugaucaugaagaaucaccuucgggacauuauggggauccccuauugcaacuacuccaaauauugguaccugaaucacacaaccacaggacgcaccagccucccuaaguguuggcuggucucuaacggcuccuaccugaaugaaacgcauuucagcgacgauauugaacagcaagccgacaacaugaucacagagaugcuccagaaagaguauauggaaagacaggggaagaccccgcugggacuuguugaucuguuuguguucucuaccagcuuuuaccucauuuccaucuuccugcaccuggugaaaauccccacacaucggcacauugucggcaagucuugcccuaaaccccaucgccuuaaucacaugggcaucuguagcugcgggcucuauaagcagccuggagugcccguuaaguggaaaagaugaggacuagucccuguucccagagcccacuuuuuuuucuuuuuuugaaauaaaauagccugucuuucagaucucaaaggcucuuuucagagccaccaaaaaaaaaaaaaaaaaaaaaaaaaaaaaaaaaaaaaaaaaaaaaaaaaaaaaaaaaaaaaaaaagaauu

SEQ ID NO: 23590 - RNA, 1733 nt, Artificial Sequence
  mRNA product Design a-2 (hSL-A64-N5) comprising derived and/or modified sequence from LASV(LP;Clade I)__AAF86701__GPCmut2 (opt5)
aggagaguccgcucagccagguugcagaagcggcuuagcguguguccuaaucuucucucugcguguagguaggccugugccgcaaacaagcuuaccaugggccagaucauuaccuucuuucaagaggugccccacgucaucgaagagguuaugaacauugugcugaucgcccucagccugcuugcuauucugaaggggcucuacaauaucgccacaugcggaaucauuggccugguggcguuccuuuuucugugugggaaauccugcucucucacgcugaagggaggcuaugaacugcagacccucgagcugaacauggaaacacuuaauauguguaugccucugagcugcaccaaaaacuccucucaucacuacaucagagucgggaaugagacaggacucgagcugacccuuacaaacaccagcauuaucaaucauaaguucuguaaccuguccgacgcucacaaaaagaaucucuaugaucaugcccugaugucuauuaucagcacguuucaccuguccauuccgaacuucaaucaguacgaagccaugagcugcgacuuuaacggcggcaagaucucugugcaguauaaucucucccacagcuacgcuggggaugccgcugagcauuguggaaccguugccaacggcgugcugcaaacauucaugcggauggcguggggagggcgcuauaucgcccuugacucuggcaaagggaauugggauugcauuaugaccuccuaccaguaccugaucauucagaacacaaccugggaagaccacugucaguuuagcagacccucuccuaucggauaucucggccugcuuucccaacggacgcgcgauauuuacaucagcagacggcgcagaggcacauucaccuggacacuguccgacucugaggggaacgagacccccggaggcuauugccucacccgguggaugcugaucgaagcugagcugaaguguuuugggaauacagccgucgcuaaaugcaacgaaaagcaugaugaggaguucugcgacaugcuccgccuguuugauuucuguaaacaggccauuagacggcuuaaggcgccugcccagaugagcauccagcugauuaauaaggcugugaacgcccucaucaaugaccaacugauuaugaaaaaccaccuucgcgauaucaugggaauccccuacugcaauuauuccaaguacugguaucugaaccacacgagcucuggcagaaccucccucccuaaauguuggcugauuagcaaugggucuuaccugaacgaaacacaguucagcgacgacaucgagcagcaagcugauaauaugauuaccgaaaugcuccagaaggaguacaucgaacggcagggaaaaacaccgcugggccuuguugacauuuuuaucuucuccaccucuuuuuaucugauuagcaucuuccuccaucugaucaagauucccacgcaccgccauaucgugggcaaaccuugccccaagccucacagacugaaccauaugggggucuguuccugcggacuuuacaagcaccccggcgugccgacaaaauggaagcggugaggacuagucccuguucccagagcccacuuuuuuuucuuuuuuugaaauaaaauagccugucuuucagaucucaaaggcucuuuucagagccaccaaaaaaaaaaaaaaaaaaaaaaaaaaaaaaaaaaaaaaaaaaaaaaaaaaaaaaaaaaaaaaaaagaauu

SEQ ID NO: 23591 - RNA, 1733 nt, Artificial Sequence
  mRNA product Design a-2 (hSL-A64-N5) comprising derived and/or modified sequence from LASV(803213;Clade II)__AAF86703__GPCmut2 (opt5)
aggagaguccgcucagccagguugcagaagcggcuuagcguguguccuaaucuucucucugcguguagguaggccugugccgcaaacaagcuuaccaugggccagaucauuaccuucuuucaagaggugccccacgucaucgaagagguuaugaacauugugcugaucgcccucagccugcuugcuauucugaaggggaucuacaauguggccacaugcggacucuucggccugaucuccuuucuucugcucugugggagaucuugcagcgucacguauaaaggaguguacgaacugcagacccuggagcucaacauggcgaaucugaacauguguaugccucuuuccugcacaaagaauaacucucaucacuauauuaugguuggcaaugaaaccgggcuggagcucacacugaccaacacaagcaucauuaaucauaaauucuguaaccuuuccgacgcucacaagaaaaaucuguacgaucaugcccucaugucuaucauuagcaccuuucaccuguccaucccgaacuucaaucaguaugaggccaugagcugcgacuuuaacggaggcaagauuucugugcaguacaaucugucccacagcuucgcugucgaugccgcuaaccauuguggcacgaucgccaacggggugcuccaaaccuuuaugcggauggcguggggaggcucuuauaucgcccuggacuccgggaagggaaauugggauugcauuaugacaagcuaccaguaccuuaucauucagaacaccacaugggaagaccacugucaguucucucgccccuccccuaucggcuaucuggggcuccugagccaaagaacccgggauauuuacaucucccgcagacggcgcggaacguuuacauggacccuuucugacagcgagggcaaugaagcucccggcggguauugccugacaagauggaugcucaucgaggccgagcugaaauguuucggaaacaccgcuguugccaagugcaaugaaaaacaugaugaggaauuuugcgacaugcugcgccucuucgauuucuguaagcaggcgauuaaacggcugaagaccccugcccagauguccauccagcuuauuaacaaggcugugaaugcccugaucaacgaccaacucauuaugaaaaaucaccugagagauaucaugggcauccccuacugcaacuauagccgguacugguaucuuaaucacacagucacggggaagaccucucugccucgcuguuggcucguguccaacggaagcuaccugaaugagacacauuuuucugacgacauugaacagcaggcugauaacaugaucaccgagaugcugcaaaaagaguacauggacagacagggcaagacaccgcucgggcugguggaucuuuucgucuuuagcaccuccuucuaucugauuucuaucuuucuccaccugguuaaaauucccacgcaucggcacaucgugggaaagccuugccccaaaccucaucgccugaaucacaugggcauuuguagcugcggccuuuacaagcaccccggggugccggucaaguggaaaagaugaggacuagucccuguucccagagcccacuuuuuuuucuuuuuuugaaauaaaauagccugucuuucagaucucaaaggcucuuuucagagccaccaaaaaaaaaaaaaaaaaaaaaaaaaaaaaaaaaaaaaaaaaaaaaaaaaaaaaaaaaaaaaaaaagaauu

SEQ ID NO: 23592 - RNA, 1733 nt, Artificial Sequence
  mRNA product Design a-2 (hSL-A64-N5) comprising derived and/or modified sequence from LASV(GA391;Clade III)__CAA36645__GPCmut2 (opt5)
aggagaguccgcucagccagguugcagaagcggcuuagcguguguccuaaucuucucucugcguguagguaggccugugccgcaaacaagcuuaccaugggccagaucgugaccuucuuucaagaggucccccacguuauugaagaggugaugaacaucgugcugauugcccucagcauccuggcuauucuuaaggggcuguacaaugucgccacaugcggacucaucggccuggugacguuccuucugcucuccgggagaucuuguagccugaucuauaaaggaaccuacgaacugcagacacucgagcugaacauggaaacccuuaauaugugcaugccucuguccuguacaaagaacaauucucaucacuauauucggguuggcaacgagaccgggcucgagcugacacuuaccaauacgagcauccugaaccauaaauuuugcaaucucuccgacgcgcacaagcgcaaccuguacgaucauucucugaugagcauuaucuccaccuuccaccucagcauuccgaauuuuaaccaguaugaagcuaugucuugugacuucaauggaggcaaaaucacagugcaguacaaccugucccacagcuuugccgucgaugccgcuggccauugcgggacccuugccaauggagugcugcaaacauucaugagaauggcuuggggcgggucuuauauugcccucgacuccggacggggcaacugggauuguaucaugaccagcuaccaguaccugaucauucagaacacgacaugggacgaucacugccaguuuucucgccccuccccuaucggguaucuuggacugcucagccaaagaacccgggacauuuacaucucccgcagacggcgcggcacauucaccuggacccugucugauagcgagggcaaugaaacacccgggggauauugucugacgagauggaugcucauugaggcggagcugaagugcuuuggcaacaccgccguugcuaaguguaaugaaaaacaugacgaggaguucugcgauaugcuucggcuguuugacuucugcaagcaggccauccgcagacucaaaaccccugcucagauguccauccagcugauuaacaaggccgugaaugcgcuuaucaacgaucaacugauuaugaaaaaucaccuccgggacaucauggggauucccuacuguaacuauagccgcuacugguaucugaaucacacaucuacaggaaagaccucccugccuagaugcuggcucaucagcaacggcucuuaccugaaugaaacgaaguucagcgacgauaucgaacagcaggccgacaacaugauuacagagaugcuucaaaaagaguacaucgaucggcaggggaagaccccgcugggacucgucgaccuguuuguguucuccaccucuuuuuaucugauuagcaucuuccuucaucucgugaaaauucccacacacagacauaucgucggcaagccuugucccaaaccucaccgccugaaucauaugggcauuugcuccugugggcuguacaagcagcccggaguuccggugcgguggaaaagaugaggacuagucccuguucccagagcccacuuuuuuuucuuuuuuugaaauaaaauagccugucuuucagaucucaaaggcucuuuucagagccaccaaaaaaaaaaaaaaaaaaaaaaaaaaaaaaaaaaaaaaaaaaaaaaaaaaaaaaaaaaaaaaaaagaauu

SEQ ID NO: 23593 - RNA, 1736 nt, Artificial Sequence
  mRNA product Design a-2 (hSL-A64-N5) comprising derived and/or modified sequence from LASV(AV;Clade V)__CCA30314__GPCmut2 (opt5)
aggagaguccgcucagccagguugcagaagcggcuuagcguguguccuaaucuucucucugcguguagguaggccugugccgcaaacaagcuuaccaugggccagaucgugaccuucuuucaagaggucccccacguuauugaagaggugaugaacaucgugcugauugcccucagcauccuggcuguccuuaaggggcuguacaauauugccacaugcggacucaucggccugaucacguuccuucugcucugugggagauccugcucuagcaaccuguauaaaggaguguacgaacugcagucccucgaccugaauauggagacccuuaacauguguaugccucugucuugcacaaagaauaacagccaucacuauauucggguuggcaaugauaccgggcucgaacugacacuuaccaacacauccauccugaaucauaaauuuuguaaccucucugacgcgcacaagaaagaucuguacgaccaugcucugaugagcauuaucuccaccuuccaccucagcauuccgaauuuuaaccaguaugaggccaugucuugcgauuucaauggaggcaagaucuccgugcaguacaaccugagccacucuuaugccauugacgcugccaaucauuguggcacggucgcuaacgggauccuucaaaccuuuaugcgcauggccuggggaggcuccuacaucgcgcuggauagcgggagaggaaacugggacugcauuaugacaucuuaccaguaucucaucauucagaauaccacaugggagaaccacugucaguucucccggcccagcccuaucggcuaccuggggcuucugucccaacgcaccagagauauuuauaucucucggcgcagacggggaacguuuacauggacccucagcgacuccgaaggcaaugccacacccggcggguacugccugacccgcuggaugcugaucgaggcugaacucaaguguuucggaaacaccgccguggcuaaaugcaaugagaagcaugaugaggaauuuugcgacaugcugagacuuuucgauuuuuguaaacaggccauuagccggcugaagucuccugcgcagauguccauccagcucauuaacaaagccguuaaugcucugaucaacgaccaacuuauuaugaagaaucaucugcgcgacaucaugggcauccccuauugcaacuacagcaaguauugguaccucaaucacacaauuacggggaaaaccucucugccuaaguguuggcuggugagcaacggauccuaccucaaugagacacacuucucugaugacaucgaacagcaggccgauaacaugauuaccgagaugcugcaaaaagaauauauggagagacagggcaagacaccgcuugggcuggucgaccucuucguguuuagcaccuccuucuaccugaucagcauuuuucugcggcuugugaaaauccccacgcaccgccauauugucggaaagccuugccccaaaccucacagacucaaucauaugggcaucuguucuugcggccuguauaagcagcccgggguuccggugcgguggaagagaugaggacuagucccuguucccagagcccacuuuuuuuucuuuuuuugaaauaaaauagccugucuuucagaucucaaaggcucuuuucagagccaccaaaaaaaaaaaaaaaaaaaaaaaaaaaaaaaaaaaaaaaaaaaaaaaaaaaaaaaaaaaaaaaaagaauu

SEQ ID NO: 23594 - RNA, 1733 nt, Artificial Sequence
  mRNA product Design a-2 (hSL-A64-N5) comprising derived and/or modified sequence from LASV(Togo/2016/7082;Clade VI)__AMR44577__GPCmut2 (opt5)
aggagaguccgcucagccagguugcagaagcggcuuagcguguguccuaaucuucucucugcguguagguaggccugugccgcaaacaagcuuaccaugggccagaucauuaccuucuuucaagaggugccccacgucaucgaagagguuaugaacauugugcugaucgcccucagccugcuugcuauucugaaggggguguacaaugucgccacaugcggaaucaucggccucgugacguuccuguuucuuugugggagauccugcucucugauuuauaaaggaagcuacgaacuccagacccuggagcugaacauggaaacacucaauauguguaugccucuguccugcaccaagaacucuagccaucacuauauccggguuggcaaugagacagggcuugagcugacccucacaaacaccuccauuaucaaucauaaauucuguaaccugucugacgcgcacaagcgcaaucuuuacgaucaugcucugaugagcauucucuccacguuucaccugagcaucccgaacuucaaucaguaugaagccaugucuugcgacuuuaacggaggcaaaauuuccgugcaguacaaucugagccacgccuaugcugucgaugccgcugagcauuguggcaccguggccaacgggguucuccaaacauucaugagaauggcguggggaggcucuuacaucgcccuggacuccgggcggggaaauugggauugcaucaugaccagcuaccaguaucuuauuauccagaacacaaccugggaagaccacugucaguuuucucgccccuccccuauuggcuaccuggggcuccugagccaaagaacgcgggauaucuauauuucccgcagacggcgcggaacauucaccuggacacuuucugacagcgagggcaacgagacccccggcggguacugccugaccagauggaugcucaucgaagcugagcugaaguguuuuggaaauacagccguggcuaagugcaacgaaaaacaugaugaggaguucugcgacaugcugcggcucuuugauuucuguaagcaggccauccagcgccugaaauccccugcgcagaugagcauucaacuuaucaauaaggccgucaacgcucugauuaaugaccagcucaucaugaaaaaccaccugagagauaugaugggcauucccuauugcaauuacucuaaguauugguaccuuaaccacacguccagcgggcggaccucucugccuaaguguuggcucgugagcaauggauccuaccugaacgaaacacauuucucugacgacaucgagcagcaagccgauaauaugaucaccgaaaugcugcagaaagaguauauugaccgccagggcaagacaccgcucgggcugguggaucuuuuugucuucagcaccuccuuuuaccugaucagcauuuuccuccaccugaucaaaauucccacgcauagacacaucguuggaaagccuugccccaaaccucaucggcugaaccacaugggcauuuguucuugcggccuuuauaagcagcccggggugccgacaagauggaaacgcugaggacuagucccuguucccagagcccacuuuuuuuucuuuuuuugaaauaaaauagccugucuuucagaucucaaaggcucuuuucagagccaccaaaaaaaaaaaaaaaaaaaaaaaaaaaaaaaaaaaaaaaaaaaaaaaaaaaaaaaaaaaaaaaaagaauu

SEQ ID NO: 23595 - RNA, 1733 nt, Artificial Sequence
  mRNA product Design a-2 (hSL-A64-N5) comprising derived and/or modified sequence from LASV(KAK-428;Clade n.d. (VII))__ANH09740__GPCmut2 (opt5)
aggagaguccgcucagccagguugcagaagcggcuuagcguguguccuaaucuucucucugcguguagguaggccugugccgcaaacaagcuuaccaugggccagaucgugaccuucuuucaagaggucccccacguuauugaagaggugaugaacaucgugcugauugcccucagccugcuugcuauccugaaggggcucuacaauuucgccacaugcggagucauuggccugaucacguuucuucugcucugugggagauccugcucugcgaccuauaaaggacaguacgaacugcagacacuggagcucaacauggaaagccugaauauguguaugccucuuuccugcaccaagaacaauucucaucacuauauccgggcuggcaacaauacagggcuggagcucacccugacaaacaccagcauuaucucccauaaauucuguaaucuuucugacgcccacaagaaaaaccuguacgaucauacgcucaugagcauuaucaccacauuucaccuguccauuccgaauuucaaccaguaugaggccaugagcugcgacuuuaauggaggcaagaucucuauucaauacaaccugucccacagcuaugcuggcgaugccgcucagcauugugggaccguggccaauggaguucuccagacauucaugcgcauggcguggggcgggucuuaccuggcccuugacuccggaagacggggcugggauugcaucaucagcucuuaccaguaucugauuauccaaaacaccacgugggacgaucacugucaguuuucccgccccagcccuauuggguaccucggauucgugucccagaagacaagagacaucuauauuucucggcgcagacggggcaccuuuacauggacccugagcgauuccgaaggccaugacaugcccgggggauacugccuuacccgcuggaugcugaucgaggcugaucucaaauguuucggcaacacagccgucgcuaagugcaaugaaaaacacgacgaggaguuuugcgauauguggagacuguucgacuucuguaagcaggccauccaacggcugaaagcgccugcccagaugaacauucagcucaucaauaaggcugugaacgcccugauuaaugaccaacuuaugaugaagaaccaucugcgcgauaucauggggauucccuauugcaauuacagcaaauuuugguaucucaacaauacgaccacaggaagaaccucucugccucgguguuggcuuaucuccaacggcagcuaccugaaugaaacacacuucucugacgauaucgagcagcaggcugacaacaugauuaccgaaaugcuccagaaggaguacauggaucgccaagggaaaacgccgcugggacugguugaccucuuuguguucagcacauccuuuuaucugaucaccauuuuccuucaccuggucaagauccccacccauagacacauugugggcaaaccuugccccaagccucaucggcucaaucacaugggcaucuguucuugcgggcuguacaaacagcccggagugccggucagauggaagcgcugaggacuagucccuguucccagagcccacuuuuuuuucuuuuuuugaaauaaaauagccugucuuucagaucucaaaggcucuuuucagagccaccaaaaaaaaaaaaaaaaaaaaaaaaaaaaaaaaaaaaaaaaaaaaaaaaaaaaaaaaaaaaaaaaagaauu

SEQ ID NO: 23596 - RNA, 1733 nt, Artificial Sequence; identical to SEQ ID NO: 23590
  mRNA product Design a-2 (hSL-A64-N5) comprising derived and/or modified sequence from LASV(Pinneo-NIG-1969;Clade I)__AIT17836__GPCmut2 (opt5)

SEQ ID NO: 23597 - RNA, 1733 nt, Artificial Sequence
  mRNA product Design a-2 (hSL-A64-N5) comprising derived and/or modified sequence from LASV(ISTH0009-NIG-2011;Clade II)__AIT17404__GPCmut2 (opt5)
aggagaguccgcucagccagguugcagaagcggcuuagcguguguccuaaucuucucucugcguguagguaggccugugccgcaaacaagcuuaccaugggccagaucauuaccuucuuucaagaggugccccacgucaucgaagagguuaugaacauugugcugaucgcccucagccugcuugcuauucugaaggggaucuacaauguggccacaugcggacucuucggccuggucuccuuucuucugcucugugggagaucuugcagcacgaccuauaaaggaguguacgaacugcagacacuggagcucgacauggcgucccugaacauguguaugccucuuucuugcaccaagaauaacagccaucacuauaucaugguuggcaaugaaacagggcuggagcucacccugacaaacaccuccauuaucaaucauaaauucuguaaccuuucugaugcucacaagaaaaaucuguacgaccaugcccucaugagcauuaucuccacguuucaccugagcauuccgaacuucaaucaguaugaggccaugucuugcgauuuuaacggaggcaagaucuccgugcaguacaaucugagccacgcuuaugccgucgacgcugccaaccauuguggcaccauugcgaauggggugcuccaaacauucaugcggauggccuggggaggcucuuacaucgcucuggauuccgggaagggaagcugggacugcaucaugaccucuuaccaguaucuuauuauccagaacacaaccugggaagaucacugucaguuuucccgccccagcccuauuggcuaccuggggcuccugucccaaagaacgcgggacaucuauauuucucgcagacggcgcggaacauucaccuggacacuuagcgauuccgagggcaacgaaacccccggcggguacugccugaccagauggaugcucaucgaggccgagcugaaauguuuuggaaauacagcuguugccaagugcaacgaaaaacaugacgaggaguucugcgauaugcugcggcucuuugacuucuguaagcaggcgauccgcagacugaaaacgccugcccagaugagcauucagcuuaucaauaaggcugugaacgcccugauuaaugaucaacucaucaugaagaaccaucugcgggacauuaugggcauccccuauugcaauuacucuaaauauugguaccuuaaccacaccgucacagggaagaccucccugccucgcuguuggcucgugagcaauggaucuuaccugaacgaaacacacuucagcgacgauaucgaacagcaggcugacaauaugauuaccgagcugcuccaaaaagaguauauggauagacagggcaagacgccgcuggggcuuguggaccuguuugucuucuccacaucuuuuuaccucaucagcauuuuccugcaccugaucaaaauucccacccaucggcacaucaccggaaagccuugccccaaaccucaucgccuuaaccacaugggcauuuguuccugcggccucuauaagcaccccgggguuccggugaaguggaaaagaugaggacuagucccuguucccagagcccacuuuuuuuucuuuuuuugaaauaaaauagccugucuuucagaucucaaaggcucuuuucagagccaccaaaaaaaaaaaaaaaaaaaaaaaaaaaaaaaaaaaaaaaaaaaaaaaaaaaaaaaaaaaaaaaaagaauu

SEQ ID NO: 23598 - RNA, 1733 nt, Artificial Sequence
  mRNA product Design a-2 (hSL-A64-N5) comprising derived and/or modified sequence from LASV(ISTH2010-NIG-2012;Clade II)__AIT17482__GPCmut2 (opt5)
aggagaguccgcucagccagguugcagaagcggcuuagcguguguccuaaucuucucucugcguguagguaggccugugccgcaaacaagcuuaccaugggccagaucauuaccuucuuucaagaggugccccacgucaucgaagagguuaugaacauugugcugaucgcccucagccugcuugcuauucugaaggggaucuacaauguggccacaugcggacucuucggccuggucuccuuucuucugcucugugggagaucuugcagcacgaccuauaaaggaguguacgaacugcagacacuggagcucgacauggcgucccugaacauguguaugccucuuucuugcaccaagaauaacagccaucacuauaucaugguuggcaaugaaacagggcuggagcucacccugacaaacaccuccauuaucaaucauaaauucuguaaccuuucugaugcucacaagaaaaaucuguacgaccaugcccucaugagcauuaucuccacguuucaccugagcauuccgaacuucaaucaguaugaggccaugucuugcgauuuuaacggaggcaagaucuccgugcaguacaaucugagccacgcuuaugccgucgacgcugccaaccauuguggcaccauugcgaauggggugcuccaaacauucaugcggauggccuggggaggcucuuacaucgcucuggauuccgggaagggaagcugggacugcaucaugaccucuuaccaguaucuuauuauccagaacauuacaugggaagaucacugucaguuuucccgccccagcccuaucggcuaccuggggcuccugucccaaagaacccgggacauuuauaucucucgcagacggcgcggaacguucacauggacccuuagcgauuccgagggcaacgaaacacccggcggguacugccugaccagauggaugcucaucgaggccgagcugaaauguuuuggaaauaccgcuguugccaagugcaacgaaaaacaugacgaggaguucugcgauaugcugcggcucuuugacuucuguaagcaggcgauucgcagacugaaaacgccugcccagaugagcauccagcuuauuaauaaggcugugaacgcccugaucaaugaucaacucauuaugaagaaccaucugcgggacaucaugggcauccccuauugcaauuacucuaaauauugguaccuuaaccacacagucaccgggaagacaucccugccucgcuguuggcucgugagcaauggaucuuaccugaacgaaacccacuucagcgacgauauugaacagcaggcugacaauaugaucacagagcugcuccaaaaagaguauauugauagacagggcaagaccccgcuggggcuuguggaccuguuugucuucuccacgucuuuuuaccucaucagcauuuuccugcaccugguuaaaauccccacacaucggcacguggugggaaagccuugccccaaaccucaucgccuuaaccacaugggcauuuguuccugcggccucuauaagcaccccggggucccggugaaguggaaaagaugaggacuagucccuguucccagagcccacuuuuuuuucuuuuuuugaaauaaaauagccugucuuucagaucucaaaggcucuuuucagagccaccaaaaaaaaaaaaaaaaaaaaaaaaaaaaaaaaaaaaaaaaaaaaaaaaaaaaaaaaaaaaaaaaagaauu

SEQ ID NO: 23599 - RNA, 1733 nt, Artificial Sequence
  mRNA product Design a-2 (hSL-A64-N5) comprising derived and/or modified sequence from LASV(Lassa virus/H.sapiens-wt/NGA/2015/ISTH_0543;Clade II)__AVO03639__GPCmut2 (opt5)
aggagaguccgcucagccagguugcagaagcggcuuagcguguguccuaaucuucucucugcguguagguaggccugugccgcaaacaagcuuaccaugggccagaucauuaccuucuuucaagaggugccccacgucaucgaagagguuaugaacauugugcugaucgcccucagccugcuugcuauucugaaggggaucuacaauguggccacaugcggacucuucggccuggucuccuuucuucugcucugugggagaucuugcagcacgaccuauaaaggaguguacgaacugcagacacuggagcucgacauggcgaaccugaauauguguaugccucuuuccugcaccaagaacaauucucaucacuauaucaugguuggcaacgaaacagggcuggagcucacccugacaaauaccagcauuaucaaccauaaauucuguaaucuuuccgaugcucacaagaaaaaccuguacgaccaugcccucaugucuauuaucagcacguuucaccuguccauuccgaauuucaaccaguaugaggccaugagcugcgauuuuaauggaggcaagaucucugugcaguacaaccugucccacaccuaugcugucgacgccgcuaaucauuguggcacaauugccaacggggugcuccaaaccuucaugcggauggcguggggaggcagcuacaucgcccuggauucugggaagggauccugggacugcaucaugacaagcuaccaguaucuuguuauucagaacaccacgugggaagaucacugucaguuuucucgccccuccccuaucggcuaccuggggcuccugagccaaagaacacgggacauuuauaucucccgcagacggcgcggaaccuucacauggacccuuucugauagcgagggcaaugaaacccccggcggguacugccugacaagauggaugcucauugaggcugagcugaaauguuuuggaaacacggccguggcuaagugcaaugaaaaacaugacgaggaguucugcgauaugcugcggcucuuugacuucuguaagcaggccauccgcagacugaaaaccccugcgcagauguccauccagcuuauuaacaaggccgucaaugcucugaucaacgaucaacucauuaugaagaaucaucugcgggacaucaugggcauucccuauugcaacuacagcaaauauugguaccuuaaucacacagugaccgggaagacaucucugccucgcuguuggcucguguccaacggaagcuaccugaaugaaacccacuucucugacgauaucgaacagcaggccgacaacaugaucacggagcugcuccaaaaagaguauauugauagacagggcaagacaccgcuggggcuugucgaccuguuuguuuucagcaccuccuuuuaccucaucucuauuuuccugcaccuggugaaaauccccacccaucggcacauuacaggaaagccuugccccaaaccucaucgccuuaaucacaugggcaucuguagcugcggccucuauaagcaccccggggugccggucaaguggaaaagaugaggacuagucccuguucccagagcccacuuuuuuuucuuuuuuugaaauaaaauagccugucuuucagaucucaaaggcucuuuucagagccaccaaaaaaaaaaaaaaaaaaaaaaaaaaaaaaaaaaaaaaaaaaaaaaaaaaaaaaaaaaaaaaaaagaauu

SEQ ID NO: 23600 - RNA, 1733 nt, Artificial Sequence
  mRNA product Design a-2 (hSL-A64-N5) comprising derived and/or modified sequence from LASV(Lassa virus/H.sapiens-wt/NGA/2016/ISTH_0009;Clade II)__AVO03571__GPCmut2 (opt5)
aggagaguccgcucagccagguugcagaagcggcuuagcguguguccuaaucuucucucugcguguagguaggccugugccgcaaacaagcuuaccaugggccagaucauuaccuucuuucaagaggugccccacgucaucgaagagguuaugaacauugugcugaucgcccucagccugcuugcuauucugaaggggaucuacaauguggccacaugcggacuccugggccuugucuccuuccugcuccugugugggagaucuugcagcacgaccuauaaaggaguguacgaacugcagacacucgagcuggacauggcgucccuuaacauguguaugccucugucuugcaccaagaauaacagccaucacuauaucaugguuggcaaugaaacagggcucgagcugacccuuacaaacaccuccauuaucaaucauaaauuuuguaaccugucugaugcucacaagaaaaaucucuacgaccaugcccugaugagcauuaucuccacguuccaccugagcauuccgaacuuuaaucaguaugaggccaugucuugcgauuucaacggaggccggaucuccgugcaguacaaucucagccacucuuaugcugucgacgccgcuaaccauuguggcaccauugccaauggggugcugcaaacauuuaugcgcauggcguggggaggcuccuacaucgcccuugauagcgggaagggaucuugggacugcaucaugaccuccuaccaguaucugauuauccagaacacaaccugggaagaucacugucaguucagcagacccuccccuauuggcuaccucgggcugcuuucucaacggacgcgcgacaucuauauuagcagacggcgcagaggaacauuuaccuggacacuguccgauagcgagggcaacgaaacccccggcggguacugccucacccgguggaugcugaucgaggcugagcugaaguguuucggaaauacagccguugcuaaaugcaacgaaaagcaugacgaggaauuuugcgauaugcuccgccuguucgacuuuuguaaacaggccaucagacggcuuaagacgccugcgcagaugucuauucagcugaucaauaaagccgugaacgcucucauuaaugaucaacugaucaugaagaaccaccuucgcgacauuaugggcauccccuauugcaauuacuccaaguauugguaccugaaccacaccgucacagggaaaaccagccucccuagauguuggcuggugucuaauggaagcuaccugaacgagacacauuucuccgacgauaucgaacagcaggccgacaauaugauuaccgagcuccugcaaaaggaguauaucgaucggcagggcaaaacgccgcuugggcugguggaccucuucgucuuuucuaccagcuucuaccugauuuccaucuuucugcaccuuguuaagauucccacacaucgccacaucaccggaaaaccuugccccaagccucauagacucaaccacaugggcauuuguagcugcggccuguauaaucaccccggggugccggugaaauggaagcggugaggacuagucccuguucccagagcccacuuuuuuuucuuuuuuugaaauaaaauagccugucuuucagaucucaaaggcucuuuucagagccaccaaaaaaaaaaaaaaaaaaaaaaaaaaaaaaaaaaaaaaaaaaaaaaaaaaaaaaaaaaaaaaaaagaauu

SEQ ID NO: 23601 - RNA, 1733 nt, Artificial Sequence
  mRNA product Design a-2 (hSL-A64-N5) comprising derived and/or modified sequence from LASV(Lassa virus/H.sapiens-wt/NGA/2016/ISTH_0017;Clade II)__AVO03567__GPCmut2 (opt5)
aggagaguccgcucagccagguugcagaagcggcuuagcguguguccuaaucuucucucugcguguagguaggccugugccgcaaacaagcuuaccaugggccagaucauuaccuucuuucaagaggugccccacgucaucgaagagguuaugaacauugugcugaucgcccucagccugcuugcuauucugaaggggaucuacaauguggccacaugcggacucuucggccuggucuccuuucuucugcucugugggagaucuugcagcacgaccuauaaaggaguguacgaacugcagacacuggagcucgacauggcgucccugaacauguguaugccucuuucuugcaccaagaauaacagccaucacuauaucaugguuggcaaugaaacagggcuggagcucacccugacaaacaccuccauuaucaaucauaaauucuguaaccuuucugaugcucacaagaaaaaucuguacgaccaugcccucaugagcauuaucuccacguuucaccugagcauuccgaacuucaaucaguaugaggccaugucuugcgauuuuaacggaggcaagaucuccgugcaguacaaucugagccacaccuaugcuauugacgccgcuaaccauuguggcacaaucgccaaugggguccuccaaaccuucaugcggauggcguggggaggcucuuacaucgcccuggauuccgggaagggaagcugggacugcauuaugacaucuuaccaguaucuuaucauucagaacaccacgugggaagaucacugucaguuuucccgccccagcccuaucggcuaccuggggcuccugucccaaagaacacgggacauuuauaucucucgcagacggcgcggaaccuucacauggacccuuagcgauuccgagggcaacgaaacccccggcggguacugccugacaagauggaugcucaucgaggcugagcugaaauguuuuggaaauacggccguggcuaagugcaacgaaaaacaugacgaggaguucugcgauaugcugcggcucuuugacuucuguaagcaggccauucgcagacugaaaaccccugcgcagaugagcauccagcuuauuaauaaggccguuaacgcucugaucaaugaucaacucauuaugaagaaccaucugcgggacaucaugggcauccccuauugcaauuacucuaaauauugguaccuuaaccacacagugaccgggaagacaucccugccucgcuguuggcucgucagcaauggaucuuaccugaacgaaacccacuucagcgacgauauugaacagcaggccgacaauaugaucacggagcugcuccaaaaagaguauauggauagacagggcaagacaccgcuggggcuuguggaccuguuuguguucuccaccucuuuuuaccucauuagcaucuuccugcaccugguccggauucccacccaucgccacguuaucggaaaaccuugccccaagccucauagacuuaaccacaugggcauuuguuccugcggccucuauaaacaccccggggugccggugaaguggaagcggugaggacuagucccuguucccagagcccacuuuuuuuucuuuuuuugaaauaaaauagccugucuuucagaucucaaaggcucuuuucagagccaccaaaaaaaaaaaaaaaaaaaaaaaaaaaaaaaaaaaaaaaaaaaaaaaaaaaaaaaaaaaaaaaaagaauu

SEQ ID NO: 23602 - RNA, 1733 nt, Artificial Sequence
  mRNA product Design a-2 (hSL-A64-N5) comprising derived and/or modified sequence from LASV(Lassa virus/H.sapiens-wt/NGA/2018/ISTH_0959;Clade II)__AVV65099__GPCmut2 (opt5)
aggagaguccgcucagccagguugcagaagcggcuuagcguguguccuaaucuucucucugcguguagguaggccugugccgcaaacaagcuuaccaugggccagaucauuaccuucuuucaagaggugccccacgucaucgaagagguuaugaacauugugcugaucgcccucagccugcuugcuauucugaaggggaucuacaauguggucacaugcggacucuucggccugguguccuuucuucugcucugugggagaucuugcagcacgaccuauaaaggaguuuacgaacugcagacacuggagcucgacauggccucccugaacauguguaugccucuuucuugcaccaagaauaacagccaucacuauaucauggugggcaaugaaacagggcuggagcucacccugacaaacaccuccauuaucaaucauaaauucuguaaccuuucugaugcgcacaagaaaaaucuguacgaccaugcucucaugagcauuaucuccacguuucaccugagcauuccgaacuucaaucaguaugaggccaugucuugcgauuuuaacggaggcaagaucuccguccaguacaaucugagccacgccuaugcuauugacgccgcuaaccauuguggcaccaucgccaauggggugcuccaaacauucaugcggauggcguggggaggcucuuacaucgcccuggauuccgggaagggaagcugggacugcauuaugaccucuuaccaguaucuuaucauucagaacacaaccugggaagaucacugucaguuuucccgccccagcccuaucggcuaccuggggcuccugucccaaagaacgcgggacauuuauaucucucgcagacggcgcggaacauucaccuggacacuuagcgauuccgagggcaacgaaacccccggcggguacugccugaccagauggaugcucaucgaggcugagcugaaauguuuuggaaauacagccguugcuaagugcaacgaaaaacaugacgaggaguucugcgauaugcugcggcucuuugacuucuguaagcaggccauucgcagacugaaaacgccugcgcagaugagcauccagcuuauuaauaaggccgugaacgcucugaucaaugaucaacucauuaugaagaaccaucugcgggacaucaugggcauccccuauugcaauuacucuaaauauugguaccuuaaccacaccgucacagggaagaccucccugccucgcuguuggcucgugagcaauggaucuuaccugaacgaaacacacuucagcgacgauauugaacagcaggccgacaauaugaucaccgagcugcuccaaaaagaguauauugauagacagggcaagacgccgcuggggcuuguggaccuguuugucuucuccacaucuuuuuaccucaucagcauuuuccugcaccugguuaaaauccccacccaucggcacgugauuggaaagccuugccccaaaccucaucgccuuaaccacaugggcaucuguuccugcggccucuauaagcaccccggggugccggucaaguggaaaagaugaggacuagucccuguucccagagcccacuuuuuuuucuuuuuuugaaauaaaauagccugucuuucagaucucaaaggcucuuuucagagccaccaaaaaaaaaaaaaaaaaaaaaaaaaaaaaaaaaaaaaaaaaaaaaaaaaaaaaaaaaaaaaaaaagaauu

SEQ ID NO: 23603 - RNA, 1733 nt, Artificial Sequence
  mRNA product Design a-2 (hSL-A64-N5) comprising derived and/or modified sequence from LASV(LASV003-NIG-2008;Clade II)__AIT17580__GPCmut2 (opt5)
aggagaguccgcucagccagguugcagaagcggcuuagcguguguccuaaucuucucucugcguguagguaggccugugccgcaaacaagcuuaccaugggccagaucauuaccuucuuucaagaggugccccacgucaucgaagagguuaugaacauugugcugaucgcccucagccugcuugcuauucugaaggggaucuacaauguggccacaugcggacucuucggccuggucuccuuucuucugcucugugggagaucuugcagcacgaccuauaaaggaguguacgaacugcagacacuggagcucgacauggcgucccugaacauguguaugccucuuucuugcaccaagaauaacagccaucacuauaucaugguuggcaaugaaacagggcuggagcucacccugacaaacaccuccauuaucaaucauaaauucuguaaccuuucugaugcucacaagaaaaaucuguacgaccaugcccucaugagcauuaucuccacguuucaccugagcauuccgaacuucaaucaguaugaggccaugucuugcgauuuuaacggaggcaagaucuccgugcaguacaaucugagccacaccuaugcugucgacgccgcuaaccauuguggcacaauugccaauggggugcuccaaaccuucaugcggauggcguggggaggcucuuacaucgcccuggauuccgggaagggaagcugggacugcaucaugacaucuuaccaguaucuuauuauccagaacaccacgugggaagaucacugucaguuuucccgccccagcccuauuggcuaccuggggcuccugucccaaagaacacgggacaucuauauuucucgcagacggcgcggaaccuucacauggacccuuagcgauuccgagagcaacgaaacccccggcggcuacugccugacaagauggaugcucaucgaggcugagcugaaauguuuugggaauacggccguugcuaagugcaacgaaaaacaugacgaggaguucugcgauaugcugcggcucuuugacuucuguaagcaggccauccgcagacugaaagcgccugcccagaugucuauucagcuuaucaauaaggcugugaacgcccugauuaaugaucaacucaucaugaagaaccaucugcgggacauuaugggaauccccuauugcaauuacuccaaauauugguaccuuaaccacaccgucacaggccgcaccagccugccuagauguuggcucgugucuaaugggagcuaccugaacgaaacacacuucuccgacgauaucgaacagcaggcugacaauaugauuaccgagcugcuccaaaaggaguauauggaucggcagggaaaaacgccgcugggccuuguggaccuguuugucuucucuaccagcuuuuaccucaucuccauuuuccugcaccugguuaagauccccacacaucgccacgugauugggaaaccuugccccaagccucauagacuuaaccacaugggaaucuguagcugcggccucuauaaacaccccggcgugccggucaaguggaagcggugaggacuagucccuguucccagagcccacuuuuuuuucuuuuuuugaaauaaaauagccugucuuucagaucucaaaggcucuuuucagagccaccaaaaaaaaaaaaaaaaaaaaaaaaaaaaaaaaaaaaaaaaaaaaaaaaaaaaaaaaaaaaaaaaagaauu

SEQ ID NO: 23604 - RNA, 1733 nt, Artificial Sequence
  mRNA product Design a-2 (hSL-A64-N5) comprising derived and/or modified sequence from LASV(LASV035-NIG-2009;Clade II)__AIT17588__GPCmut2 (opt5)
aggagaguccgcucagccagguugcagaagcggcuuagcguguguccuaaucuucucucugcguguagguaggccugugccgcaaacaagcuuaccaugggccagaucauuaccuucuuucaagaggugccccacgucaucgaagagguuaugaacauugugcugaucgcccucagccugcuugcuauucugaaggggaucuacaauguggccacaugcggacucuucggccuggucuccuuucuucugcucugugggagaucuugcagcacgaccuauaaaggaguguacgaacugcagacacuggagcucgacauggcgucccugaacauguguaugccucuuucuugcaccaagaauaacagccaucacuauaucaugguuggcaaugaaacagggcuggagcucacccugacaaacaccuccauuaucaaucauaaauucuguaaccuuucugaugcucacaagaaaaaucuguacgaccaugcccucaugagcauuaucuccacguuucaccugagcauuccgaacuucaaucaguaugaggccaugucuugcgauuuuaacggaggcaagaucuccgugcaguacaaucugagccacgcuuaugccgucgacgcugccaaccauuguggcaccauugcgaauggggugcuccaaacauucaugcggauggccuggggaggcucuuacaucgcucuggauuccgggaagggaagcugggacugcaucaugaccucuuaccaguaucuuauuauccagaacacaaccugggaagaucacugucaguuuucccgccccagcccuauuggcuaccuggggcuccugucccaaagaacgcgggacaucuauauuucucgcagacggcgcggaacauucaccuggacacuuagcgauuccgagggcaacgaaacccccggcggguacugccugaccagauggaugcucaucgaggccgagcugaaauguuuuggaaauacagcuguugccaagugcaacgaaaaacaugacgaggaguucugcgauaugcugcggcucuuugacuucuguaagcaggcgauccgcagacugaaagccccugcucagaugagcauucagcuuaucaauaaggccgugaacgcucugauuaaugaucaacucaucaugaagaaccaucugcgggacauuaugggcauccccuauugcaauuacucuaaauauugguaccuuaaccacacggucaccgggaagacaucccugccucgcuguuggcucgugagcaauggaucuuaccugaacgaaacccacuucagcgacgauaucgaacagcaggccgacaauaugauuacagagcugcuccaaaaagaguauaucgauagacagggcaagaccccgcuggggcuuguggaccuguuugucuucuccacgucuuuuuaccucauuagcaucuuccugcaccugguuaaaauucccacacaucggcacgugaucggaaagccuugccccaaaccucaucgccuuaaccacaugggcauuuguuccugcggccucuauaagcaccccggggugccggucaaguggaaaagaugaggacuagucccuguucccagagcccacuuuuuuuucuuuuuuugaaauaaaauagccugucuuucagaucucaaaggcucuuuucagagccaccaaaaaaaaaaaaaaaaaaaaaaaaaaaaaaaaaaaaaaaaaaaaaaaaaaaaaaaaaaaaaaaaagaauu

SEQ ID NO: 23605 - RNA, 1733 nt, Artificial Sequence
  mRNA product Design a-2 (hSL-A64-N5) comprising derived and/or modified sequence from LASV(LASV1000-NIG-2009;Clade II)__AIT17782__GPCmut2 (opt5)
aggagaguccgcucagccagguugcagaagcggcuuagcguguguccuaaucuucucucugcguguagguaggccugugccgcaaacaagcuuaccaugggccagaucauuaccuucuuucaagaggugccccacgucaucgaagagguuaugaacauugugcugaucgcccucagccugcuugcuauucugaaggggaucuacaauguggccacaugcggacucuucggccuggucuccuuucuucugcucugugggagaucuugcagcacgaccuauaaaggaguguacgaacugcagacacuggagcucgacauggcgucccugaacauguguaugccucuuucuugcaccaagaauaacagccaucacuauaucaugguuggcaaugaaacagggcuggagcucacccugacaaacaccuccauuaucaaucauaaauucuguaaccuuucugaugcucacaagaaaaaucuguacgaccaugcccucaugagcauuaucuccacguuucaccugagcauuccgaacuucaaucaguaugaggccaugucuugcgauuuuaacggaggcaagaucuccgugcaguacaaucugagccacaccuaugcugucgacgccgcuaaccauuguggcacaauugccaauggggugcuccaaaccuucaugcggauggcguggggaggcucuuacaucgcccuggauuccgggaagggaagcugggacugcaucaugacaucuuaccaguaucuuauuauccagaacaccacgugggaagaucacugucaguuuucccgccccagcccuauuggcuaccuggggcuccugucccaaagaacacgggacaucuauauuucucgcagacggcgcggaaccuucacauggacccuuagcgauuccgagggcaacgaaacccccggcggguacugccugacaagauggaugcucaucgaggcugagcugaaauguuuuggaaauacggccguugcuaagugcaacgaaaaacaugacgaggaguucugcgauaugcugcggcucuuugacuucuguaagcaggccaucaaacgccugaagaccccugcgcagaugagcauucagcuuaucaauaaggccgugaacgcucugauuaaugaucaacucaucaugaaaaaccaccugagagacauuaugggcauccccuauugcaauuacucuaaguauugguaccuuaaccacacagucaccgggaaaacaucccugccucgguguuggcucgugagcaauggaucuuaccugaacgaaacccauuucagcgacgauaucgaacagcaggccgacaauaugauuacggagcugcuccaaaaggaguauaucgaucgccagggcaaaacaccgcuggggcuuguggaccuguuugucuucuccaccucuuuuuaccucauuagcaucuuccugcaccugguuaagauucccacccauagacacguggugggaaaaccuugccccaagccucaucggcuuaaccacaugggcaucuguuccugcggccucuauaagcaccccggggucccggugaaauggaagcgcugaggacuagucccuguucccagagcccacuuuuuuuucuuuuuuugaaauaaaauagccugucuuucagaucucaaaggcucuuuucagagccaccaaaaaaaaaaaaaaaaaaaaaaaaaaaaaaaaaaaaaaaaaaaaaaaaaaaaaaaaaaaaaaaaagaauu

SEQ ID NO: 23606 - RNA, 1733 nt, Artificial Sequence
  mRNA product Design a-2 (hSL-A64-N5) comprising derived and/or modified sequence from LASV(LASV221-NIG-2010;Clade II)__AIT17624__GPCmut2 (opt5)
aggagaguccgcucagccagguugcagaagcggcuuagcguguguccuaaucuucucucugcguguagguaggccugugccgcaaacaagcuuaccaugggccagaucauuaccuucuuucaagaggugccccacgucaucgaagagguuaugaacauugugcugaucgcccucagccugcuugcuauucugaaggggaucuacaauguggccacaugcggacucuucggccuggucuccuuucuucugcucugugggagaucuugcagcacgaccuauaaaggaguguacgaacugcagacacuggagcucgacauggcgucccugaacauguguaugccucuuucuugcaccaagaauaacagccaucacuauaucaugguuggcaaugaaacagggcuggagcucacccugacaaacaccuccauuaucaaucauaaauucuguaaccuuucugaugcucacaagaaaaaucuguacgaccaugcccucaugagcauuaucuccacguuucaccugagcauuccgaacuucaaucaguaugaggccaugucuugcgauuuuaacggaggcaagaucuccgugcaguacaaucugagccacaccuaugcuauugacgccgcuaaccauuguggcacaaucgccaaugggguccuccaaaccuucaugcggauggcguggggaggcucuuacaucgcccuggauuccgggaagggaagcugggacugcauuaugacaucuuaccaguaucuuaucauucagaacaccacgugggaagaucacugucaguuuucccgccccagcccuaucggcuaccuggggcuccugucccaaagaacacgggacauuuauaucucucgcagacggcgcggaaccuucacauggacccuuagcgauuccgagggcaacgaaacccccggcggguacugccugacaagauggaugcucaucgaggcugagcugaaauguuuuggaaauacggccguggcuaagugcaacgaaaaacaugacgaggaguucugcgauaugcugcggcucuuugacuucuguaagcaggccauucgcagacugaaaaccccugcgcagaugagcauccagcuuauuaauaaggccguuaacgcucugaucaaugaucaacucauuaugaagaaccaucugcgggacaucaugggcauccccuauugcaauuacucuaaauauugguaccuuaaccacacagugaccgggaagacaucccugccucgcuguuggcucgucagcaauggaucuuaccugaacgaaacccacuucagcgacgauauugaacagcaggccgacaauaugaucacggagaugcugcaaaaagaguauauggauagacagggcaagacaccgcucgggcugguggaccuuuuuguguucuccaccucuuuuuaccugauuagcaucuuccuccaccuggucaaaauucccacccaucggcacguuaucggaaagccuugccccaaaccucaucgccugaaccacaugggcauuuguuccugcggccuuuauaagcaccccggggugccggugaaguggaaaagaugaggacuagucccuguucccagagcccacuuuuuuuucuuuuuuugaaauaaaauagccugucuuucagaucucaaaggcucuuuucagagccaccaaaaaaaaaaaaaaaaaaaaaaaaaaaaaaaaaaaaaaaaaaaaaaaaaaaaaaaaaaaaaaaaagaauu

SEQ ID NO: 23607 - RNA, 1733 nt, Artificial Sequence
  mRNA product Design a-2 (hSL-A64-N5) comprising derived and/or modified sequence from LASV(LASV237-NIG-2010;Clade II)__AIT17638__GPCmut2 (opt5)
aggagaguccgcucagccagguugcagaagcggcuuagcguguguccuaaucuucucucugcguguagguaggccugugccgcaaacaagcuuaccaugggccagaucauuaccuucuuucaagaggugccccacgucaucgaagagguuaugaacauugugcugaucgcccucagccugcuugcuauucugaaggggaucuacaauguggccacaugcggacucuucggccuggucuccuuucuucugcucugugggagaucuugcagcacgaccuauaaaggaguguacgaacugcagacacuggagcucgacauggcgucccugaacauguguaugccucuuucuugcaccaagaauaacagccaucacuauaucaugguuggcaaugaaacagggcuggagcucacccugacaaacaccuccauuaucaaucauaaauucuguaaccuuucugaugcucacaagaaagaccuguacgaucaugcccucaugagcauuaucuccacguuucaccugagcauuccgaauuucaaccaguaugaggccaugucuugcgacuuuaauggaggcaagaucuccgugcaguacaaccugagccacaccuaugcugucgaugccgcuaaucauuguggcacaauugccaacggggugcuccaaaccuucaugcggauggcguggggaggcucuuacaucgcccuggacuccgggaagggaagcugggauugcaucaugacaucuuaccaguaucuuauuauccagaauaccacgugggaagaccacugucaguuuucccgccccagcccuauuggcuaccuggggcuccugucccaaagaacacgggauaucuauauuucucgcagacggcgcggaaccuucacauggacccuuagcgacuccgagggcaacgaaacccccggcggguacugccugacaagauggaugcucaucgaggcugagcugaaauguuuuggaaacacggccguugcuaagugcaaugaaaaacaugaugaggaguucugcgacaugcugcggcucuuugauuucuguaagcaggccauccgcagacugaaaaccccugcgcagaugagcauucagcuuaucaacaaggccgugaaugcucugauuaacgaccaacucaucaugaagaaucaucugcgggacauuaugggcauccccuauugcaacuacucuaaauauugguaccuuaaucacacagucaccgggaagacaucccugccucgcuguuggcucgugagcaacggaucuuaccugaaugaaacccacuucagcgaugacaucgaacagcaggccgauaacaugauuacggagcugcuccaaaaagaguauauggacagacagggcaagacaccgcuggggcuuguggaucuguuugucuucuccaccucuuuuuaccucaucagcauuuuccugcaccugaucaaaauucccacccaucggcacaucacaggaaagccuugccccaaaccucaucgccuuaaucacaugggcauuuguuccugcggccucuauaagcaccccgggguuccggugaaguggaaaagaugaggacuagucccuguucccagagcccacuuuuuuuucuuuuuuugaaauaaaauagccugucuuucagaucucaaaggcucuuuucagagccaccaaaaaaaaaaaaaaaaaaaaaaaaaaaaaaaaaaaaaaaaaaaaaaaaaaaaaaaaaaaaaaaaagaauu

SEQ ID NO: 23608 - RNA, 1733 nt, Artificial Sequence
  mRNA product Design a-2 (hSL-A64-N5) comprising derived and/or modified sequence from LASV(LASV253-NIG-2011;Clade II)__AIT17670__GPCmut2 (opt5)
aggagaguccgcucagccagguugcagaagcggcuuagcguguguccuaaucuucucucugcguguagguaggccugugccgcaaacaagcuuaccaugggccagaucauuaccuucuuucaagaggugccccacgucaucgaagagguuaugaacauugugcugaucgcccucagccugcuugcuauucugaaggggaucuacaauguggccacaugcggacucuucggccuggucuccuuucuucugcucugugggagaucuugcagcacgaccuauaaaggaguguacgaacugcagacacuggagcucgacauggcgucccugaacauguguaugccucuuucuugcaccaagaauaacagccaucacuauaucaugguuggcaaugaaacagggcuggagcucacccugacaaacaccuccauuaucaaucauaaauucuguaaccuuucugaugcucacaagaaaaaucuguacgaccaugcccucaugagcauuaucuccacguuucaccugagcauuccgaacuucaaucaguaugaggccaugucuugcgauuuuaacggaggcaagaucuccgugcaguacaaucugagccacaccuaugcugucgacgccgcuaaccauuguggcacaauugccaauggggugcuccaaaccuucaugcggauggcguggggaggcucuuacaucgcccuggauuccgggaagggaagcugggacugcaucaugacaucuuaccaguaucuuauuauccagaacaccacgugggaagaucacugucaguuuucccgccccagcccuauuggcuaccuggggcuccugucccaaagaacacgggacaucuauauuucucgcagacggcgcggaaccuucacauggacccuuagcgauuccgagggcaacgaaacccccggcggguacugccugacaagauggaugcucaucgaggcugagcugaaauguuuuggaaauacggccguugcuaagugcaacgaaaaacaugacgaggaguucugcgauaugcugcggcucuuugacuucuguaagcaggccauccgcagacugaaagcgccugcccagaugagcauucagcuuaucaauaaggcugugaacgcccugauuaaugaucaacucaucaugaagaaccaucugcgggacauuaugggcauccccuauugcaauuacucuaaauauugguaccuuaaccacaccgucacagggcgcaccucccugccuagauguuggcucgugagcaauggaucuuaccugaacgaaacacacuucagcgacgauaucgaacagcaggcugacaauaugauuaccgagcugcuccaaaaggaguauaucgaucggcagggcaaaacgccgcuggggcuuguggaccuguuugucuucuccacaucuuuuuaccucauuagcaucuuccugcaccugguuaagauucccacccaucgccacaucauuggaaaaccuugccccaagccucauagacuuaaccacaugggcaucuguuccugcggccucuauaaacaccccggggugccggugaaguggaagcggugaggacuagucccuguucccagagcccacuuuuuuuucuuuuuuugaaauaaaauagccugucuuucagaucucaaaggcucuuuucagagccaccaaaaaaaaaaaaaaaaaaaaaaaaaaaaaaaaaaaaaaaaaaaaaaaaaaaaaaaaaaaaaaaaagaauu

SEQ ID NO: 23609 - RNA, 1733 nt, Artificial Sequence
  mRNA product Design a-2 (hSL-A64-N5) comprising derived and/or modified sequence from LASV(LASV254-NIG-2011;Clade II)__AIT17674__GPCmut2 (opt5)
aggagaguccgcucagccagguugcagaagcggcuuagcguguguccuaaucuucucucugcguguagguaggccugugccgcaaacaagcuuaccaugggccagaucauuaccuucuuucaagaggugccccacgucaucgaagagguuaugaacauugugcugaucgcccucagccugcuugcuauucugaaggggaucuacaauguggccacaugcggacucuucggccuggucuccuuucuucugcucugugggagaucuugcagcacgaccuauaaaggaguguacgaacugcagacacuggagcucgacaugaccaaccugaauauguguaugccucuuuccugcacaaagaacaauucucaucacuauaucaugguuggcaacgaaaccgggcuggagcucacacugaccaauacgagcauuaucaaccauaaauucuguaaucuuuccgaugcgcacaagaaaaaccuguacaaucaugcucucaugucuauuaucagcaccuuucaccuguccauuccgaacuucaaucaguaugaggccaugagcugcgacuuuaacggaggcaagaucucugugcaguacaaucugucccacagcuaugccgucgaugcugccaaccauuguggcacaauugcuaacggggugcuccaaaccuucaugcggauggccuggggaggcucuuacaucgcgcuggacuccgggaagggaaauugggauugcaucaugacaagcuaccaguaucuuauuauccagaacaccacgugggaagaccacugucaguuuucucgccccuccccuauuggcuaccuggggcuccugagccaaagaacacgggauaucuauauuucccgcagacggcgcggaaccuucacauggacccuuucugacagcgagggcaaugaaacccccggcggguacugccugacaagauggaugcucaucgaggccgagcugaaauguuuuggaaacacggcuguugccaagugcaaugaaaaacaugaugaggaguucugcgacaugcugcggcucuuugauuucuguaagcaggcuauccgcagacugaaaaccccugcccaggcgaacauucagcuuaucaauaaggccgugaacgcucugauuaaugaccaacucaucaugaagaaccaucugcgggauauuaugggcauccccuauugcaauuacuccaaauauugguaccuuaaccacacagucaccgggaagacaagccugccucgcuguuggcucgugucuaauggauccuaccugaacgaaacccacuucagcgacgacaucgaacagcaggccgauaauaugauuacggagcugcuccaaaaagaguauauggacagacagggcaagacaccgcuggggcuuguggaucuguuugucuucucuaccagcuuuuaccucaucuccauuuuccugcaccugguuaaaauccccacccaucggcacgugauuggaaagccuugccccaaaccucaucgccuuaaccacaugggcaucuguucuugcggccucuauaagcaccccggggugccggucaaguggaaaagaugaggacuagucccuguucccagagcccacuuuuuuuucuuuuuuugaaauaaaauagccugucuuucagaucucaaaggcucuuuucagagccaccaaaaaaaaaaaaaaaaaaaaaaaaaaaaaaaaaaaaaaaaaaaaaaaaaaaaaaaaaaaaaaaaagaauu

SEQ ID NO: 23610 - RNA, 1733 nt, Artificial Sequence
  mRNA product Design a-2 (hSL-A64-N5) comprising derived and/or modified sequence from LASV(Nig08-A19;Clade III)__ADU56618__GPCmut2 (opt5)
aggagaguccgcucagccagguugcagaagcggcuuagcguguguccuaaucuucucucugcguguagguaggccugugccgcaaacaagcuuaccaugggccagaucgugaccuucuuucaagaggucccccacguuauugaagaggugaugaacaucgugcugauugcccucagcauccuggcuauucuuaaggggcuguacaauaucgccacaugcggacucaucggccuggucacguuccuucugcucuccgggagaucuuguagcaugaccuauaaaggaguguacgaacugcagacacuggagcucaacaugaauacccugaacaugugcaugccucuuuccuguacaaagaauaacucucaucacuauauuaugguuggcaaugaaaccgggcuggagcucacacugaccaacacgagccuucugcaucacaaauuuugcaaucucuccgacgcgcauaagaaaaaccuguacgaucacacccugaugucuaucauuagcacauuccaccucuccaucccgaauuuuaaccaguaugaggcuaugagcugugacuucaauggaggcaagauuaccgugcaguacaaccugucucauuccuaugccaucgaugccgcuaaucacugcggcacagucgccaacggggugcuucaaaccuuuaugcggauggcuuggggaggcagcuacauugcccuggacucugggcgcggaaagugggauuguaucaugacguccuaccaguaucucaucauucagaacacaaccugggaagaccauugccaguucagcagacccucuccuaucggcuaccuggggcuucugucccaacggacacgcgauauuuauaucagcagacggcgcagaggaaccuuuaccuggacacucuccgacucugagggcaaugaaacgcccggcggguacugucugacccgguggaugcugauugaggcggagcucaaaugcuucggaaacacagccguugcuaaguguaaugaaaaacacgaugaggaauuuugcgacaugcugcgccuuuucgauuuuugcaagcaggccaucagacggcugaaagcuccugcccagaugagcauccagcucauuaacaaggcggugaaugcccugaucaacgaccaacuuauuaugaagaaucaucugcgcgauaucaugggcauucccuauuguaacuacuccaaauauugguaccucaaucacaccagcacagggagaaccucucugccucggugcuggcuggucuccaacggaagcuaccucaaugagacgcacuucucugacgacaucgaacagcaggcugauaacaugaucacagagaugcugcaaaaggaguaucuugaccgccagggcaaaaccccgcuggggcucguggaucuguucguguuuagcaccuccuucuaccugauuucuaucuuucuucaucucgucaagauucccacacacagacauaucguuggaaaaccuugucccaagccucaccggcugaaucacaugggcauuugcagcuguggccuguauaaacagcccggggugccggugagauggaagcgcugaggacuagucccuguucccagagcccacuuuuuuuucuuuuuuugaaauaaaauagccugucuuucagaucucaaaggcucuuuucagagccaccaaaaaaaaaaaaaaaaaaaaaaaaaaaaaaaaaaaaaaaaaaaaaaaaaaaaaaaaaaaaaaaaagaauu

SEQ ID NO: 23611 - RNA, 1736 nt, Artificial Sequence
  mRNA product Design a-2 (hSL-A64-N5) comprising derived and/or modified sequence from LASV(G1180-SLE-2010;Clade IV)__AIT17168__GPCmut2 (opt5)
aggagaguccgcucagccagguugcagaagcggcuuagcguguguccuaaucuucucucugcguguagguaggccugugccgcaaacaagcuuaccaugggccagaucgugaccuucuuucaagaggucccccacguuauugaagaggugaugaacaucgugcugauugcccucagcauccuggcuguccuuaaggggcuguacaauuucgccacaugcggacucgugggccugcuuacguuucugcuccugugugggagauccugcaccgcgucucgguauaaaggaguuuacgaacugcagacacucgagcugaacauggaaacccuuaauauguguaugccucugagcugcacaaagaacaauucccaucacuauauuauggugggcaacgagaccgggcucgagcugacacuuaccaauacgucuaucaucaaccauaaauucuguaaucugagcgacgcucacaagaaaaaccucuacgaucaugcccugauguccauuaucucuaccuuucaccugagcauuccgaauuucaaccaguaugaagccauguccugcgacuuuaauggaggcaagaucagcguccaguacaaccucucucacuccuaugcuggcgaugccgcuaaucauugugggacaguggccaacggaguucugcaaaccuucaugcgcauggcguggggcgggagcuacauugcccuugacucuggacacggcuccugggauugcaucaugacaagcuaccaguaucugauuauccagaacaccacgugggaggaccauugucaguuuucuagacccuccccuaucggguaccucggacugcuuagccaacggacacgcgauauuuauaucuccagacggcgcagaggcaccuucacauggacccugucugacagcgaaggcaaggauacccccgggggauacugccucacacgguggaugcugauugaggcugagcugaaauguuuuggcaauacggccguggcuaagugcaacgaaaaacacgacgaggaguucugcgauaugcuccgccuguuugacuucuguaagcaggccauccagagacuuaaagcgccugcccagauguccauucaacugaucaauaaggcugucaacgcccucaucaaugaucagcugauuaugaagaaccaccuucgggacaucauggggauucccuauugcaauuacagcaaauauugguaccugaaccauaccacaaccggaaagacaucucucccuaaauguuggcugguguccaauggcagcuaccugaacgaaacccacuucucugacgauaucgaacagcaagcugacaauaugauuacggagaugcuccagaaggaguauauggaacgccaggggaaaacaccgcugggacuuguggaucuguuugucuucagcaccuccuuuuaccucaucucuaucuuccugcaucugguuaagauucccacccacagacauaucgugggcaaaagcugcccuaagccccaccggcuuaaccacaugggcauuuguuccugcgggcucuauaagcagccuggagugcccgucaaauggaagcgcugaggacuagucccuguucccagagcccacuuuuuuuucuuuuuuugaaauaaaauagccugucuuucagaucucaaaggcucuuuucagagccaccaaaaaaaaaaaaaaaaaaaaaaaaaaaaaaaaaaaaaaaaaaaaaaaaaaaaaaaaaaaaaaaaagaauu

SEQ ID NO: 23612 - RNA, 1736 nt, Artificial Sequence
  mRNA product Design a-2 (hSL-A64-N5) comprising derived and/or modified sequence from LASV(G1442-SLE-2011;Clade IV)__AIT17180__GPCmut2 (opt5)
aggagaguccgcucagccagguugcagaagcggcuuagcguguguccuaaucuucucucugcguguagguaggccugugccgcaaacaagcuuaccaugggccagaucgugaccuucuuucaagaggucccccacguuauugaagaggugaugaacaucgugcugauugcccucagcauccuggcuguccuuaaggggcuguacaauguggccacaugcggacucauuggccugguuacguuccuucugcucugugggagauccugcaccacaacccuguauaaaggaguguacgaacugcagacacucgagcugaacauggaaacccuuaauauguguaugccucugucuugcacaaagaacaauagccaucacuauauccgggucggcaacgagaccgggcucgagcugacgcuuaccaauacauccaucauuaaccauaaauuuuguaaucugucugacgcgcacaagaaaaaccucuacgaucaugcucugaugagcaucauuuccaccuuccaccugucuaucccgaauuuuaaccaguaugaagccaugagcugcgacuucaauggaggcaagauuuccgugcaguacaaccucagccacucuuaugccggcgaugcugccaaucauugugggacaguugcuaacggagugcugcaaaccuuuaugcgcauggccuggggcggguccuacaucgcgcuugacagcggaagaggcaacugggauugcauuaugacgucuuaccaguaucugaucauccagaauacaaccugggacgaucacugucaguucucccggcccagcccuauuggguaccucggacugcuuucucaacgcacaagagacgucuauaucucccggcgcagacggggcaccuuuaccuggacacugagcgauuccgagggcaaggacacgcccgggggauacugccucacccgcuggaugcugauugaagccgagcugaaauguuucggcaacacagcuguggccaagugcaaugagaaacaugaugaagaguuuugcgacaugcucagacuguucgauuuuuguaagcaggcuauccagcggcuuaaagccccugcgcagaugucuauucaacugaucaacaaggccgugaaugcucucaucaacgaccagcugauuaugaagaaucaccuucgcgacaucauggggauucccuauugcaacuacagcaaauauugguaccugaauaacaccgccacaggaaagaccucccucccuaaauguuggcugaucagcaauggcucuuaccugaacgaaacgcacuucuccgaugacauugagcaggaagcugauaauaugaucacagagaugcuccaaaaggaguauauggaaagacaggggaaaaccccgcugggacuugucgaccuguucguuuuuagcaccucuuucuaccucaucagcauuuuucugcaucuggugaagauccccacacaccggcauauugugggcaaauccugcccuaagccccaccgccuuaaccauaugggcaucuguucuugcgggcucuauaagcagccuggaguccccgugagauggaaacggugaggacuagucccuguucccagagcccacuuuuuuuucuuuuuuugaaauaaaauagccugucuuucagaucucaaaggcucuuuucagagccaccaaaaaaaaaaaaaaaaaaaaaaaaaaaaaaaaaaaaaaaaaaaaaaaaaaaaaaaaaaaaaaaaagaauu

SEQ ID NO: 23613 - RNA, 1736 nt, Artificial Sequence
  mRNA product Design a-2 (hSL-A64-N5) comprising derived and/or modified sequence from LASV(G3010-SLE-2013;Clade IV)__AIT17344__GPCmut2 (opt5)
aggagaguccgcucagccagguugcagaagcggcuuagcguguguccuaaucuucucucugcguguagguaggccugugccgcaaacaagcuuaccaugggccagaucgugaccuucuuucaagaggucccccacguuauugaagaggugaugaacaucgugcugauugcccucagcauccuggcuguccuuaaggggcuguacaauuucgccacaugcggacucgugggccugguuacguuucuucugcucugugggagauccugcaccacaucucuguauaaaggaguguacgaacugcagacccucgagcugaacauggaaacacuuaauauguguaugccucugagcugcaccaagaacaauucccaucacuauauuauggucggcaacgagacagggcucgagcugacccuuacgaauaccucuaucaucaaccauaaauucuguaaucugagcgacgcgcacaagaaaaaccucuacaaucaugcucugauguccauuaucucuacauuucaccugagcauuccgaacuucaaucaguaugaagccauguccugcgauuuuaacggaggcaagaucagcgugcaguacaaucucucucacuccuaugccggcgacgcugccagccauugugggaccguugcuaacggagugcugcaaacauucaugcggauggccuggggcgggucuuacauugcgcuugauuccggauacggcaagugggacugcaucaugaccagcuaucaguaccugauuauccagaacacgacaugggaggaucacugucaguuuucucgccccuccccuaucggguaucucggacugcuuagccaaagaacccgggacauuuacaucucccgcagacggcgcggcacauucaccuggacccugucugauagcgaaggcaaagacacacccgggggauauugccucacgagauggaugcugauugaggccgagcugaaguguuuuggcaauaccgcugucgccaaaugcaacgaaaagcaugaugaggaguucugcgacaugcuccggcuguuugauuucuguaaacaggcuauccagcgccuuaagaccccugcccagauguccauucaacugaucaauaaggcggugaacgcccucaucaaugaccagcugauuaugaaaaaccaccuuagagauaucauggggauucccuacugcaauuauagcaaguacugguaccugaaccacacaacaaccggaaaaacgucucucccuaaguguuggcugguguccaauggcagcuaucugaacgaaacacauuucucugacgacaucgaacagcaagcugauaauaugauuaccgagaugcuccagaaagaguacauggaacggcaggggaagaccccgcugggacuugucgaccuguuuguuuucagcacauccuuuuaucucaucucuaucuuccugcaccuggugaaaauucccacccaucgccacaucgugggcaagagcugcccuaagccccauagacuuaaccacaugggcauuuguuccugcgggcucuacaaacagccuggaguccccgugcgguggaagcgcugaggacuagucccuguucccagagcccacuuuuuuuucuuuuuuugaaauaaaauagccugucuuucagaucucaaaggcucuuuucagagccaccaaaaaaaaaaaaaaaaaaaaaaaaaaaaaaaaaaaaaaaaaaaaaaaaaaaaaaaaaaaaaaaaagaauu

SEQ ID NO: 23614 - RNA, 1736 nt, Artificial Sequence
  mRNA product Design a-2 (hSL-A64-N5) comprising derived and/or modified sequence from LASV(G502-SLE-2009;Clade IV)__AIT17126__GPCmut2 (opt5)
aggagaguccgcucagccagguugcagaagcggcuuagcguguguccuaaucuucucucugcguguagguaggccugugccgcaaacaagcuuaccaugggccagaucgugaccuucuuucaagaggucccccacguuauugaagaggugaugaacaucgugcugauugcccucagcauccuggcuguccuuaaggggcuguacaauuucgccacaugcggacucgugggccugcuuacguuucugcuccugugugggagauccugcaccacaggacuguauaaaggcguuuacgaacuccagacccuggagcuuaacauggaaacacugaauauguguaugccucucucuugcaccaagaacaauagccaucacuauauuaugguggggaacgagacaggacuggagcuuacccugacgaauaccuccaucaucaaccauaaauucuguaaucucucugacgcgcacaagaaaaaccuguacgaucaugcucugaugagcauuaucuccacauuucaccucucuauuccgaauuucaaccaguaugaagccaugagcugcgacuuuaauggcggcaagaucuccguccaguacaaccugagccacucuuaugccggggaugcugccgaccauuguggaaccguggcuaauggcguucuucaaacauucaugcggauggccuggggaggguccuacauugcgcuggauagcggccgcgggagaugggacugcaucaugaccucuuaccaguaucucauuauccagaacacgacaugggaggaucacugucaguuuucccggcccagcccuaucggauaccugggccuucugucucaacgcaccagagacauuuauaucucccggcgcagacggggcacauucaccuggacccucagcgauuccgaagggaaggacacacccggaggcuacugccugacgcgcuggaugcugauugaggccgagcucaaauguuuugggaacaccgcuguggccaagugcaaugaaaaacaugaugaggaguucugcgacaugcugagacuuuuugauuucuguaagcaggcuauccagcggcugaaagccccugcgcagaugucuauucaacucaucaacaaggccgucaaugcucugaucaacgaccagcuugugaugaagaaucaucugcgcgacauuaugggaauccccuauugcaacuacagcagauauugguaccucaaucacacaaccacaggccggaccucccugccuaaauguuggcuggugagcaacgggucuuaccucaaugaaacgcacuucuccgaugacauugaacagcaagccgauaacaugaucacagagaugcugcagaaggaguauauggaacgccagggaaaaaccccgcuuggccuggucgaccucuuuguuuucagcaccucuuuuuaccugauuagcaucuuccugcaccuugugaagauccccacacauagacacauugugggcaaauccugcccuaagccccaucggcucaaucacauggggaucuguucuugcggacuguauaaacagccuggcguccccgugaaguggaagagaugaggacuagucccuguucccagagcccacuuuuuuuucuuuuuuugaaauaaaauagccugucuuucagaucucaaaggcucuuuucagagccaccaaaaaaaaaaaaaaaaaaaaaaaaaaaaaaaaaaaaaaaaaaaaaaaaaaaaaaaaaaaaaaaaagaauu

SEQ ID NO: 23615 - RNA, 1736 nt, Artificial Sequence
  mRNA product Design a-2 (hSL-A64-N5) comprising derived and/or modified sequence from LASV(G733-SLE-2010;Clade IV)__AIT17154__GPCmut2 (opt5)
aggagaguccgcucagccagguugcagaagcggcuuagcguguguccuaaucuucucucugcguguagguaggccugugccgcaaacaagcuuaccaugggccagaucgugaccuucuuucaagaggucccccacguuauugaagaggugaugaacaucgugcugauugcccucagcauccuggcuguccuuaaggggcuguacaauuucgccacaugcggaauugugggccucguuuccuuucugcuucugugugggagaucuugcacgaccagccucuauaaaggaguguacgaacugcagacacuggagcucaacauggaaacccugaauauguguaugccucuuuccugcacaaagaacaauucucaucacuauaucauggucggcaacgagaccgggcuggagcucacacugaccaauacgagcaucauuaaccauaaauucuguaaucuuuccgacgcgcacaagaaaaaccuguacgaucaugcucucaugucuaucauuagcaccuuucaccuguccaucccgaauuucaaccaguaugaagccaugagcugcgacuuuaauggaggcaagauuucugugcaguacaaccugucccacagcuaugccggcgaugcugccaaucauugugggacaaucgcuaacggaguucuccaaaccuucaugcggauggccuggggcgggucuuacauugcgcuggacuccggacgcgauagaugggacugcaucaugacaagcuaccaguaucuuaucauucagaacaccacgugggaggaucacugucaguuuucucggcccuccccuaucggcuaccuggggcuccugagccaacgcacaagagacauuuauaucucccggcgcagacggggaaccuucacauggacccuuucugauagcgaaggcaaggacacccccggcggguacugccugacacgcuggaugcucauugaggccgagcugaaauguuuuggaaauacggcuguggccaagugcaacgaaaaacaugaugaggaguucugcgacaugcugagacucuuugauuucuguaagcaggcuauccagcggcugaaagccccugcgcagauguccauccaacuuauuaauaaggccgucaacgcucugaucaaugaccagcucauuaugaagaaccaucugcgcgacaucaugggcauucccuauugcaauuacagcaaauauugguaccuuaaccacaccacaaccgggaagacaucucugccuaaauguuggcucguguccaauggaagcuaccugaacgaaacccacuucucugaugacaucgaacagcaagccgauaauaugaucacggagaugcugcagaaggaguauauggaaagacagggcaaaacaccgcucgggcugguggaccuuuuugucuucagcaccuccuuuuaccugauuucuaucuuccuccaccugguuaagauucccacccaucggcacguggugggaaaaagcugcccuaagccccaucgccugaaccacaugggcaucuguuccugcggccuuuaugggcagccuggaguccccgugaaguggaaaagaugaggacuagucccuguucccagagcccacuuuuuuuucuuuuuuugaaauaaaauagccugucuuucagaucucaaaggcucuuuucagagccaccaaaaaaaaaaaaaaaaaaaaaaaaaaaaaaaaaaaaaaaaaaaaaaaaaaaaaaaaaaaaaaaaagaauu

SEQ ID NO: 23616 - RNA, 1736 nt, Artificial Sequence
  mRNA product Design a-2 (hSL-A64-N5) comprising derived and/or modified sequence from MOPV/LASV reassortant(IGS-1;Clade IV)__AFY05576__GPCmut2 (opt5)
aggagaguccgcucagccagguugcagaagcggcuuagcguguguccuaaucuucucucugcguguagguaggccugugccgcaaacaagcuuaccaugggccagaucgugaccuucuuucaagaggucccccacguuauugaagaggugaugaacaucgugcugauugcccucagcguccuggcugugcuuaaggggcuguacaauuucgccacaugcggacucguuggccuggugacguuucuucugcucugugggagauccugcaccacaucucuguauaaaggagucuacgaacugcagacccucgagcugaacauggaaacacuuaauauguguaugccucugagcugcaccaagaacaauucccaucacuauaucauggugggcaacgagacagggcucgagcugacccuuacgaauaccucuauuaucaaccauaaauucuguaaucugagcgacgcgcacaagaaaaaccucuacgaucaugcucugauguccaucauuucuacauuucaccugagcaucccgaauuucaaccaguaugaagccauguccugcgacuuuaauggaggcaagauuagcguucaguacaaccucucucacuccuaugccggcgaugcugccaaucauugugggaccguggcuaacggaguccugcaaacauucaugcggauggccuggggcgggagcuacaucgcgcuugacucuggacgcggcaacugggauugcauuaugaccuccuaccaguaucugaucauucagaauacgacaugggaggaccacugucaguuuagcagacccucuccuaucggguaccucggacugcuuucccaacggacccgcgauaucuauauuagcagacggcgcagaggcacauucaccuggacccuguccgacucugaaggcgaggauacacccgggggauacugccucacgcgguggaugcugaucgaggccgaacugaaguguuuuggcaacaccgcuguggccaaaugcaaugagaagcaugacgaagaguucugcgauaugcuccgccuguuugacuucuguaaacaggcuauucagagacuuaaggccccugcgcagaugagcauccaacugauuaacaaagccgugaaugcucucaucaacgaucagcugaucaugaagaaucaccuucgggacauuauggggauccccuauugcaacuacuccaaguauugguaccugaaucacacaaccacaggacgcaccagccucccuaaauguuggcuggucucuaacggcuccuaccugaaugaaacgcauuucagcgacgauauugagcagcaagccgacaacaugaucacagagaugcuccagaaggaauauauggagagacaggggaaaaccccgcugggacuuguugaucuguuuguguucucuaccagcuuuuaccucauuuccaucuuccugcaccuggugaagauccccacacaucggcacauugucggcaaaucuugcccuaagccccaucgccuuaaucacaugggcaucuguagcugcgggcucuauaaacagccuggagugcccguuaaguggaagagaugaggacuagucccuguucccagagcccacuuuuuuuucuuuuuuugaaauaaaauagccugucuuucagaucucaaaggcucuuuucagagccaccaaaaaaaaaaaaaaaaaaaaaaaaaaaaaaaaaaaaaaaaaaaaaaaaaaaaaaaaaaaaaaaaagaauu

SEQ ID NO: 23617 - RNA, 1736 nt, Artificial Sequence
  mRNA product Design a-2 (hSL-A64-N5) comprising derived and/or modified sequence from LASV(LM765-SLE-2012;Clade IV)__AIT17814__GPCmut2 (opt5)
aggagaguccgcucagccagguugcagaagcggcuuagcguguguccuaaucuucucucugcguguagguaggccugugccgcaaacaagcuuaccaugggccagaucgugaccuucuuucaagaggucccccacguuauugaagaggugaugaacaucgugcugauugcccucagcauccuggcuguccuuaaggggcuguacaauuucgccacaugcggacucgugggccugguuacguuucuucugcucugugggagauccugcaccacaucucuguauaaaggaguguacgaacugcagacccucgagcugaacauggaaacacuuaauauguguaugccucugagcugcaccaagaacaauucccaucacuauauuauggucggcaacgagacagggcucgagcugacccuuacgaauaccucuaucaucgaccauaaauucuguaaccugagcgaugcgcaccggaagaaucucuacgaccaugcucugauguccauuaucucuacauuucaccugagcauuccgaacuucaaucaguaugaagccauguccugcgauuuuaacggaggcaaaaucagcgugcaguacaaucucucucacuccuaugccaaggacgcugccgaucauuguggcaccguugcuaacggggugcugcaaacauucaugcgcauggccuggggaggcagcuacauugcgcuugacucugggagaggacggugggauugcaucaugaccuccuaccaguaucugauuauccagaauacgacaugggaggaccacugucaguuuagccgccccucuccuaucggcuaccucgggcugcuuucccaaagaacccgggauauuuauaucagccgcagacggcgcggaacauucaccuggacccuguccgacucugaaggcaaggauacacccggcggguacugccucacgagauggaugcugauugaggccgagcugaaauguuuuggaaacaccgcugucgccaagugcaacgaaaaacaugacgaggaguucugcgauaugcuccggcuguuugacuucuguaagcaggcuauccagcgccuuaaagccccugcgcagaugagcauucaacugaucaauaaggccgugaacgcucucaucaaugaccagcugauuaugaagaaccaccuuagagauaucaugggcauucccuauugcaauuacuccaaauauugguaccugaaccacacaaccacagggaagaccagccucccuaaauguuggcuggugucuaauggauccuaccugaacgaaacgcauuucagcgacgauaucgaacagcaagccgacaauaugauuacagagaugcuccagaaggaguauauggaacggcagggcaaaaccccgcuggggcuugucgaucuguuuguuuucucuaccagcuuuuaccucaucuccaucuuccugcaccuggugaagauucccacacaucgccacaucgugggaaaaccuugccccaagccucauagacuuaaccacaugggcauuuguucuugcggccucuauaagcagcccggggucccggugaaauggaagcggugaggacuagucccuguucccagagcccacuuuuuuuucuuuuuuugaaauaaaauagccugucuuucagaucucaaaggcucuuuucagagccaccaaaaaaaaaaaaaaaaaaaaaaaaaaaaaaaaaaaaaaaaaaaaaaaaaaaaaaaaaaaaaaaaagaauu

SEQ ID NO: 23618 - RNA, 1736 nt, Artificial Sequence
  mRNA product Design a-2 (hSL-A64-N5) comprising derived and/or modified sequence from LASV(LM776-SLE-2012;Clade IV)__AIT17824__GPCmut2 (opt5)
aggagaguccgcucagccagguugcagaagcggcuuagcguguguccuaaucuucucucugcguguagguaggccugugccgcaaacaagcuuaccaugggccagaucgugaccuucuuucaagaggucccccacguuauugaagaggugaugaacaucgugcugauugcccucagcauccuggcuguccuuaaggggcuguacaauuucgccacaugcggacucgugggccugguuacguuucuucugcucugugggagauccugcaccacaucuguguauaaaggagucuacgaacugcagacccuggagcucaacauggaaacacugaauauguguaugccucuuagcugcaccaagaacaauucccaucacuauauuauggugggcaacgagacagggcuggagcucacccugacgaauaccucuaucaucaaccauaaauucuguaaucuuagcgacgcgcacaagaaaaaccuguacgaucaugcucucauguccauuaucucuacauuucaccugagcauuccgaauuucaaccaguaugaagccauguccugcgacuuuaauggaggcaagaucagcguucaguacaaccugucucacuccuaugccggcgaugcugccaaucauugugggaccguggcuaacggaguccuccaaacauucaugcggauggccuggggcgggagcuacauugcgcuggacucuggacacggcaagugggauugcaucaugaccuccuaccaguaucuuauuauccagaacacgacaugggaggaccauugucaguuuagccgccccucuccuaucggguaccugggacuccugucccaaagaacccgggauauuuauaucagccgcagacggcgcggcacauucaccuggacccuuuccgacucugaaggcaaagauacacccgggggauacugccugacgagauggaugcucauugaggccgagcugaaguguuuuggcaauaccgcuguggccaaaugcaacgaaaagcacgacgaggaguucugcgauaugcugcggcucuuugacuucuguaaacaggcuauccagcgccugaaggccccugcgcagaugagcauucaacuuaucaauaaggccgugaacgcucugaucaaugaucagcucauuaugaaaaaccaccugagagacaucauggggauucccuauugcaauuacuccaaguauugguaccuuaaccauacaaccacaggaaaaaccagccugccuaaguguuggcucgucucuaauggcuccuaccugaacgaaacgcacuucagcgacgauaucgaacagcaagccgacaauaugauuacagagaugcugcagaaagaguauauggaacggcaggggaagaccccgcucggacugguugaucuuuuuguguucucuaccagcuuuuaccugaucuccaucuuccuccaucuggugaaaauucccacacaccgccauaucgucggcaagucuugcccuaagccccacagacugaaccacaugggcauuuguagcugcgggcuuuauaaacagccuggagugcccguucgguggaagcgcugaggacuagucccuguucccagagcccacuuuuuuuucuuuuuuugaaauaaaauagccugucuuucagaucucaaaggcucuuuucagagccaccaaaaaaaaaaaaaaaaaaaaaaaaaaaaaaaaaaaaaaaaaaaaaaaaaaaaaaaaaaaaaaaaagaauu

SEQ ID NO: 23619 - RNA, 1736 nt, Artificial Sequence
  mRNA product Design a-2 (hSL-A64-N5) comprising derived and/or modified sequence from LASV(Mad39;Clade IV)__ANH09722__GPCmut2 (opt5)
aggagaguccgcucagccagguugcagaagcggcuuagcguguguccuaaucuucucucugcguguagguaggccugugccgcaaacaagcuuaccaugggccagaucgugaccuucuuucaagaggucccccacguuauugaagaggugaugaacaucgugcugauugcccucagcauccuggcuguccuuaaggggcuguacaauguggccacaugcggacucauuggccugguuacguuccuucugcucugugggagauccugcaccacaacccuguauaaaggaguguacgaacugcaggcgcucgagcugaacauggaaacacuuaauauguguaugccucugucuugcaccaagaacaauagccaucacuauauccgggucggcaacgagacagggcucgagcugacccuuacgaauaccucccugaucaaccauaaauuuuguaaucucucugacgcucacaagaaaaaccuguacgaucaugcccugaugagcauuaucuccacauuccaccucucuauuccgaauuuuaaccaguaugaagccaugagcugcgacuucaaugauggaaagaucuccgugcaguacaaccugagccacaccuaugcuggcgacacagccaaucauuguggcaccguugcuaacggggugcuucaaacguuuaugcgcauggccuggggaggcucuuacauugcgcuggauuccgggagaggaggcugggacugcaucaugacaagcuaccaguaucucauuauccagaacaccacaugggaggaucacugucaguucucucggcccuccccuaucggguaccugggacuucugagccaacgcaccagagacauuuauaucucucggcgcagacggggcaccuuuacauggacgcucuccgauagcgaaggcaaggacacccccgggggauacugccugacacgcuggaugcugauugaggccgagcucaaauguuucggcaauaccgcugucgccaagugcaacgaaaaacaugaugaggaauuuugcgacaugcugagacuuuucgauuuuuguaagcaggcuauccagcggcugaaagccccugcgcagauguccauucaacucaucaauaaggccgugaacgcucugaucaaugaccagcuuauuaugaagaaccaucugcgcgacaucauggggauucccuauugcaauuacucuaaauauugguaccucaaccacacagugaccggaaagacgagccugccuaaauguuggcuggucuccaauggcagcuaccucaacgagacacacuucucugaugacaucgaacagcaagccgauaauaugauuaccgagaugcugcagaaggaguauauggaaagacaggggaaaaccccgcuuggacugguugaccucuucguguuuuccaccagcuucuaccugaucucuaucuuucugcaccuugugaagauucccacacaucggcacgucgugggcaaaccuugccccaagccucaucgccucaaccacaugggcaucuguagcugcggguucuauaagcagcccggaguuccggugagauggaaacggugaggacuagucccuguucccagagcccacuuuuuuuucuuuuuuugaaauaaaauagccugucuuucagaucucaaaggcucuuuucagagccaccaaaaaaaaaaaaaaaaaaaaaaaaaaaaaaaaaaaaaaaaaaaaaaaaaaaaaaaaaaaaaaaaagaauu

SEQ ID NO: 23620 - RNA, 1736 nt, Artificial Sequence
  mRNA product Design a-2 (hSL-A64-N5) comprising derived and/or modified sequence from LASV(Z0947-SLE-2011;Clade IV)__AIT17840__GPCmut2 (opt5)
aggagaguccgcucagccagguugcagaagcggcuuagcguguguccuaaucuucucucugcguguagguaggccugugccgcaaacaagcuuaccaugggccagaucgugaccuucuuucaagaggucccccacguuauugaagaggugaugaacaucgugcugauugcccucagcauccuggcuguccuuaaggggcuguacaauuucgccacaugcggacucgugggccugguuacguuucuucugcucugugggagauccugcaccauuucucuguauaaaggaguguacgaacugcagacacucgagcugaacauggaaacccuuaauauguguaugccucugagcugcacaaagaacaauucccaucacuauaucauggucggcaacgagaccgggcucgagcugacacuuaccaauacgucuaucauuaaccauaaauucuguaaucugagcgacgcgcacaagaaaaaccucuacgaucaugcucugauguccaucauuucuaccuuucaccugagcaucccgaauuucaaccaguaugaagccauguccugcgacuuuaauggaggcaagauuagcgugcaguacaaccucucucacuccuaugccggcgaugcugccaaucauugugggacaguugcuaacggagugcugcaaaccuucaugcggauggccuggggcgggagcuacaucgcgcuugacucuggacgcgauagaugggacugcauuaugacauccuaccaguaucugaucauccagaacaccacgugggaggaucacugucaguuuagccggcccucuccuauuggcuaccucgggcugcuuucccaacgcacaagagacaucuauauuagccggcgcagacggggaaccuucacauggacccuguccgauucugaaggcaaggacacccccggcggguacugccucacacgcuggaugcugaucgaggccgagcugaaauguuuuggaaauacggcugucgccaagugcaacgaaaaacaugaugaggaguucugcgacaugcucagacuguuugauuucuguaagcaggcuauucagcggcuuaaagccccugcgcagaugagcauccaacugaucaauaaggccgugaacgcucucauuaaugaccagcugaucaugaagaaccaccuucgcgacauuaugggcauccccuauugcaauuacuccaaauauugguaccugaaccacaccacaaccgggaagacaagccucccuaaauguuggcuggugucuaauggauccuaccugaacgaaacccauuucagcgaugacauugaacagcaagccgauaauaugaucacggagaugcuccagaaggaguauauggaaagacagggcaaaacaccgcuggggcuugucgaccuguuuguuuucucuaccagcuuuuaccucaucuccauuuuccugcaccuggugaagauccccacccaucggcacauugugggaaaaccuugccccaagccucaucgccuuaaccacaugggcaucuguucuugcggccucuauaagcagcccggggucccggugaaauggaagagaugaggacuagucccuguucccagagcccacuuuuuuuucuuuuuuugaaauaaaauagccugucuuucagaucucaaaggcucuuuucagagccaccaaaaaaaaaaaaaaaaaaaaaaaaaaaaaaaaaaaaaaaaaaaaaaaaaaaaaaaaaaaaaaaaagaauu

SEQ ID NO: 23621 - RNA, 1767 nt, Artificial Sequence
  mRNA product Design a-2 (hSL-A100) comprising derived and/or modified sequence from LASV(Josiah;Clade IV)__NP_694870__GPCmut2 (opt1)
aggagaguccgcucagccagguugcagaagcggcuuagcguguguccuaaucuucucucugcguguagguaggccugugccgcaaacaagcuuaccaugggccagaucgugaccuucuuccaggaggucccccacgugaucgaggaggugaugaacaucguccugaucgcccucagcgugcuggccgugcugaaggggcucuacaacuucgcgaccugcggccuggucgggcuggugacguuccuccugcugugcggccgcuccugcaccaccagccucuacaaggggguguacgagcugcagacccuggagcucaacauggagacgcugaacaugugcaugccgcuguccugcaccaagaacaacagccaccacuacaucauggucggcaacgagaccggccucgagcugacgcugaccaacaccuccaucaucaaccacaaguucugcaaccucagcgacgcccacaagaagaaccuguacgaccacgcccugauguccaucaucagcaccuuccaccucuccauccccaacuucaaccaguacgaggccaugagcugcgacuucaacgggggcaagaucuccgugcaguacaaccugagccacuccuacgccggggacgcggccaaccacugcggcacgguggccaacgggguccugcagaccuucaugcggauggccuggggcggcagcuacaucgcgcucgacuccgggcgcggcaacugggacugcaucaugaccagcuaccaguaccugaucauccagaacaccacgugggaggaccacugccaguucucccggcccagccccaucggguaccugggccuccugucccagcgcacccgggacaucuacaucagccgccggcgccggggcaccuucaccuggacgcugagcgacuccgaggggaaggacaccccgggcggguacugccugacccgcuggaugcucaucgaggccgagcugaagugcuucggcaacaccgccguggccaagugcaacgagaagcacgacgaggaguucugcgacaugcugcggcuguucgacuucugcaagcaggccauccagcgccugaaggcgcccgcccagaugagcauccagcugaucaacaaggccgugaacgcccucaucaacgaccagcugaucaugaagaaccaccuccgggacaucauggggauccccuacugcaacuacuccaaguacugguaccucaaccacacgaccaccggccgcaccagccugcccaagugcuggcuggucuccaacggcagcuaccucaacgagacgcacuucuccgacgacaucgagcagcaggccgacaacaugaucaccgagaugcugcagaaggaguacauggagcggcaggggaagacgccccugggccucguggaccuguucguguucagcaccuccuucuaccugaucagcaucuuccugcaccucgucaagaucccgacccaccgccacaucguggggaaguccugccccaagccccaccggcugaaccacaugggcaucugcagcugcgggcuguacaagcagcccggcgugccggucaaguggaagcgcugaggacuagucccuguucccagagcccacuuuuuuuucuuuuuuugaaauaaaauagccugucuuucagaucucaaaggcucuuuucagagccaccaaaaaaaaaaaaaaaaaaaaaaaaaaaaaaaaaaaaaaaaaaaaaaaaaaaaaaaaaaaaaaaaaaaaaaaaaaaaaaaaaaaaaaaaaaaaaaaaaaaaa

SEQ ID NO: 23622 - RNA, 1764 nt, Artificial Sequence
  mRNA product Design a-2 (hSL-A100) comprising derived and/or modified sequence from LASV(LP;Clade I)__AAF86701__GPCmut2 (opt1)
aggagaguccgcucagccagguugcagaagcggcuuagcguguguccuaaucuucucucugcguguagguaggccugugccgcaaacaagcuuaccaugggccagaucaucaccuucuuccaggaggugccccacgucaucgaggaggugaugaacaucgugcugaucgcccucagccugcuggccauccucaaggggcuguacaacaucgcgaccugcggcaucaucgggcuggucgccuuccucuuccugugcggcaaguccugcagccugacgcucaagggcggguacgagcugcagacccuggagcucaacauggagacccugaacaugugcaugccgcuguccugcacgaagaacagcucccaccacuacauccgcgugggcaacgagaccgggcucgagcugacccugaccaacacgagcaucaucaaccacaaguucugcaaccucuccgacgcccacaagaagaaccuguacgaccacgcccugaugagcaucaucuccaccuuccaccucagcauccccaacuucaaccaguacgaggccauguccugcgacuucaacggcgggaagaucagcgugcaguacaaccugucccacagcuacgcgggcgacgccgccgagcacugcgggaccgucgccaacggcgugcugcagaccuucaugcggauggcguggggcgggcgcuacaucgcccucgacuccggcaaggggaacugggacugcaucaugacgagcuaccaguaccugaucauccagaacaccaccugggaggaccacugccaguucucccggcccagccccaucggcuaccugggccuccugucccagcgcacccgggacaucuacaucagccgccggcgccgggggacguucaccuggacccugagcgacuccgagggcaacgagacccccgggggcuacugccugacgcgcuggaugcucaucgaggccgagcugaagugcuucgggaacaccgccguggccaagugcaacgagaagcacgacgaggaguucugcgacaugcugcggcuguucgacuucugcaagcaggcgauccgccggcugaaggcccccgcccagaugagcauccagcugaucaacaaggccgucaacgcccucaucaacgaccagcugaucaugaagaaccaccuccgcgacaucaugggcauccccuacugcaacuacuccaaguacugguaccucaaccacaccagcuccggccggaccagccugcccaagugcuggcugaucuccaacgggagcuaccucaacgagacgcaguucuccgacgacaucgagcagcaggcggacaacaugaucaccgagaugcugcagaaggaguacaucgagcgccagggcaagaccccgcuggggcucguggacaucuucaucuucagcaccuccuucuaccugaucagcaucuuccugcaccugaucaagaucccgacgcaccggcacaucgugggcaagcccugccccaagccccaccgccucaaccacaugggggucugcuccugcggccuguacaagcacccgggcgugcccaccaaguggaagcggugaggacuagucccuguucccagagcccacuuuuuuuucuuuuuuugaaauaaaauagccugucuuucagaucucaaaggcucuuuucagagccaccaaaaaaaaaaaaaaaaaaaaaaaaaaaaaaaaaaaaaaaaaaaaaaaaaaaaaaaaaaaaaaaaaaaaaaaaaaaaaaaaaaaaaaaaaaaaaaaaaaaaa

SEQ ID NO: 23623 - RNA, 1764 nt, Artificial Sequence
  mRNA product Design a-2 (hSL-A100) comprising derived and/or modified sequence from LASV(803213;Clade II)__AAF86703__GPCmut2 (opt1)
aggagaguccgcucagccagguugcagaagcggcuuagcguguguccuaaucuucucucugcguguagguaggccugugccgcaaacaagcuuaccaugggccagaucaucaccuucuuccaggaggugccccacgucaucgaggaggugaugaacaucgugcugaucgcccucagccugcuggccauccucaaggggaucuacaacgucgcgaccugcggccuguucgggcugaucuccuuccuccugcugugcggccgcagcugcuccgugacguacaaggggguguacgagcuccagacccuggagcugaacauggccaaccucaacaugugcaugccgcugagcugcaccaagaacaacucccaccacuacaucauggucggcaacgagacgggccuggagcucacccugaccaacaccagcaucaucaaccacaaguucugcaaccuguccgacgcccacaagaagaaccucuacgaccacgcccugaugagcaucaucuccacguuccaccugagcauccccaacuucaaccaguacgaggccauguccugcgacuucaacgggggcaagaucagcgugcaguacaaccucucccacagcuucgcgguggacgccgccaaccacugcgggaccaucgccaacggcguccugcagaccuucaugcggauggcguggggcggguccuacaucgcccuggacagcggcaaggggaacugggacugcaucaugaccuccuaccaguaccucaucauccagaacacgaccugggaggaccacugccaguucagccgccccucccccaucggcuaccuggggcugcucagccagcggacccgcgacaucuacaucagccggcgccgccggggcaccuucacguggacccucuccgacagcgagggcaacgaggcccccgggggcuacugccugacccgguggaugcugaucgaggccgagcucaagugcuucgggaacaccgccguggcgaagugcaacgagaagcacgacgaggaguucugcgacaugcugcgccuguucgacuucugcaagcaggccaucaagcggcucaagacgcccgcccagauguccauccagcugaucaacaaggccgugaacgcccugaucaacgaccagcucaucaugaagaaccaccuccgcgacaucaugggcauccccuacugcaacuacagccgguacugguaccugaaccacaccgucaccgggaagaccucccugccccgcugcuggcuggugagcaacggcuccuaccugaacgagacgcacuucagcgacgacaucgagcagcaggcggacaacaugaucaccgagaugcuccagaaggaguacauggaccggcagggcaagaccccgcuggggcugguggaccucuucgucuucuccaccagcuucuaccugaucuccaucuuccugcaccuggugaagaucccgacgcaccgccacaucgugggcaagcccugccccaagccccaccggcucaaccacauggggaucugcagcugcggccuguacaagcacccggggguccccgugaaguggaagcgcugaggacuagucccuguucccagagcccacuuuuuuuucuuuuuuugaaauaaaauagccugucuuucagaucucaaaggcucuuuucagagccaccaaaaaaaaaaaaaaaaaaaaaaaaaaaaaaaaaaaaaaaaaaaaaaaaaaaaaaaaaaaaaaaaaaaaaaaaaaaaaaaaaaaaaaaaaaaaaaaaaaaaa

SEQ ID NO: 23624 - RNA, 1764 nt, Artificial Sequence
  mRNA product Design a-2 (hSL-A100) comprising derived and/or modified sequence from LASV(GA391;Clade III)__CAA36645__GPCmut2 (opt1)
aggagaguccgcucagccagguugcagaagcggcuuagcguguguccuaaucuucucucugcguguagguaggccugugccgcaaacaagcuuaccaugggccagaucgugaccuucuuccaggaggucccccacgugaucgaggaggugaugaacaucguccugaucgcccucagcauccuggccauccugaaggggcucuacaacguggcgaccugcggccugaucgggcuggugacguuccuccugcuguccggccgcagcugcucccucaucuacaaggggaccuacgagcugcagacccuggagcucaacauggagacccugaacaugugcaugccgcugagcugcaccaagaacaacucccaccacuacauccgggucggcaacgagaccggccucgagcugacccugacgaacaccagcauccucaaccacaaguucugcaaccuguccgacgcccacaagcgcaaccuguacgaccacagccucauguccaucaucagcaccuuccaccuguccauccccaacuucaaccaguacgaggccaugagcugcgacuucaacgggggcaagaucaccgugcaguacaaccugucccacagcuucgccguggacgccgcggggcacugcggcacgcucgccaacgggguccugcagaccuucaugcggauggccuggggcggcuccuacaucgcccuggacagcgggcgcggcaacugggacugcaucaugaccuccuaccaguaccucaucauccagaacaccacgugggacgaccacugccaguucagccggcccucccccaucggguaccugggccugcucagccagcgcacccgggacaucuacaucagccgccggcgccggggcaccuucaccuggacgcucuccgacagcgaggggaacgagaccccgggcggguacugccugacccgcuggaugcugaucgaggcggagcucaagugcuucggcaacaccgccguggccaagugcaacgagaagcacgacgaggaguucugcgacaugcugcggcuguucgacuucugcaagcaggccauccgccggcucaagacgcccgcccagauguccauccagcugaucaacaaggcggugaacgcccugaucaacgaccagcucaucaugaagaaccaccuccgcgacaucauggggauccccuacugcaacuacagccgguacugguaccugaaccacaccuccaccggcaagaccagccugccccgcugcuggcugaucuccaacggcagcuaccugaacgagacgaaguucuccgacgacaucgagcagcaggccgacaacaugaucaccgagaugcuccagaaggaguacaucgaccggcaggggaagacgccccugggccuggucgaccuguucguguucagcaccuccuucuaccucaucagcaucuuccugcaccuggugaagaucccgacccaccgccacaucgucgggaagcccugccccaagccccaccggcucaaccacaugggcaucugcuccugcgggcuguacaagcagccgggcgugcccgugcgcuggaagcggugaggacuagucccuguucccagagcccacuuuuuuuucuuuuuuugaaauaaaauagccugucuuucagaucucaaaggcucuuuucagagccaccaaaaaaaaaaaaaaaaaaaaaaaaaaaaaaaaaaaaaaaaaaaaaaaaaaaaaaaaaaaaaaaaaaaaaaaaaaaaaaaaaaaaaaaaaaaaaaaaaaaaa

SEQ ID NO: 23625 - RNA, 1767 nt, Artificial Sequence
  mRNA product Design a-2 (hSL-A100) comprising derived and/or modified sequence from LASV(AV;Clade V)__CCA30314__GPCmut2 (opt1)
aggagaguccgcucagccagguugcagaagcggcuuagcguguguccuaaucuucucucugcguguagguaggccugugccgcaaacaagcuuaccaugggccagaucgugaccuucuuccaggaggucccccacgugaucgaggaggugaugaacaucguccugaucgcccucagcauccuggccgugcugaaggggcucuacaacaucgcgaccugcggccugaucgggcugaucacguuccuccugcugugcggccgcuccugcagcuccaaccucuacaaggggguguacgagcugcagagccuggaccucaacauggagacccugaacaugugcaugccgcuguccugcaccaagaacaacagccaccacuacauccgggucggcaacgacacgggccucgagcugacccugaccaacaccuccauccucaaccacaaguucugcaaccugagcgacgcccacaagaaggaccuguacgaccacgcccucauguccaucaucagcacguuccaccuguccauccccaacuucaaccaguacgaggccaugagcugcgacuucaacgggggcaagaucuccgugcaguacaaccugagccacuccuacgccaucgacgcggccaaccacugcgggaccguggccaacggcauccuccagaccuucaugcgcauggccuggggcgggagcuacaucgcgcuggacuccggccgggggaacugggacugcaucaugaccagcuaccaguaccugaucauccagaacacgaccugggagaaccacugccaguucucccgccccagccccaucggcuaccucgggcugcugagccagcggacccgcgacaucuacaucucccggcgccgccggggcaccuucacguggacccugagcgacuccgagggcaacgccacccccgggggcuacugccucacccgguggaugcugaucgaggccgagcugaagugcuucgggaacacggccgucgccaagugcaacgagaagcacgacgaggaguucugcgacaugcuccgccuguucgacuucugcaagcaggcgaucagccggcugaagucccccgcccagaugagcauccagcucaucaacaaggccgugaacgcccugaucaacgaccagcugaucaugaagaaccaccuccgcgacaucaugggcauccccuacugcaacuacuccaaguacugguaccugaaccacaccaucaccgggaagaccagccugcccaagugcuggcucguguccaacggcagcuaccugaacgagacgcacuucuccgacgacaucgagcagcaggccgacaacaugaucaccgagaugcugcagaaggaguacauggagcggcagggcaagaccccgcucgggcuggucgaccuguucguguucagcaccuccuucuaccugaucagcaucuuccuccgccuggugaagaucccgacgcaccggcacaucgucggcaagcccugccccaagccccaccgccugaaccacauggggaucugcuccugcggccucuacaagcagccgggggugcccgugcgguggaagcgcugaggacuagucccuguucccagagcccacuuuuuuuucuuuuuuugaaauaaaauagccugucuuucagaucucaaaggcucuuuucagagccaccaaaaaaaaaaaaaaaaaaaaaaaaaaaaaaaaaaaaaaaaaaaaaaaaaaaaaaaaaaaaaaaaaaaaaaaaaaaaaaaaaaaaaaaaaaaaaaaaaaaaa

SEQ ID NO: 23626 - RNA, 1764 nt, Artificial Sequence
  mRNA product Design a-2 (hSL-A100) comprising derived and/or modified sequence from LASV(Togo/2016/7082;Clade VI)__AMR44577__GPCmut2 (opt1)
aggagaguccgcucagccagguugcagaagcggcuuagcguguguccuaaucuucucucugcguguagguaggccugugccgcaaacaagcuuaccaugggccagaucaucaccuucuuccaggaggugccccacgucaucgaggaggugaugaacaucgugcugaucgcccucagccugcuggccauccucaagggggucuacaacguggcgaccugcggcaucaucgggcuggugacguuccuguuccucugcggccgcuccugcagccugaucuacaagggguccuacgagcugcagacccucgagcugaacauggagacccugaacaugugcaugccgcucagcugcacgaagaacuccagccaccacuacauccgggucggcaacgagaccggccuggagcugacccucaccaacacguccaucaucaaccacaaguucugcaaccugagcgacgcccacaagcgcaaccuguacgaccacgcccucauguccauccugagcaccuuccaccuguccauccccaacuucaaccaguacgaggccaugagcugcgacuucaacgggggcaagaucuccgugcaguacaaccucagccacgccuacgcgguggacgccgccgagcacugcgggaccgucgccaacggcgugcugcagaccuucaugcggauggcguggggcggguccuacaucgcccuggacagcggccgcgggaacugggacugcaucaugacguccuaccaguaccucaucauccagaacaccaccugggaggaccacugccaguucagccggcccucccccaucggcuaccuggggcugcucagccagcgcacccgggacaucuacaucagccgccggcgccggggcacguucaccuggacccucuccgacagcgagggcaacgagacccccgggggcuacugccugacgcgcuggaugcugaucgaggccgagcucaagugcuucgggaacaccgccguggccaagugcaacgagaagcacgacgaggaguucugcgacaugcugcggcuguucgacuucugcaagcaggcgauccagcgccucaagucccccgcccagaugagcauccagcugaucaacaaggccgucaacgcccugaucaacgaccagcucaucaugaagaaccaccuccgggacaugaugggcauccccuacugcaacuacuccaaguacugguaccugaaccacaccagcuccgggcgcaccagccugcccaagugcuggcugguguccaacggcagcuaccugaacgagacgcacuucuccgacgacaucgagcagcaggccgacaacaugaucaccgagaugcuccagaaggaguacaucgaccggcagggcaagaccccgcuggggcugguggaccucuucgucuucagcaccuccuucuaccugaucagcaucuuccugcaccugaucaagaucccgacgcaccgccacaucgugggcaagcccugccccaagccccaccggcucaaccacauggggaucugcuccugcggccuguacaagcagccgggggugcccacccgcuggaagcggugaggacuagucccuguucccagagcccacuuuuuuuucuuuuuuugaaauaaaauagccugucuuucagaucucaaaggcucuuuucagagccaccaaaaaaaaaaaaaaaaaaaaaaaaaaaaaaaaaaaaaaaaaaaaaaaaaaaaaaaaaaaaaaaaaaaaaaaaaaaaaaaaaaaaaaaaaaaaaaaaaaaaa

SEQ ID NO: 23627 - RNA, 1764 nt, Artificial Sequence
  mRNA product Design a-2 (hSL-A100) comprising derived and/or modified sequence from LASV(KAK-428;Clade n.d. (VII))__ANH09740__GPCmut2 (opt1)
aggagaguccgcucagccagguugcagaagcggcuuagcguguguccuaaucuucucucugcguguagguaggccugugccgcaaacaagcuuaccaugggccagaucgugaccuucuuccaggaggucccccacgugaucgaggaggugaugaacaucguccugaucgcccucagccugcuggccauccucaaggggcuguacaacuucgcgaccugcggcgugaucgggcugaucacguuccuccugcugugcggccgcuccugcagcgccaccuacaaggggcaguacgagcuccagacccuggagcugaacauggagucccucaacaugugcaugccgcugagcugcacgaagaacaacucccaccacuacauccgggccggcaacaacaccggccuggagcucacccugaccaacacgagcaucaucucccacaaguucugcaaccugagcgacgcccacaagaagaaccucuacgaccacacccugauguccaucaucaccaccuuccaccugagcauccccaacuucaaccaguacgaggccauguccugcgacuucaacgggggcaagaucagcauccaguacaaccucucccacagcuacgcgggggacgccgcccagcacugcggcacgguggccaacgggguccugcagaccuucaugcgcauggcguggggcggcuccuaccuggcccucgacagcgggcggcgcggcugggacugcaucaucuccagcuaccaguaccugaucauccagaacaccaccugggacgaccacugccaguucucccggcccagccccaucggguaccugggcuucgugagccagaagacgcgcgacaucuacaucucccggcgccgccggggcaccuucaccuggacccugagcgacuccgaggggcacgacaugccgggcggguacugccucacgcgguggaugcugaucgaggccgaccugaagugcuucggcaacaccgccguggccaagugcaacgagaagcacgacgaggaguucugcgacauguggcgccucuucgacuucugcaagcaggcgauccagcggcugaaggcccccgcccagaugaacauccagcugaucaacaaggccgucaacgcccucaucaacgaccagcugaugaugaagaaccaccuccgcgacaucauggggauccccuacugcaacuacagcaaguucugguaccugaacaacaccaccacgggccggaccucccugccccgcugcuggcugaucagcaacggcuccuaccucaacgagacccacuucagcgacgacaucgagcagcaggcggacaacaugaucaccgagaugcugcagaaggaguacauggaccggcaggggaagacgccccugggccucguggaccuguucguguucuccaccagcuucuaccugaucaccaucuuccuccaccuggucaagaucccgacccaccgccacaucguggggaagcccugccccaagccccaccggcugaaccacaugggcaucugcuccugcgggcuguacaagcagccgggcgugcccguccgcuggaagcggugaggacuagucccuguucccagagcccacuuuuuuuucuuuuuuugaaauaaaauagccugucuuucagaucucaaaggcucuuuucagagccaccaaaaaaaaaaaaaaaaaaaaaaaaaaaaaaaaaaaaaaaaaaaaaaaaaaaaaaaaaaaaaaaaaaaaaaaaaaaaaaaaaaaaaaaaaaaaaaaaaaaaa

SEQ ID NO: 23628 - RNA, 1764 nt, Artificial Sequence; identical to SEQ ID NO: 23622
  mRNA product Design a-2 (hSL-A100) comprising derived and/or modified sequence from LASV(Pinneo-NIG-1969;Clade I)__AIT17836__GPCmut2 (opt1)

SEQ ID NO: 23629 - RNA, 1764 nt, Artificial Sequence
  mRNA product Design a-2 (hSL-A100) comprising derived and/or modified sequence from LASV(ISTH0009-NIG-2011;Clade II)__AIT17404__GPCmut2 (opt1)
aggagaguccgcucagccagguugcagaagcggcuuagcguguguccuaaucuucucucugcguguagguaggccugugccgcaaacaagcuuaccaugggccagaucaucaccuucuuccaggaggugccccacgucaucgaggaggugaugaacaucgugcugaucgcccucagccugcuggccauccucaaggggaucuacaacgucgcgaccugcggccuguucgggcugguguccuuccuccugcugugcggccgcagcugcuccacgaccuacaaggggguguacgagcuccagacccuggagcuggacauggccagccucaacaugugcaugccgcuguccugcacgaagaacaacagccaccacuacaucauggucggcaacgagaccggccuggagcucacccugaccaacacguccaucaucaaccacaaguucugcaaccugagcgacgcccacaagaagaaccucuacgaccacgcccugauguccaucaucagcaccuuccaccuguccauccccaacuucaaccaguacgaggccaugagcugcgacuucaacgggggcaagaucuccgugcaguacaaccucagccacgcguacgccguggacgccgccaaccacugcgggaccaucgcgaacggcguccugcagaccuucaugcggauggccuggggcggguccuacaucgcccuggacagcggcaagggguccugggacugcaucaugacgagcuaccaguaccucaucauccagaacaccaccugggaggaccacugccaguucucccgccccagccccaucggcuaccuggggcugcucagccagcggacccgcgacaucuacaucucccggcgccgccggggcacguucaccuggacccucagcgacuccgagggcaacgagacccccgggggcuacugccugacgcgguggaugcugaucgaggccgagcucaagugcuucgggaacaccgccguggcgaagugcaacgagaagcacgacgaggaguucugcgacaugcugcgccuguucgacuucugcaagcaggccauccggcgccucaagacccccgcccagaugagcauccagcugaucaacaaggccgugaacgcccugaucaacgaccagcucaucaugaagaaccaccuccgggacaucaugggcaucccguacugcaacuacuccaaguacugguaccugaaccacaccgucacggggaagaccagccugccccgcugcuggcugguguccaacggcagcuaccugaacgagacccacuucuccgacgacaucgagcagcaggcggacaacaugaucaccgagcuccugcagaaggaguacauggaccggcagggcaagacgccccuggggcucguggaccuguucgucuucagcaccuccuucuaccugaucagcaucuuccugcaccucaucaagaucccgacccaccgccacaucaccggcaagcccugccccaagccccaccggcugaaccacauggggaucugcuccugcggccuguacaagcacccgggggugcccgugaaguggaagcgcugaggacuagucccuguucccagagcccacuuuuuuuucuuuuuuugaaauaaaauagccugucuuucagaucucaaaggcucuuuucagagccaccaaaaaaaaaaaaaaaaaaaaaaaaaaaaaaaaaaaaaaaaaaaaaaaaaaaaaaaaaaaaaaaaaaaaaaaaaaaaaaaaaaaaaaaaaaaaaaaaaaaaa

SEQ ID NO: 23630 - RNA, 1764 nt, Artificial Sequence
  mRNA product Design a-2 (hSL-A100) comprising derived and/or modified sequence from LASV(ISTH2010-NIG-2012;Clade II)__AIT17482__GPCmut2 (opt1)
aggagaguccgcucagccagguugcagaagcggcuuagcguguguccuaaucuucucucugcguguagguaggccugugccgcaaacaagcuuaccaugggccagaucaucaccuucuuccaggaggugccccacgucaucgaggaggugaugaacaucgugcugaucgcccucagccugcuggccauccucaaggggaucuacaacgucgcgaccugcggccuguucgggcugguguccuuccuccugcugugcggccgcagcugcuccacgaccuacaaggggguguacgagcuccagacccuggagcuggacauggccagccucaacaugugcaugccgcuguccugcacgaagaacaacagccaccacuacaucauggucggcaacgagaccggccuggagcucacccugaccaacacguccaucaucaaccacaaguucugcaaccugagcgacgcccacaagaagaaccucuacgaccacgcccugauguccaucaucagcaccuuccaccuguccauccccaacuucaaccaguacgaggccaugagcugcgacuucaacgggggcaagaucuccgugcaguacaaccucagccacgcguacgccguggacgccgccaaccacugcgggaccaucgcgaacggcguccugcagaccuucaugcggauggccuggggcggguccuacaucgcccuggacagcggcaagggguccugggacugcaucaugacgagcuaccaguaccucaucauccagaacaucaccugggaggaccacugccaguucucccgccccagccccaucggcuaccuggggcugcucagccagcggacccgcgacaucuacaucucccggcgccgccggggcaccuucacguggacccucagcgacuccgagggcaacgagacccccgggggcuacugccugacccgguggaugcugaucgaggccgagcucaagugcuucgggaacacggccguggcgaagugcaacgagaagcacgacgaggaguucugcgacaugcugcgccuguucgacuucugcaagcaggccauccggcgccucaagacccccgcccagaugagcauccagcugaucaacaaggccgugaacgcccugaucaacgaccagcucaucaugaagaaccaccuccgggacaucaugggcauccccuacugcaacuacuccaaguacugguaccugaaccacaccgucaccgggaagacgagccugccccgcugcuggcugguguccaacggcagcuaccugaacgagacccacuucuccgacgacaucgagcagcaggcggacaacaugaucaccgagcuccugcagaaggaguacaucgaccggcagggcaagaccccgcuggggcucguggaccuguucgucuucagcacguccuucuaccugaucagcaucuuccugcaccucgugaagaucccgacccaccgccacguggucggcaagcccugccccaagccccaccggcugaaccacauggggaucugcuccugcggccuguacaagcacccgggggugcccgugaaguggaagcgcugaggacuagucccuguucccagagcccacuuuuuuuucuuuuuuugaaauaaaauagccugucuuucagaucucaaaggcucuuuucagagccaccaaaaaaaaaaaaaaaaaaaaaaaaaaaaaaaaaaaaaaaaaaaaaaaaaaaaaaaaaaaaaaaaaaaaaaaaaaaaaaaaaaaaaaaaaaaaaaaaaaaaa

SEQ ID NO: 23631 - RNA, 1764 nt, Artificial Sequence
  mRNA product Design a-2 (hSL-A100) comprising derived and/or modified sequence from LASV(Lassa virus/H.sapiens-wt/NGA/2015/ISTH_0543;Clade II)__AVO03639__GPCmut2 (opt1)
aggagaguccgcucagccagguugcagaagcggcuuagcguguguccuaaucuucucucugcguguagguaggccugugccgcaaacaagcuuaccaugggccagaucaucaccuucuuccaggaggugccccacgucaucgaggaggugaugaacaucgugcugaucgcccucagccugcuggccauccucaaggggaucuacaacgucgcgaccugcggccuguucgggcugguguccuuccuccugcugugcggccgcagcugcuccacgaccuacaaggggguguacgagcuccagacccuggagcuggacauggccaaccucaacaugugcaugccgcugagcugcacgaagaacaacucccaccacuacaucauggucggcaacgagaccggccuggagcucacccugaccaacacgagcaucaucaaccacaaguucugcaaccuguccgacgcccacaagaagaaccucuacgaccacgcccugaugagcaucaucuccaccuuccaccugagcauccccaacuucaaccaguacgaggccauguccugcgacuucaacgggggcaagaucagcgugcaguacaaccucucccacaccuacgcgguggacgccgccaaccacugcgggaccaucgccaacggcguccugcagacguucaugcggauggcguggggcgggagcuacaucgcccuggacuccggcaaggggagcugggacugcaucaugaccuccuaccaguaccucgugauccagaacaccaccugggaggaccacugccaguucagccgccccucccccaucggcuaccuggggcugcucagccagcggacgcgcgacaucuacaucagccggcgccgccggggcaccuucaccuggacccucuccgacagcgagggcaacgagacgcccgggggcuacugccugacccgguggaugcugaucgaggccgagcucaagugcuucgggaacaccgccguggccaagugcaacgagaagcacgacgaggaguucugcgacaugcugcgccuguucgacuucugcaagcaggcgauccggcgccucaagacccccgcccagauguccauccagcugaucaacaaggccgucaacgcccugaucaacgaccagcucaucaugaagaaccaccuccgggacaucaugggcauccccuacugcaacuacagcaaguacugguaccugaaccacacggugaccgggaagaccucccugccccgcugcuggcuggugagcaacggcuccuaccugaacgagacccacuucagcgacgacaucgagcagcaggccgacaacaugaucacggagcuccugcagaaggaguacaucgaccggcagggcaagaccccgcuggggcucgucgaccuguucguguucuccaccagcuucuaccugaucuccaucuuccugcaccucgugaagaucccgacccaccgccacaucacgggcaagcccugccccaagccccaccggcugaaccacauggggaucugcagcugcggccuguacaagcacccggggguccccgugaaguggaagcgcugaggacuagucccuguucccagagcccacuuuuuuuucuuuuuuugaaauaaaauagccugucuuucagaucucaaaggcucuuuucagagccaccaaaaaaaaaaaaaaaaaaaaaaaaaaaaaaaaaaaaaaaaaaaaaaaaaaaaaaaaaaaaaaaaaaaaaaaaaaaaaaaaaaaaaaaaaaaaaaaaaaaaa

SEQ ID NO: 23632 - RNA, 1764 nt, Artificial Sequence
  mRNA product Design a-2 (hSL-A100) comprising derived and/or modified sequence from LASV(Lassa virus/H.sapiens-wt/NGA/2016/ISTH_0009;Clade II)__AVO03571__GPCmut2 (opt1)
aggagaguccgcucagccagguugcagaagcggcuuagcguguguccuaaucuucucucugcguguagguaggccugugccgcaaacaagcuuaccaugggccagaucaucaccuucuuccaggaggugccccacgucaucgaggaggugaugaacaucgugcugaucgcccucagccugcuggccauccucaaggggaucuacaacgucgcgaccugcggccugcuggggcucguguccuuccugcugcucugcggccgcagcugcuccacgaccuacaaggggguguacgagcugcagacccuggagcucgacauggccagccugaacaugugcaugccgcuguccugcacgaagaacaacagccaccacuacaucauggucggcaacgagaccggccucgagcugacccugaccaacacguccaucaucaaccacaaguucugcaaccucagcgacgcccacaagaagaaccuguacgaccacgcccugauguccaucaucagcaccuuccaccucuccauccccaacuucaaccaguacgaggccaugagcugcgacuucaacgggggccggaucuccgugcaguacaaccugagccacuccuacgcgguggacgccgccaaccacugcgggaccaucgccaacggcguccugcagaccuucaugcgcauggcguggggcgggagcuacaucgcccucgacuccggcaaggggagcugggacugcaucaugacguccuaccaguaccugaucauccagaacaccaccugggaggaccacugccaguucagccggcccagccccaucggcuaccuggggcuccugucccagcgcacccgggacaucuacaucagccgccggcgccggggcacguucaccuggacccuguccgacagcgagggcaacgagacccccgggggcuacugccugacgcgcuggaugcucaucgaggccgagcugaagugcuucgggaacaccgccguggccaagugcaacgagaagcacgacgaggaguucugcgacaugcugcggcuguucgacuucugcaagcaggcgauccgccggcugaagacccccgcccagauguccauccagcugaucaacaaggccgugaacgcccucaucaacgaccagcugaucaugaagaaccaccuccgcgacaucaugggcaucccguacugcaacuacagcaaguacugguaccucaaccacaccgucacggggaagaccucccugccccggugcuggcuggugagcaacggcuccuaccucaacgagacccacuucagcgacgacaucgagcagcaggccgacaacaugaucaccgagcugcugcagaaggaguacaucgaccgccagggcaagacgccccucgggcugguggaccuguucgucuucuccaccagcuucuaccugaucuccaucuuccuccaccuggugaagaucccgacccaccggcacaucaccggcaagcccugccccaagccccaccgccugaaccacauggggaucugcagcugcggccucuacaaccacccgggggugcccgucaaguggaagcggugaggacuagucccuguucccagagcccacuuuuuuuucuuuuuuugaaauaaaauagccugucuuucagaucucaaaggcucuuuucagagccaccaaaaaaaaaaaaaaaaaaaaaaaaaaaaaaaaaaaaaaaaaaaaaaaaaaaaaaaaaaaaaaaaaaaaaaaaaaaaaaaaaaaaaaaaaaaaaaaaaaaaa

SEQ ID NO: 23633 - RNA, 1764 nt, Artificial Sequence
  mRNA product Design a-2 (hSL-A100) comprising derived and/or modified sequence from LASV(Lassa virus/H.sapiens-wt/NGA/2016/ISTH_0017;Clade II)__AVO03567__GPCmut2 (opt1)
aggagaguccgcucagccagguugcagaagcggcuuagcguguguccuaaucuucucucugcguguagguaggccugugccgcaaacaagcuuaccaugggccagaucaucaccuucuuccaggaggugccccacgucaucgaggaggugaugaacaucgugcugaucgcccucagccugcuggccauccucaaggggaucuacaacgucgcgaccugcggccuguucgggcugguguccuuccuccugcugugcggccgcagcugcuccacgaccuacaaggggguguacgagcuccagacccuggagcuggacauggccagccucaacaugugcaugccgcuguccugcacgaagaacaacagccaccacuacaucauggucggcaacgagaccggccuggagcucacccugaccaacacguccaucaucaaccacaaguucugcaaccugagcgacgcccacaagaagaaccucuacgaccacgcccugauguccaucaucagcaccuuccaccuguccauccccaacuucaaccaguacgaggccaugagcugcgacuucaacgggggcaagaucuccgugcaguacaaccucagccacaccuacgcgaucgacgccgccaaccacugcgggaccaucgccaacggcgugcugcagacguucaugcggauggcguggggcggguccuacaucgcccuggacagcggcaagggguccugggacugcaucaugaccagcuaccaguaccucaucauccagaacaccaccugggaggaccacugccaguucucccgccccagccccaucggcuaccuggggcugcucagccagcggacgcgcgacaucuacaucucccggcgccgccggggcaccuucaccuggacccucagcgacuccgagggcaacgagacgcccgggggcuacugccugacccgguggaugcugaucgaggccgagcucaagugcuucgggaacaccgccgucgccaagugcaacgagaagcacgacgaggaguucugcgacaugcugcgccuguucgacuucugcaagcaggcgauccggcgccucaagacccccgcccagaugagcauccagcugaucaacaaggccgugaacgcccugaucaacgaccagcucaucaugaagaaccaccuccgggacaucaugggcauccccuacugcaacuacuccaaguacugguaccugaaccacacggugaccgggaagaccagccugccccgcugcuggcuggucuccaacggcagcuaccugaacgagacccacuucuccgacgacaucgagcagcaggccgacaacaugaucacggagcuccugcagaaggaguacauggaccggcagggcaagaccccgcuggggcucguggaccuguucguguucagcaccuccuucuaccugaucagcaucuuccugcaccucguccgcaucccgacccaccggcacgugaucggcaagcccugccccaagccccaccgccugaaccacauggggaucugcuccugcggccuguacaagcacccgggggugcccgucaaguggaagcggugaggacuagucccuguucccagagcccacuuuuuuuucuuuuuuugaaauaaaauagccugucuuucagaucucaaaggcucuuuucagagccaccaaaaaaaaaaaaaaaaaaaaaaaaaaaaaaaaaaaaaaaaaaaaaaaaaaaaaaaaaaaaaaaaaaaaaaaaaaaaaaaaaaaaaaaaaaaaaaaaaaaaa

SEQ ID NO: 23634 - RNA, 1764 nt, Artificial Sequence
  mRNA product Design a-2 (hSL-A100) comprising derived and/or modified sequence from LASV(Lassa virus/H.sapiens-wt/NGA/2018/ISTH_0959;Clade II)__AVV65099__GPCmut2 (opt1)
aggagaguccgcucagccagguugcagaagcggcuuagcguguguccuaaucuucucucugcguguagguaggccugugccgcaaacaagcuuaccaugggccagaucaucaccuucuuccaggaggugccccacgucaucgaggaggugaugaacaucgugcugaucgcccucagccugcuggccauccucaaggggaucuacaacgucgugaccugcggccuguucgggcugguguccuuccuccugcugugcggccgcagcugcuccacgaccuacaagggggucuacgagcuccagacccuggagcuggacauggcgagccucaacaugugcaugccgcuguccugcacgaagaacaacagccaccacuacaucauggugggcaacgagaccggccuggagcucacccugaccaacacguccaucaucaaccacaaguucugcaaccugagcgacgcccacaagaagaaccucuacgaccacgcccugauguccaucaucagcaccuuccaccuguccauccccaacuucaaccaguacgaggccaugagcugcgacuucaacgggggcaagaucuccgugcaguacaaccucagccacgccuacgcgaucgacgccgccaaccacugcgggaccaucgccaacggcguccugcagaccuucaugcggauggcguggggcggguccuacaucgcccuggacagcggcaagggguccugggacugcaucaugacgagcuaccaguaccucaucauccagaacaccaccugggaggaccacugccaguucucccgccccagccccaucggcuaccuggggcugcucagccagcggacccgcgacaucuacaucucccggcgccgccggggcacguucaccuggacccucagcgacuccgagggcaacgagacccccgggggcuacugccugacgcgguggaugcugaucgaggccgagcucaagugcuucgggaacaccgccguggccaagugcaacgagaagcacgacgaggaguucugcgacaugcugcgccuguucgacuucugcaagcaggcgauccggcgccucaagacccccgcccagaugagcauccagcugaucaacaaggccgugaacgcccugaucaacgaccagcucaucaugaagaaccaccuccgggacaucaugggcaucccguacugcaacuacuccaaguacugguaccugaaccacaccgucacggggaagaccagccugccccgcugcuggcugguguccaacggcagcuaccugaacgagacccacuucuccgacgacaucgagcagcaggccgacaacaugaucaccgagcuccugcagaaggaguacaucgaccggcagggcaagacgccccuggggcucguggaccuguucgucuucagcaccuccuucuaccugaucagcaucuuccugcaccucgugaagaucccgacccaccgccacgugaucggcaagcccugccccaagccccaccggcugaaccacauggggaucugcuccugcggccuguacaagcacccggggguccccgugaaguggaagcgcugaggacuagucccuguucccagagcccacuuuuuuuucuuuuuuugaaauaaaauagccugucuuucagaucucaaaggcucuuuucagagccaccaaaaaaaaaaaaaaaaaaaaaaaaaaaaaaaaaaaaaaaaaaaaaaaaaaaaaaaaaaaaaaaaaaaaaaaaaaaaaaaaaaaaaaaaaaaaaaaaaaaaa

SEQ ID NO: 23635 - RNA, 1764 nt, Artificial Sequence
  mRNA product Design a-2 (hSL-A100) comprising derived and/or modified sequence from LASV(LASV003-NIG-2008;Clade II)__AIT17580__GPCmut2 (opt1)
aggagaguccgcucagccagguugcagaagcggcuuagcguguguccuaaucuucucucugcguguagguaggccugugccgcaaacaagcuuaccaugggccagaucaucaccuucuuccaggaggugccccacgucaucgaggaggugaugaacaucgugcugaucgcccucagccugcuggccauccucaaggggaucuacaacgucgcgaccugcggccuguucgggcugguguccuuccuccugcugugcggccgcagcugcuccacgaccuacaaggggguguacgagcuccagacccuggagcuggacauggccagccucaacaugugcaugccgcuguccugcacgaagaacaacagccaccacuacaucauggucggcaacgagaccggccuggagcucacccugaccaacacguccaucaucaaccacaaguucugcaaccugagcgacgcccacaagaagaaccucuacgaccacgcccugauguccaucaucagcaccuuccaccuguccauccccaacuucaaccaguacgaggccaugagcugcgacuucaacgggggcaagaucuccgugcaguacaaccucagccacaccuacgcgguggacgccgccaaccacugcgggaccaucgccaacggcguccugcagacguucaugcggauggcguggggcggguccuacaucgcccuggacagcggcaagggguccugggacugcaucaugaccagcuaccaguaccucaucauccagaacaccaccugggaggaccacugccaguucucccgccccagccccaucggcuaccuggggcugcucagccagcggacgcgcgacaucuacaucucccggcgccgccggggcaccuucaccuggacccucagcgacuccgagagcaacgagacgccgggcggguacugccugacccgguggaugcugaucgaggccgagcucaagugcuucggcaacaccgccguggccaagugcaacgagaagcacgacgaggaguucugcgacaugcugcgccuguucgacuucugcaagcaggcgauccggcgccucaaggcccccgcccagauguccauccagcugaucaacaaggccgugaacgcccugaucaacgaccagcucaucaugaagaaccaccuccgggacaucauggggauccccuacugcaacuacagcaaguacugguaccugaaccacaccgucacgggccgcaccucccugccccggugcuggcuggugagcaacggguccuaccugaacgagacccacuucagcgacgacaucgagcagcaggcggacaacaugaucaccgagcuccugcagaaggaguacauggaccgccagggcaagacgccccugggccucguggaccuguucgucuucuccaccagcuucuaccugaucuccaucuuccugcaccucgugaagaucccgacccaccggcacgugaucgggaagcccugccccaagccccaccgccugaaccacaugggcaucugcagcugcgggcuguacaagcacccgggcguccccgugaaguggaagcggugaggacuagucccuguucccagagcccacuuuuuuuucuuuuuuugaaauaaaauagccugucuuucagaucucaaaggcucuuuucagagccaccaaaaaaaaaaaaaaaaaaaaaaaaaaaaaaaaaaaaaaaaaaaaaaaaaaaaaaaaaaaaaaaaaaaaaaaaaaaaaaaaaaaaaaaaaaaaaaaaaaaaa

SEQ ID NO: 23636 - RNA, 1764 nt, Artificial Sequence
  mRNA product Design a-2 (hSL-A100) comprising derived and/or modified sequence from LASV(LASV035-NIG-2009;Clade II)__AIT17588__GPCmut2 (opt1)
aggagaguccgcucagccagguugcagaagcggcuuagcguguguccuaaucuucucucugcguguagguaggccugugccgcaaacaagcuuaccaugggccagaucaucaccuucuuccaggaggugccccacgucaucgaggaggugaugaacaucgugcugaucgcccucagccugcuggccauccucaaggggaucuacaacgucgcgaccugcggccuguucgggcugguguccuuccuccugcugugcggccgcagcugcuccacgaccuacaaggggguguacgagcuccagacccuggagcuggacauggccagccucaacaugugcaugccgcuguccugcacgaagaacaacagccaccacuacaucauggucggcaacgagaccggccuggagcucacccugaccaacacguccaucaucaaccacaaguucugcaaccugagcgacgcccacaagaagaaccucuacgaccacgcccugauguccaucaucagcaccuuccaccuguccauccccaacuucaaccaguacgaggccaugagcugcgacuucaacgggggcaagaucuccgugcaguacaaccucagccacgcguacgccguggacgccgccaaccacugcgggaccaucgcgaacggcguccugcagaccuucaugcggauggccuggggcggguccuacaucgcccuggacagcggcaagggguccugggacugcaucaugacgagcuaccaguaccucaucauccagaacaccaccugggaggaccacugccaguucucccgccccagccccaucggcuaccuggggcugcucagccagcggacccgcgacaucuacaucucccggcgccgccggggcacguucaccuggacccucagcgacuccgagggcaacgagacccccgggggcuacugccugacgcgguggaugcugaucgaggccgagcucaagugcuucgggaacaccgccguggcgaagugcaacgagaagcacgacgaggaguucugcgacaugcugcgccuguucgacuucugcaagcaggccauccggcgccucaaggcccccgcccagaugagcauccagcugaucaacaaggccgugaacgcgcugaucaacgaccagcucaucaugaagaaccaccuccgggacaucaugggcauccccuacugcaacuacuccaaguacugguaccugaaccacaccgucaccgggaagacgagccugccccgcugcuggcugguguccaacggcagcuaccugaacgagacccacuucuccgacgacaucgagcagcaggccgacaacaugaucaccgagcuccugcagaaggaguacaucgaccggcagggcaagaccccgcuggggcucguggaccuguucgucuucagcacguccuucuaccugaucagcaucuuccugcaccucgugaagaucccgacccaccgccacgugaucggcaagcccugccccaagccccaccggcugaaccacauggggaucugcuccugcggccuguacaagcacccggggguccccgugaaguggaagcgcugaggacuagucccuguucccagagcccacuuuuuuuucuuuuuuugaaauaaaauagccugucuuucagaucucaaaggcucuuuucagagccaccaaaaaaaaaaaaaaaaaaaaaaaaaaaaaaaaaaaaaaaaaaaaaaaaaaaaaaaaaaaaaaaaaaaaaaaaaaaaaaaaaaaaaaaaaaaaaaaaaaaaa

SEQ ID NO: 23637 - RNA, 1764 nt, Artificial Sequence
  mRNA product Design a-2 (hSL-A100) comprising derived and/or modified sequence from LASV(LASV1000-NIG-2009;Clade II)__AIT17782__GPCmut2 (opt1)
aggagaguccgcucagccagguugcagaagcggcuuagcguguguccuaaucuucucucugcguguagguaggccugugccgcaaacaagcuuaccaugggccagaucaucaccuucuuccaggaggugccccacgucaucgaggaggugaugaacaucgugcugaucgcccucagccugcuggccauccucaaggggaucuacaacgucgcgaccugcggccuguucgggcugguguccuuccuccugcugugcggccgcagcugcuccacgaccuacaaggggguguacgagcuccagacccuggagcuggacauggccagccucaacaugugcaugccgcuguccugcacgaagaacaacagccaccacuacaucauggucggcaacgagaccggccuggagcucacccugaccaacacguccaucaucaaccacaaguucugcaaccugagcgacgcccacaagaagaaccucuacgaccacgcccugauguccaucaucagcaccuuccaccuguccauccccaacuucaaccaguacgaggccaugagcugcgacuucaacgggggcaagaucuccgugcaguacaaccucagccacaccuacgcgguggacgccgccaaccacugcgggaccaucgccaacggcguccugcagacguucaugcggauggcguggggcggguccuacaucgcccuggacagcggcaagggguccugggacugcaucaugaccagcuaccaguaccucaucauccagaacaccaccugggaggaccacugccaguucucccgccccagccccaucggcuaccuggggcugcucagccagcggacgcgcgacaucuacaucucccggcgccgccggggcaccuucaccuggacccucagcgacuccgagggcaacgagacgcccgggggcuacugccugacccgguggaugcugaucgaggccgagcucaagugcuucgggaacaccgccguggccaagugcaacgagaagcacgacgaggaguucugcgacaugcugcgccuguucgacuucugcaagcaggcgaucaagcggcucaagacccccgcccagaugagcauccagcugaucaacaaggccgugaacgcccugaucaacgaccagcucaucaugaagaaccaccuccgcgacaucaugggcauccccuacugcaacuacuccaaguacugguaccugaaccacacggucaccgggaagaccagccugccccggugcuggcugguguccaacggcagcuaccugaacgagacccacuucuccgacgacaucgagcagcaggccgacaacaugaucacggagcuccugcagaaggaguacaucgaccgccagggcaagaccccgcuggggcucguggaccuguucgucuucagcaccuccuucuaccugaucagcaucuuccugcaccucgugaagaucccgacccaccggcacguggucggcaagcccugccccaagccccaccgccugaaccacauggggaucugcuccugcggccuguacaagcacccgggggugcccgugaaguggaagcggugaggacuagucccuguucccagagcccacuuuuuuuucuuuuuuugaaauaaaauagccugucuuucagaucucaaaggcucuuuucagagccaccaaaaaaaaaaaaaaaaaaaaaaaaaaaaaaaaaaaaaaaaaaaaaaaaaaaaaaaaaaaaaaaaaaaaaaaaaaaaaaaaaaaaaaaaaaaaaaaaaaaaa

SEQ ID NO: 23638 - RNA, 1764 nt, Artificial Sequence
  mRNA product Design a-2 (hSL-A100) comprising derived and/or modified sequence from LASV(LASV221-NIG-2010;Clade II)__AIT17624__GPCmut2 (opt1)
aggagaguccgcucagccagguugcagaagcggcuuagcguguguccuaaucuucucucugcguguagguaggccugugccgcaaacaagcuuaccaugggccagaucaucaccuucuuccaggaggugccccacgucaucgaggaggugaugaacaucgugcugaucgcccucagccugcuggccauccucaaggggaucuacaacgucgcgaccugcggccuguucgggcugguguccuuccuccugcugugcggccgcagcugcuccacgaccuacaaggggguguacgagcuccagacccuggagcuggacauggccagccucaacaugugcaugccgcuguccugcacgaagaacaacagccaccacuacaucauggucggcaacgagaccggccuggagcucacccugaccaacacguccaucaucaaccacaaguucugcaaccugagcgacgcccacaagaagaaccucuacgaccacgcccugauguccaucaucagcaccuuccaccuguccauccccaacuucaaccaguacgaggccaugagcugcgacuucaacgggggcaagaucuccgugcaguacaaccucagccacaccuacgcgaucgacgccgccaaccacugcgggaccaucgccaacggcgugcugcagacguucaugcggauggcguggggcggguccuacaucgcccuggacagcggcaagggguccugggacugcaucaugaccagcuaccaguaccucaucauccagaacaccaccugggaggaccacugccaguucucccgccccagccccaucggcuaccuggggcugcucagccagcggacgcgcgacaucuacaucucccggcgccgccggggcaccuucaccuggacccucagcgacuccgagggcaacgagacgcccgggggcuacugccugacccgguggaugcugaucgaggccgagcucaagugcuucgggaacaccgccgucgccaagugcaacgagaagcacgacgaggaguucugcgacaugcugcgccuguucgacuucugcaagcaggcgauccggcgccucaagacccccgcccagaugagcauccagcugaucaacaaggccgugaacgcccugaucaacgaccagcucaucaugaagaaccaccuccgggacaucaugggcauccccuacugcaacuacuccaaguacugguaccugaaccacacggugaccgggaagaccagccugccccgcugcuggcuggucuccaacggcagcuaccugaacgagacccacuucuccgacgacaucgagcagcaggccgacaacaugaucacggagaugcuccagaaggaguacauggaccggcagggcaagaccccgcuggggcugguggaccucuucguguucagcaccuccuucuaccugaucagcaucuuccugcaccuggucaagaucccgacccaccgccacgugaucggcaagcccugccccaagccccaccggcucaaccacauggggaucugcuccugcggccuguacaagcacccgggggugcccgucaaguggaagcgcugaggacuagucccuguucccagagcccacuuuuuuuucuuuuuuugaaauaaaauagccugucuuucagaucucaaaggcucuuuucagagccaccaaaaaaaaaaaaaaaaaaaaaaaaaaaaaaaaaaaaaaaaaaaaaaaaaaaaaaaaaaaaaaaaaaaaaaaaaaaaaaaaaaaaaaaaaaaaaaaaaaaaa

SEQ ID NO: 23639 - RNA, 1764 nt, Artificial Sequence
  mRNA product Design a-2 (hSL-A100) comprising derived and/or modified sequence from LASV(LASV237-NIG-2010;Clade II)__AIT17638__GPCmut2 (opt1)
aggagaguccgcucagccagguugcagaagcggcuuagcguguguccuaaucuucucucugcguguagguaggccugugccgcaaacaagcuuaccaugggccagaucaucaccuucuuccaggaggugccccacgucaucgaggaggugaugaacaucgugcugaucgcccucagccugcuggccauccucaaggggaucuacaacgucgcgaccugcggccuguucgggcugguguccuuccuccugcugugcggccgcagcugcuccacgaccuacaaggggguguacgagcuccagacccuggagcuggacauggccagccucaacaugugcaugccgcuguccugcacgaagaacaacagccaccacuacaucauggucggcaacgagaccggccuggagcucacccugaccaacacguccaucaucaaccacaaguucugcaaccugagcgacgcccacaagaaggaccucuacgaccacgcccugauguccaucaucagcaccuuccaccuguccauccccaacuucaaccaguacgaggccaugagcugcgacuucaacgggggcaagaucuccgugcaguacaaccucagccacaccuacgcgguggacgccgccaaccacugcgggaccaucgccaacggcguccugcagacguucaugcggauggcguggggcggguccuacaucgcccuggacagcggcaagggguccugggacugcaucaugaccagcuaccaguaccucaucauccagaacaccaccugggaggaccacugccaguucucccgccccagccccaucggcuaccuggggcugcucagccagcggacgcgcgacaucuacaucucccggcgccgccggggcaccuucaccuggacccucagcgacuccgagggcaacgagacgcccgggggcuacugccugacccgguggaugcugaucgaggccgagcucaagugcuucgggaacaccgccguggccaagugcaacgagaagcacgacgaggaguucugcgacaugcugcgccuguucgacuucugcaagcaggcgauccggcgccucaagacccccgcccagaugagcauccagcugaucaacaaggccgugaacgcccugaucaacgaccagcucaucaugaagaaccaccuccgggacaucaugggcauccccuacugcaacuacuccaaguacugguaccugaaccacacggucaccgggaagaccagccugccccgcugcuggcugguguccaacggcagcuaccugaacgagacccacuucuccgacgacaucgagcagcaggccgacaacaugaucacggagcuccugcagaaggaguacauggaccggcagggcaagaccccgcuggggcucguggaccuguucgucuucagcaccuccuucuaccugaucagcaucuuccugcaccucaucaagaucccgacccaccgccacaucacgggcaagcccugccccaagccccaccggcugaaccacauggggaucugcuccugcggccuguacaagcacccgggggugcccgugaaguggaagcgcugaggacuagucccuguucccagagcccacuuuuuuuucuuuuuuugaaauaaaauagccugucuuucagaucucaaaggcucuuuucagagccaccaaaaaaaaaaaaaaaaaaaaaaaaaaaaaaaaaaaaaaaaaaaaaaaaaaaaaaaaaaaaaaaaaaaaaaaaaaaaaaaaaaaaaaaaaaaaaaaaaaaaa

SEQ ID NO: 23640 - RNA, 1764 nt, Artificial Sequence
  mRNA product Design a-2 (hSL-A100) comprising derived and/or modified sequence from LASV(LASV253-NIG-2011;Clade II)__AIT17670__GPCmut2 (opt1)
aggagaguccgcucagccagguugcagaagcggcuuagcguguguccuaaucuucucucugcguguagguaggccugugccgcaaacaagcuuaccaugggccagaucaucaccuucuuccaggaggugccccacgucaucgaggaggugaugaacaucgugcugaucgcccucagccugcuggccauccucaaggggaucuacaacgucgcgaccugcggccuguucgggcugguguccuuccuccugcugugcggccgcagcugcuccacgaccuacaaggggguguacgagcuccagacccuggagcuggacauggccagccucaacaugugcaugccgcuguccugcacgaagaacaacagccaccacuacaucauggucggcaacgagaccggccuggagcucacccugaccaacacguccaucaucaaccacaaguucugcaaccugagcgacgcccacaagaagaaccucuacgaccacgcccugauguccaucaucagcaccuuccaccuguccauccccaacuucaaccaguacgaggccaugagcugcgacuucaacgggggcaagaucuccgugcaguacaaccucagccacaccuacgcgguggacgccgccaaccacugcgggaccaucgccaacggcguccugcagacguucaugcggauggcguggggcggguccuacaucgcccuggacagcggcaagggguccugggacugcaucaugaccagcuaccaguaccucaucauccagaacaccaccugggaggaccacugccaguucucccgccccagccccaucggcuaccuggggcugcucagccagcggacgcgcgacaucuacaucucccggcgccgccggggcaccuucaccuggacccucagcgacuccgagggcaacgagacgcccgggggcuacugccugacccgguggaugcugaucgaggccgagcucaagugcuucgggaacaccgccguggccaagugcaacgagaagcacgacgaggaguucugcgacaugcugcgccuguucgacuucugcaagcaggcgauccggcgccucaaggcccccgcccagaugagcauccagcugaucaacaaggccgugaacgcccugaucaacgaccagcucaucaugaagaaccaccuccgggacaucaugggcaucccguacugcaacuacuccaaguacugguaccugaaccacaccgucacggggcgcaccagccugccccggugcuggcugguguccaacggcagcuaccugaacgagacccacuucuccgacgacaucgagcagcaggcggacaacaugaucaccgagcuccugcagaaggaguacaucgaccgccagggcaagacgccccuggggcucguggaccuguucgucuucagcaccuccuucuaccugaucagcaucuuccugcaccucgugaagaucccgacccaccggcacaucaucggcaagcccugccccaagccccaccgccugaaccacauggggaucugcuccugcggccuguacaagcacccgggggugcccgucaaguggaagcggugaggacuagucccuguucccagagcccacuuuuuuuucuuuuuuugaaauaaaauagccugucuuucagaucucaaaggcucuuuucagagccaccaaaaaaaaaaaaaaaaaaaaaaaaaaaaaaaaaaaaaaaaaaaaaaaaaaaaaaaaaaaaaaaaaaaaaaaaaaaaaaaaaaaaaaaaaaaaaaaaaaaaa

SEQ ID NO: 23641 - RNA, 1764 nt, Artificial Sequence
  mRNA product Design a-2 (hSL-A100) comprising derived and/or modified sequence from LASV(LASV254-NIG-2011;Clade II)__AIT17674__GPCmut2 (opt1)
aggagaguccgcucagccagguugcagaagcggcuuagcguguguccuaaucuucucucugcguguagguaggccugugccgcaaacaagcuuaccaugggccagaucaucaccuucuuccaggaggugccccacgucaucgaggaggugaugaacaucgugcugaucgcccucagccugcuggccauccucaaggggaucuacaacgucgcgaccugcggccuguucgggcugguguccuuccuccugcugugcggccgcagcugcuccacgaccuacaaggggguguacgagcuccagacccuggagcuggacaugaccaaccucaacaugugcaugccgcugagcugcaccaagaacaacucccaccacuacaucauggucggcaacgagaccggccuggagcucacccugacgaacaccagcaucaucaaccacaaguucugcaaccuguccgacgcccacaagaagaaccucuacaaccacgcccugaugagcaucaucuccaccuuccaccugagcauccccaacuucaaccaguacgaggccauguccugcgacuucaacgggggcaagaucagcgugcaguacaaccucucccacagcuacgccguggacgcggccaaccacugcgggaccaucgccaacggcguccugcagacguucaugcggauggccuggggcggguccuacaucgcgcuggacagcggcaaggggaacugggacugcaucaugaccuccuaccaguaccucaucauccagaacaccaccugggaggaccacugccaguucagccgccccucccccaucggcuaccuggggcugcucagccagcggacgcgcgacaucuacaucagccggcgccgccggggcaccuucaccuggacccucuccgacagcgagggcaacgagacgcccgggggcuacugccugacccgguggaugcugaucgaggccgagcucaagugcuucgggaacaccgccguggccaagugcaacgagaagcacgacgaggaguucugcgacaugcugcgccuguucgacuucugcaagcaggccauccggcgccucaagacccccgcgcaggccaacauccagcugaucaacaaggccgugaacgcccugaucaacgaccagcucaucaugaagaaccaccuccgggacaucaugggcauccccuacugcaacuacuccaaguacugguaccugaaccacacggucaccgggaagaccagccugccccgcugcuggcugguguccaacggcagcuaccugaacgagacccacuucuccgacgacaucgagcagcaggccgacaacaugaucacggagcuccugcagaaggaguacauggaccggcagggcaagaccccgcuggggcucguggaccuguucgucuucagcaccuccuucuaccugaucagcaucuuccugcaccucgugaagaucccgacccaccgccacgugaucggcaagcccugccccaagccccaccggcugaaccacauggggaucugcuccugcggccuguacaagcacccggggguccccgugaaguggaagcgcugaggacuagucccuguucccagagcccacuuuuuuuucuuuuuuugaaauaaaauagccugucuuucagaucucaaaggcucuuuucagagccaccaaaaaaaaaaaaaaaaaaaaaaaaaaaaaaaaaaaaaaaaaaaaaaaaaaaaaaaaaaaaaaaaaaaaaaaaaaaaaaaaaaaaaaaaaaaaaaaaaaaaa

SEQ ID NO: 23642 - RNA, 1764 nt, Artificial Sequence
  mRNA product Design a-2 (hSL-A100) comprising derived and/or modified sequence from LASV(Nig08-A19;Clade III)__ADU56618__GPCmut2 (opt1)
aggagaguccgcucagccagguugcagaagcggcuuagcguguguccuaaucuucucucugcguguagguaggccugugccgcaaacaagcuuaccaugggccagaucgugaccuucuuccaggaggucccccacgugaucgaggaggugaugaacaucguccugaucgcccucagcauccuggccauccugaaggggcucuacaacaucgcgaccugcggccugaucgggcuggugacguuccuccugcuguccggccgcagcugcuccaugaccuacaaggggguguacgagcuccagacccuggagcugaacaugaacacccucaacaugugcaugccgcugagcugcaccaagaacaacucccaccacuacaucauggucggcaacgagaccggccuggagcucacccugacgaacaccagccugcuccaccacaaguucugcaaccuguccgacgcccacaagaagaaccuguacgaccacacccucaugagcaucaucuccaccuuccaccugagcauccccaacuucaaccaguacgaggccauguccugcgacuucaacgggggcaagaucacggugcaguacaaccugagccacuccuacgccaucgacgccgcgaaccacugcgggaccguggccaacggcguccuccagaccuucaugcggauggccuggggcgggagcuacaucgcccuggacuccggccgcgggaagugggacugcaucaugaccagcuaccaguaccugaucauccagaacacgaccugggaggaccacugccaguucucccggcccagccccaucggcuaccucgggcugcugucccagcgcacccgggacaucuacaucagccgccggcgccggggcaccuucacguggacccugagcgacuccgagggcaacgagacccccgggggcuacugccucacccgcuggaugcugaucgaggcggagcugaagugcuucgggaacacggccguggccaagugcaacgagaagcacgacgaggaguucugcgacaugcuccggcuguucgacuucugcaagcaggccauccgccggcugaaggcccccgcgcagaugagcauccagcucaucaacaaggccgugaacgcccugaucaacgaccagcugaucaugaagaaccaccuccgcgacaucaugggcauccccuacugcaacuacuccaaguacugguaccugaaccacaccagcaccgggcggaccucccugccccgcugcuggcucgucagcaacggcuccuaccugaacgagacgcacuucagcgacgacaucgagcagcaggccgacaacaugaucaccgagaugcugcagaaggaguaccucgaccggcagggcaagaccccgcuggggcugguggaccuguucguguucuccaccagcuucuaccucaucuccaucuuccugcaccuggucaagaucccgacgcaccgccacaucgugggcaagcccugccccaagccccaccggcucaaccacauggggaucugcagcugcggccuguacaagcagccgggggugcccguccgcuggaagcggugaggacuagucccuguucccagagcccacuuuuuuuucuuuuuuugaaauaaaauagccugucuuucagaucucaaaggcucuuuucagagccaccaaaaaaaaaaaaaaaaaaaaaaaaaaaaaaaaaaaaaaaaaaaaaaaaaaaaaaaaaaaaaaaaaaaaaaaaaaaaaaaaaaaaaaaaaaaaaaaaaaaaa

SEQ ID NO: 23643 - RNA, 1767 nt, Artificial Sequence
  mRNA product Design a-2 (hSL-A100) comprising derived and/or modified sequence from LASV(G1180-SLE-2010;Clade IV)__AIT17168__GPCmut2 (opt1)
aggagaguccgcucagccagguugcagaagcggcuuagcguguguccuaaucuucucucugcguguagguaggccugugccgcaaacaagcuuaccaugggccagaucgugaccuucuuccaggaggucccccacgugaucgaggaggugaugaacaucguccugaucgcccucagcauccuggccgugcugaaggggcucuacaacuucgcgaccugcggccugguggggcugcucaccuuccugcugcucugcggccgcuccugcaccgccagccgguacaagggggucuacgagcugcagacccuggagcucaacauggagacccugaacaugugcaugccgcuguccugcaccaagaacaacagccaccacuacaucauggugggcaacgagaccggccucgagcugacccugacgaacaccuccaucaucaaccacaaguucugcaaccucagcgacgcccacaagaagaaccuguacgaccacgcccugauguccaucaucagcaccuuccaccucuccauccccaacuucaaccaguacgaggccaugagcugcgacuucaacgggggcaagaucuccgugcaguacaaccugagccacuccuacgcgggggacgccgccaaccacugcggcaccgucgccaacggggugcugcagacguucaugcgcauggcguggggcggcagcuacaucgcccucgacuccgggcacggcagcugggacugcaucaugaccuccuaccaguaccugaucauccagaacaccaccugggaggaccacugccaguucagccggcccucccccaucggguaccugggccuccugagccagcgcacgcgggacaucuacaucagccgccggcgccggggcaccuucaccuggacccuguccgacagcgaggggaaggacacgccgggcggguacugccugacccgcuggaugcucaucgaggccgagcugaagugcuucggcaacaccgccguggccaagugcaacgagaagcacgacgaggaguucugcgacaugcugcggcuguucgacuucugcaagcaggcgauccagcgccugaaggcccccgcccagauguccauccagcugaucaacaaggccgucaacgcccucaucaacgaccagcugaucaugaagaaccaccuccgggacaucauggggauccccuacugcaacuacagcaaguacugguaccucaaccacaccacgaccggcaagaccucccugcccaagugcuggcuggugagcaacggcuccuaccucaacgagacccacuucagcgacgacaucgagcagcaggcggacaacaugaucacggagaugcugcagaaggaguacauggagcgccaggggaagacgccccugggccucguggaccuguucgucuucuccaccagcuucuaccugaucuccaucuuccugcaccucgugaagaucccgacccaccggcacaucgugggcaagagcugccccaagccccaccgccugaaccacauggggaucugcuccugcgggcuguacaagcagcccggcgucccggugaaguggaagcggugaggacuagucccuguucccagagcccacuuuuuuuucuuuuuuugaaauaaaauagccugucuuucagaucucaaaggcucuuuucagagccaccaaaaaaaaaaaaaaaaaaaaaaaaaaaaaaaaaaaaaaaaaaaaaaaaaaaaaaaaaaaaaaaaaaaaaaaaaaaaaaaaaaaaaaaaaaaaaaaaaaaaa

SEQ ID NO: 23644 - RNA, 1767 nt, Artificial Sequence
  mRNA product Design a-2 (hSL-A100) comprising derived and/or modified sequence from LASV(G1442-SLE-2011;Clade IV)__AIT17180__GPCmut2 (opt1)
aggagaguccgcucagccagguugcagaagcggcuuagcguguguccuaaucuucucucugcguguagguaggccugugccgcaaacaagcuuaccaugggccagaucgugaccuucuuccaggaggucccccacgugaucgaggaggugaugaacaucguccugaucgcccucagcauccuggccgugcugaaggggcucuacaacguggcgaccugcggccugaucgggcuggucacguuccuccugcugugcggccgcuccugcaccaccacccucuacaaggggguguacgagcugcagacgcuggagcucaacauggagacccugaacaugugcaugccgcugagcugcaccaagaacaacucccaccacuacauccgggugggcaacgagacgggccucgagcugacccugaccaacaccagcaucaucaaccacaaguucugcaaccucuccgacgcccacaagaagaaccuguacgaccacgcccugaugagcaucaucuccacguuccaccucagcauccccaacuucaaccaguacgaggccauguccugcgacuucaacgggggcaagaucagcguccaguacaaccugucccacagcuacgccggggacgcggccaaccacugcggcaccguggccaacggggugcugcagaccuucaugcgcauggccuggggcggcuccuacaucgcgcucgacagcgggcggggcaacugggacugcaucaugaccuccuaccaguaccugaucauccagaacacgaccugggacgaccacugccaguucagccgccccucccccaucggguaccugggccuccugagccagcggacccgcgacgucuacaucucccggcgccgccggggcaccuucacguggacccugagcgacagcgaggggaaggacaccccgggcggguacugccugacccgguggaugcucaucgaggccgagcugaagugcuucggcaacacggccguggccaagugcaacgagaagcacgacgaggaguucugcgacaugcugcgccucuucgacuucugcaagcaggccauccagcggcugaaggcgcccgcccagauguccauccagcugaucaacaaggccgugaacgcccucaucaacgaccagcugaucaugaagaaccaccuccgcgacaucauggggauccccuacugcaacuacagcaaguacugguaccugaacaacaccgccaccggcaagaccucccugcccaagugcuggcugaucagcaacggcuccuaccucaacgagacgcacuucagcgacgacaucgagcaggaggcggacaacaugaucaccgagaugcugcagaaggaguacauggagcggcaggggaagacgccccugggccucgucgaccuguucguguucuccaccagcuucuaccugaucuccaucuuccugcaccucgugaagaucccgacccaccgccacaucgucggcaagagcugccccaagccccaccggcugaaccacauggggaucugcuccugcgggcuguacaagcagcccggcgugccggugcgcuggaagcggugaggacuagucccuguucccagagcccacuuuuuuuucuuuuuuugaaauaaaauagccugucuuucagaucucaaaggcucuuuucagagccaccaaaaaaaaaaaaaaaaaaaaaaaaaaaaaaaaaaaaaaaaaaaaaaaaaaaaaaaaaaaaaaaaaaaaaaaaaaaaaaaaaaaaaaaaaaaaaaaaaaaaa

SEQ ID NO: 23645 - RNA, 1767 nt, Artificial Sequence
  mRNA product Design a-2 (hSL-A100) comprising derived and/or modified sequence from LASV(G3010-SLE-2013;Clade IV)__AIT17344__GPCmut2 (opt1)
aggagaguccgcucagccagguugcagaagcggcuuagcguguguccuaaucuucucucugcguguagguaggccugugccgcaaacaagcuuaccaugggccagaucgugaccuucuuccaggaggucccccacgugaucgaggaggugaugaacaucguccugaucgcccucagcauccuggccgugcugaaggggcucuacaacuucgcgaccugcggccugguggggcuggucacguuccuccugcugugcggccgcuccugcaccaccagccucuacaaggggguguacgagcugcagacccuggagcucaacauggagacgcugaacaugugcaugccgcuguccugcaccaagaacaacagccaccacuacaucauggugggcaacgagaccggccucgagcugacgcugaccaacaccuccaucaucaaccacaaguucugcaaccucagcgacgcccacaagaagaaccuguacaaccacgcccugauguccaucaucagcaccuuccaccucuccauccccaacuucaaccaguacgaggccaugagcugcgacuucaacgggggcaagaucuccguccaguacaaccugagccacuccuacgccggggacgcggccagccacugcggcacgguggccaacggggugcugcagaccuucaugcggauggccuggggcggcuccuacaucgcgcucgacagcggguacggcaagugggacugcaucaugaccuccuaccaguaccugaucauccagaacaccacgugggaggaccacugccaguucagccgccccucccccaucggguaccugggccuccugagccagcggacccgcgacaucuacaucagccggcgccgccggggcaccuucaccuggacgcuguccgacagcgaggggaaggacaccccgggcggguacugccugacccgguggaugcucaucgaggccgagcugaagugcuucggcaacaccgccgucgccaagugcaacgagaagcacgacgaggaguucugcgacaugcugcgccucuucgacuucugcaagcaggccauccagcggcugaagacgcccgcgcagauguccauccagcugaucaacaaggccgugaacgcccucaucaacgaccagcugaucaugaagaaccaccuccgcgacaucauggggauccccuacugcaacuacagcaaguacugguaccugaaccacaccaccaccggcaagacgucccugcccaagugcuggcuggugagcaacggcuccuaccucaacgagacccacuucagcgacgacaucgagcagcaggccgacaacaugaucaccgagaugcugcagaaggaguacauggagcggcaggggaagacgccccugggccucgucgaccuguucguguucuccaccagcuucuaccugaucuccaucuuccugcaccucgugaagaucccgacccaccgccacaucgucggcaagagcugccccaagccccaccggcugaaccacauggggaucugcuccugcgggcuguacaagcagcccggcgugccggugcgcuggaagcggugaggacuagucccuguucccagagcccacuuuuuuuucuuuuuuugaaauaaaauagccugucuuucagaucucaaaggcucuuuucagagccaccaaaaaaaaaaaaaaaaaaaaaaaaaaaaaaaaaaaaaaaaaaaaaaaaaaaaaaaaaaaaaaaaaaaaaaaaaaaaaaaaaaaaaaaaaaaaaaaaaaaaa

SEQ ID NO: 23646 - RNA, 1767 nt, Artificial Sequence
  mRNA product Design a-2 (hSL-A100) comprising derived and/or modified sequence from LASV(G502-SLE-2009;Clade IV)__AIT17126__GPCmut2 (opt1)
aggagaguccgcucagccagguugcagaagcggcuuagcguguguccuaaucuucucucugcguguagguaggccugugccgcaaacaagcuuaccaugggccagaucgugaccuucuuccaggaggucccccacgugaucgaggaggugaugaacaucguccugaucgcccucagcauccuggccgugcugaaggggcucuacaacuucgcgaccugcggccugguggggcugcucacguuccugcugcucugcggccgcuccugcaccaccgggcuguacaagggcgucuacgagcugcagacccucgagcugaacauggagacgcugaacaugugcaugccgcucagcugcaccaagaacaacucccaccacuacaucauggugggcaacgagaccgggcuggagcugacgcucaccaacaccagcaucaucaaccacaaguucugcaaccuguccgacgcccacaagaagaaccuguacgaccacgcccucaugagcaucaucuccaccuuccaccugagcauccccaacuucaaccaguacgaggccauguccugcgacuucaacggcgggaagaucagcgugcaguacaaccugucccacagcuacgccggcgacgcggccgaccacugcgggacggucgccaacggcgugcuccagaccuucaugcggauggccuggggcggguccuacaucgcgcuggacagcggccgcgggcggugggacugcaucaugaccuccuaccaguaccugaucauccagaacaccacgugggaggaccacugccaguucagccgccccucccccaucggcuaccucggccugcugagccagcggacccgcgacaucuacaucucccggcgccgccgggggaccuucaccuggacgcugagcgacagcgagggcaaggacacccccgggggcuacugccucacccgguggaugcugaucgaggccgagcugaagugcuucgggaacaccgccguggccaagugcaacgagaagcacgacgaggaguucugcgacaugcuccgccuguucgacuucugcaagcaggccauccagcggcugaaggcgcccgcccagauguccauccagcucaucaacaaggccgucaacgcccugaucaacgaccagcuggugaugaagaaccaccuccgcgacaucaugggcauccccuacugcaacuacagccgguacugguaccugaaccacacgaccaccggccgcaccucccugcccaagugcuggcucgugagcaacggguccuaccugaacgagacgcacuucagcgacgacaucgagcagcaggccgacaacaugaucaccgagaugcugcagaaggaguacauggagcggcagggcaagaccccgcucgggcuggucgaccuguucguguucuccaccagcuucuaccugaucuccaucuuccuccaccuggugaagaucccgacgcaccgccacaucgucggcaagagcugccccaagccccaccggcugaaccacauggggaucugcuccugcggccucuacaagcagcccggcgugccggugaaguggaagcgcugaggacuagucccuguucccagagcccacuuuuuuuucuuuuuuugaaauaaaauagccugucuuucagaucucaaaggcucuuuucagagccaccaaaaaaaaaaaaaaaaaaaaaaaaaaaaaaaaaaaaaaaaaaaaaaaaaaaaaaaaaaaaaaaaaaaaaaaaaaaaaaaaaaaaaaaaaaaaaaaaaaaaa

SEQ ID NO: 23647 - RNA, 1767 nt, Artificial Sequence
  mRNA product Design a-2 (hSL-A100) comprising derived and/or modified sequence from LASV(G733-SLE-2010;Clade IV)__AIT17154__GPCmut2 (opt1)
aggagaguccgcucagccagguugcagaagcggcuuagcguguguccuaaucuucucucugcguguagguaggccugugccgcaaacaagcuuaccaugggccagaucgugaccuucuuccaggaggucccccacgugaucgaggaggugaugaacaucguccugaucgcccucagcauccuggccgugcugaaggggcucuacaacuucgcgaccugcggcaucguggggcuggucuccuuccugcuccugugcggccgcagcugcacgaccucccuguacaaggggguguacgagcuccagacccuggagcugaacauggagacccucaacaugugcaugccgcugagcugcaccaagaacaacucccaccacuacaucauggugggcaacgagaccggccuggagcucacccugacgaacaccagcaucaucaaccacaaguucugcaaccuguccgacgcccacaagaagaaccucuacgaccacgcccugaugagcaucaucuccaccuuccaccugagcauccccaacuucaaccaguacgaggccauguccugcgacuucaacgggggcaagaucagcguccaguacaaccucucccacagcuacgccggggacgcggccaaccacugcggcaccaucgccaacggggugcugcagacguucaugcggauggccuggggcggcuccuacaucgcgcuggacagcgggcgcgaccggugggacugcaucaugaccuccuaccaguaccucaucauccagaacaccaccugggaggaccacugccaguucagccgccccucccccaucggcuaccuggggcugcucagccagcggacgcgcgacaucuacaucagccggcgccgccggggcaccuucaccuggacccucuccgacagcgagggcaaggacacgcccgggggcuacugccugacccgguggaugcugaucgaggccgagcucaagugcuucgggaacaccgccguggccaagugcaacgagaagcacgacgaggaguucugcgacaugcugcgccuguucgacuucugcaagcaggccauccagcggcucaaggcgcccgcccagauguccauccagcugaucaacaaggccgucaacgcccugaucaacgaccagcucaucaugaagaaccaccuccgcgacaucaugggcauccccuacugcaacuacagcaaguacugguaccugaaccacaccacgaccgggaagaccucccugcccaagugcuggcuggugagcaacggcuccuaccugaacgagacccacuucagcgacgacaucgagcagcaggccgacaacaugaucacggagaugcuccagaaggaguacauggagcggcagggcaagaccccgcuggggcugguggaccucuucgucuucuccaccagcuucuaccugaucuccaucuuccugcaccuggugaagaucccgacccaccgccacguggucggcaagagcugccccaagccccaccggcucaaccacauggggaucugcuccugcggccuguacgggcagcccggcgugccggugaaguggaagcgcugaggacuagucccuguucccagagcccacuuuuuuuucuuuuuuugaaauaaaauagccugucuuucagaucucaaaggcucuuuucagagccaccaaaaaaaaaaaaaaaaaaaaaaaaaaaaaaaaaaaaaaaaaaaaaaaaaaaaaaaaaaaaaaaaaaaaaaaaaaaaaaaaaaaaaaaaaaaaaaaaaaaaa

SEQ ID NO: 23648 - RNA, 1767 nt, Artificial Sequence
  mRNA product Design a-2 (hSL-A100) comprising derived and/or modified sequence from MOPV/LASV reassortant(IGS-1;Clade IV)__AFY05576__GPCmut2 (opt1)
aggagaguccgcucagccagguugcagaagcggcuuagcguguguccuaaucuucucucugcguguagguaggccugugccgcaaacaagcuuaccaugggccagaucgugaccuucuuccaggaggucccccacgugaucgaggaggugaugaacaucguccugaucgcccucagcgugcuggccgugcugaaggggcucuacaacuucgcgaccugcggccuggucgggcuggugacguuccuccugcugugcggccgcuccugcaccaccagccucuacaaggggguguacgagcugcagacccuggagcucaacauggagacgcugaacaugugcaugccgcuguccugcaccaagaacaacagccaccacuacaucauggucggcaacgagaccggccucgagcugacgcugaccaacaccuccaucaucaaccacaaguucugcaaccucagcgacgcccacaagaagaaccuguacgaccacgcccugauguccaucaucagcaccuuccaccucuccauccccaacuucaaccaguacgaggccaugagcugcgacuucaacgggggcaagaucuccgugcaguacaaccugagccacuccuacgccggggacgcggccaaccacugcggcacgguggccaacgggguccugcagaccuucaugcggauggccuggggcggcagcuacaucgcgcucgacuccgggcgcggcaacugggacugcaucaugaccagcuaccaguaccugaucauccagaacaccacgugggaggaccacugccaguucucccggcccagccccaucggguaccugggccuccugucccagcgcacccgggacaucuacaucagccgccggcgccggggcaccuucaccuggacgcugagcgacuccgagggggaggacaccccgggcggguacugccugacccgcuggaugcucaucgaggccgagcugaagugcuucggcaacaccgccguggccaagugcaacgagaagcacgacgaggaguucugcgacaugcugcggcuguucgacuucugcaagcaggccauccagcgccugaaggcgcccgcccagaugagcauccagcugaucaacaaggccgugaacgcccucaucaacgaccagcugaucaugaagaaccaccuccgggacaucauggggauccccuacugcaacuacuccaaguacugguaccucaaccacacgaccaccggccgcaccagccugcccaagugcuggcuggucuccaacggcagcuaccucaacgagacgcacuucuccgacgacaucgagcagcaggccgacaacaugaucaccgagaugcugcagaaggaguacauggagcggcaggggaagacgccccugggccucguggaccuguucguguucagcaccuccuucuaccugaucagcaucuuccugcaccucgucaagaucccgacccaccgccacaucguggggaaguccugccccaagccccaccggcugaaccacaugggcaucugcagcugcgggcuguacaagcagcccggcgugccggucaaguggaagcgcugaggacuagucccuguucccagagcccacuuuuuuuucuuuuuuugaaauaaaauagccugucuuucagaucucaaaggcucuuuucagagccaccaaaaaaaaaaaaaaaaaaaaaaaaaaaaaaaaaaaaaaaaaaaaaaaaaaaaaaaaaaaaaaaaaaaaaaaaaaaaaaaaaaaaaaaaaaaaaaaaaaaaa

SEQ ID NO: 23649 - RNA, 1767 nt, Artificial Sequence
  mRNA product Design a-2 (hSL-A100) comprising derived and/or modified sequence from LASV(LM765-SLE-2012;Clade IV)__AIT17814__GPCmut2 (opt1)
aggagaguccgcucagccagguugcagaagcggcuuagcguguguccuaaucuucucucugcguguagguaggccugugccgcaaacaagcuuaccaugggccagaucgugaccuucuuccaggaggucccccacgugaucgaggaggugaugaacaucguccugaucgcccucagcauccuggccgugcugaaggggcucuacaacuucgcgaccugcggccugguggggcuggucacguuccuccugcugugcggccgcuccugcaccaccagccucuacaaggggguguacgagcugcagacccuggagcucaacauggagacgcugaacaugugcaugccgcuguccugcaccaagaacaacagccaccacuacaucauggugggcaacgagaccggccucgagcugacgcugaccaacaccuccaucaucgaccacaaguucugcaaccucagcgacgcccaccggaagaaccuguacgaccacgcccugauguccaucaucagcaccuuccaccucuccauccccaacuucaaccaguacgaggccaugagcugcgacuucaacgggggcaagaucuccguccaguacaaccugagccacuccuacgccaaggacgcggccgaccacugcgggacgguggccaacggcgugcugcagaccuucaugcgcauggccuggggcgggagcuacaucgcgcucgacuccggccgggggcgcugggacugcaucaugaccagcuaccaguaccugaucauccagaacaccacgugggaggaccacugccaguucucccggcccagccccaucggcuaccuggggcuccugucccagcgcacccgggacaucuacaucagccgccggcgccggggcaccuucaccuggacgcugagcgacuccgagggcaaggacacccccgggggcuacugccugacccgcuggaugcucaucgaggccgagcugaagugcuucgggaacaccgccgucgccaagugcaacgagaagcacgacgaggaguucugcgacaugcugcggcuguucgacuucugcaagcaggccauccagcgccugaaggcgcccgcccagaugagcauccagcugaucaacaaggccgugaacgcccucaucaacgaccagcugaucaugaagaaccaccuccgggacaucaugggcauccccuacugcaacuacuccaaguacugguaccucaaccacacgaccaccgggaagaccagccugcccaagugcuggcugguguccaacggcagcuaccucaacgagacgcacuucuccgacgacaucgagcagcaggccgacaacaugaucaccgagaugcugcagaaggaguacauggagcgccagggcaagaccccgcuggggcucgucgaccuguucguguucagcaccuccuucuaccugaucagcaucuuccugcaccucgugaagaucccgacgcaccggcacaucgucggcaagcccugccccaagccccaccgccugaaccacauggggaucugcuccugcggccuguacaagcagccgggggugcccgugaaguggaagcggugaggacuagucccuguucccagagcccacuuuuuuuucuuuuuuugaaauaaaauagccugucuuucagaucucaaaggcucuuuucagagccaccaaaaaaaaaaaaaaaaaaaaaaaaaaaaaaaaaaaaaaaaaaaaaaaaaaaaaaaaaaaaaaaaaaaaaaaaaaaaaaaaaaaaaaaaaaaaaaaaaaaaa

SEQ ID NO: 23650 - RNA, 1767 nt, Artificial Sequence
  mRNA product Design a-2 (hSL-A100) comprising derived and/or modified sequence from LASV(LM776-SLE-2012;Clade IV)__AIT17824__GPCmut2 (opt1)
aggagaguccgcucagccagguugcagaagcggcuuagcguguguccuaaucuucucucugcguguagguaggccugugccgcaaacaagcuuaccaugggccagaucgugaccuucuuccaggaggucccccacgugaucgaggaggugaugaacaucguccugaucgcccucagcauccuggccgugcugaaggggcucuacaacuucgcgaccugcggccugguggggcuggucacguuccuccugcugugcggccgcuccugcaccaccagcguguacaaggggguguacgagcuccagacccuggagcugaacauggagacgcucaacaugugcaugccgcuguccugcaccaagaacaacagccaccacuacaucauggucggcaacgagaccggccuggagcucacgcugaccaacaccuccaucaucaaccacaaguucugcaaccugagcgacgcccacaagaagaaccucuacgaccacgcccugauguccaucaucagcaccuuccaccuguccauccccaacuucaaccaguacgaggccaugagcugcgacuucaacgggggcaagaucuccgugcaguacaaccucagccacuccuacgccggggacgcggccaaccacugcggcacgguggccaacgggguccugcagaccuucaugcggauggccuggggcggcagcuacaucgcgcuggacuccgggcacggcaagugggacugcaucaugaccagcuaccaguaccucaucauccagaacaccacgugggaggaccacugccaguucucccgccccagccccaucggguaccugggccugcucucccagcggacccgcgacaucuacaucagccggcgccgccggggcaccuucaccuggacgcucagcgacuccgaggggaaggacaccccgggcggguacugccugacccgguggaugcugaucgaggccgagcucaagugcuucggcaacaccgccguggccaagugcaacgagaagcacgacgaggaguucugcgacaugcugcgccuguucgacuucugcaagcaggccauccagcggcucaaggcgcccgcccagaugagcauccagcugaucaacaaggccgugaacgcccugaucaacgaccagcucaucaugaagaaccaccuccgcgacaucauggggauccccuacugcaacuacuccaaguacugguaccugaaccacacgaccaccggcaagaccagccugcccaagugcuggcuggucuccaacggcagcuaccugaacgagacgcacuucuccgacgacaucgagcagcaggccgacaacaugaucaccgagaugcuccagaaggaguacauggagcggcaggggaagacgccccugggccugguggaccucuucguguucagcaccuccuucuaccugaucagcaucuuccugcaccuggucaagaucccgacccaccgccacaucguggggaaguccugccccaagccccaccggcucaaccacaugggcaucugcagcugcgggcuguacaagcagcccggcgugccgguccgcuggaagcggugaggacuagucccuguucccagagcccacuuuuuuuucuuuuuuugaaauaaaauagccugucuuucagaucucaaaggcucuuuucagagccaccaaaaaaaaaaaaaaaaaaaaaaaaaaaaaaaaaaaaaaaaaaaaaaaaaaaaaaaaaaaaaaaaaaaaaaaaaaaaaaaaaaaaaaaaaaaaaaaaaaaaa

SEQ ID NO: 23651 - RNA, 1767 nt, Artificial Sequence
  mRNA product Design a-2 (hSL-A100) comprising derived and/or modified sequence from LASV(Mad39;Clade IV)__ANH09722__GPCmut2 (opt1)
aggagaguccgcucagccagguugcagaagcggcuuagcguguguccuaaucuucucucugcguguagguaggccugugccgcaaacaagcuuaccaugggccagaucgugaccuucuuccaggaggucccccacgugaucgaggaggugaugaacaucguccugaucgcccucagcauccuggccgugcugaaggggcucuacaacguggcgaccugcggccugaucgggcuggucacguuccuccugcugugcggccgcuccugcaccaccacccucuacaaggggguguacgagcugcaggcccuggagcucaacauggagacgcugaacaugugcaugccgcugagcugcaccaagaacaacucccaccacuacauccgggugggcaacgagaccggccucgagcugacgcugaccaacaccagccucaucaaccacaaguucugcaaccuguccgacgcccacaagaagaaccuguacgaccacgcccucaugagcaucaucuccaccuuccaccugagcauccccaacuucaaccaguacgaggccauguccugcgacuucaacgacgggaagaucagcguccaguacaaccugucccacacguacgcgggcgacaccgccaaccacugcgggaccguggccaacggcgugcuccagaccuucaugcgcauggccuggggcgggagcuacaucgcgcuggacuccggccgcgggggcugggacugcaucaugacgagcuaccaguaccugaucauccagaacaccaccugggaggaccacugccaguucucccggcccagccccaucggguaccucggccugcugucccagcggacccgcgacaucuacaucagccggcgccgccggggcacguucaccuggacccuguccgacagcgaggggaaggacaccccgggcggguacugccucacgcgguggaugcugaucgaggccgagcugaagugcuucggcaacaccgccgucgccaagugcaacgagaagcacgacgaggaguucugcgacaugcuccgccuguucgacuucugcaagcaggccauccagcggcugaaggcgcccgcccagaugagcauccagcucaucaacaaggccgugaacgcccugaucaacgaccagcugaucaugaagaaccaccuccgcgacaucauggggauccccuacugcaacuacuccaaguacugguaccugaaccacaccgugaccggcaagacgagccugcccaagugcuggcucgucuccaacggcagcuaccugaacgagacccacuucuccgacgacaucgagcagcaggccgacaacaugaucaccgagaugcugcagaaggaguacauggagcggcaggggaagacgccccucggccugguggaccuguucguguucagcaccuccuucuaccugaucagcaucuuccuccaccuggucaagaucccgacccaccgccacgugguggggaagcccugccccaagccccaccggcugaaccacaugggcaucugcuccugcggguucuacaagcagccgggcguccccgugcgcuggaagcggugaggacuagucccuguucccagagcccacuuuuuuuucuuuuuuugaaauaaaauagccugucuuucagaucucaaaggcucuuuucagagccaccaaaaaaaaaaaaaaaaaaaaaaaaaaaaaaaaaaaaaaaaaaaaaaaaaaaaaaaaaaaaaaaaaaaaaaaaaaaaaaaaaaaaaaaaaaaaaaaaaaaaa

SEQ ID NO: 23652 - RNA, 1767 nt, Artificial Sequence
  mRNA product Design a-2 (hSL-A100) comprising derived and/or modified sequence from LASV(Z0947-SLE-2011;Clade IV)__AIT17840__GPCmut2 (opt1)
aggagaguccgcucagccagguugcagaagcggcuuagcguguguccuaaucuucucucugcguguagguaggccugugccgcaaacaagcuuaccaugggccagaucgugaccuucuuccaggaggucccccacgugaucgaggaggugaugaacaucguccugaucgcccucagcauccuggccgugcugaaggggcucuacaacuucgcgaccugcggccugguggggcuggucacguuccuccugcugugcggccgcuccugcaccaucagccucuacaaggggguguacgagcugcagacccuggagcucaacauggagacccugaacaugugcaugccgcuguccugcaccaagaacaacagccaccacuacaucauggugggcaacgagaccggccucgagcugacccugacgaacaccuccaucaucaaccacaaguucugcaaccucagcgacgcccacaagaagaaccuguacgaccacgcccugauguccaucaucagcaccuuccaccucuccauccccaacuucaaccaguacgaggccaugagcugcgacuucaacgggggcaagaucuccguccaguacaaccugagccacuccuacgccggggacgcggccaaccacugcggcaccguggccaacggggugcugcagacguucaugcggauggccuggggcggcagcuacaucgcgcucgacuccgggcgcgaccggugggacugcaucaugaccagcuaccaguaccugaucauccagaacaccaccugggaggaccacugccaguucucccgccccagccccaucggcuaccuggggcuccugucccagcggacgcgcgacaucuacaucagccggcgccgccggggcaccuucaccuggacccugagcgacuccgagggcaaggacacgcccgggggcuacugccugacccgguggaugcucaucgaggccgagcugaagugcuucgggaacaccgccgucgccaagugcaacgagaagcacgacgaggaguucugcgacaugcugcgccucuucgacuucugcaagcaggccauccagcggcugaaggcgcccgcccagaugagcauccagcugaucaacaaggccgugaacgcccucaucaacgaccagcugaucaugaagaaccaccuccgcgacaucaugggcauccccuacugcaacuacuccaaguacugguaccugaaccacaccacgaccgggaagaccagccugcccaagugcuggcugguguccaacggcagcuaccucaacgagacccacuucuccgacgacaucgagcagcaggccgacaacaugaucacggagaugcugcagaaggaguacauggagcggcagggcaagaccccgcuggggcucgucgaccuguucguguucagcaccuccuucuaccugaucagcaucuuccugcaccucgugaagaucccgacccaccgccacaucgucggcaagcccugccccaagccccaccggcugaaccacauggggaucugcuccugcggccuguacaagcagccgggggugcccgugaaguggaagcgcugaggacuagucccuguucccagagcccacuuuuuuuucuuuuuuugaaauaaaauagccugucuuucagaucucaaaggcucuuuucagagccaccaaaaaaaaaaaaaaaaaaaaaaaaaaaaaaaaaaaaaaaaaaaaaaaaaaaaaaaaaaaaaaaaaaaaaaaaaaaaaaaaaaaaaaaaaaaaaaaaaaaaa

SEQ ID NO: 23653 - RNA, 1767 nt, Artificial Sequence
  mRNA product Design a-2 (hSL-A100) comprising derived and/or modified sequence from LASV(Josiah;Clade IV)__NP_694870__GPCmut2 (opt1)
aggagaguccgcucagccagguugcagaagcggcuuagcguguguccuaaucuucucucugcguguagguaggccugugccgcaaacaagcuuaccaugggccagaucgugaccuucuuccaggaggucccccacgugaucgaggaggugaugaacaucguccugaucgcccucagcgugcuggccgugcugaaggggcucuacaacuucgcgaccugcggccuggucgggcuggugacguuccuccugcugugcggccgcuccugcaccaccagccucuacaaggggguguacgagcugcagacccuggagcucaacauggagacgcugaacaugugcaugccgcuguccugcaccaagaacaacagccaccacuacaucauggucggcaacgagaccggccucgagcugacccugacgaacaccuccaucaucaaccacaaguucugcaaccucagcgacgcccacaagaagaaccuguacgaccacgcccugauguccaucaucagcaccuuccaccucuccauccccaacuucaaccaguacgaggccaugagcugcgacuucaacgggggcaagaucuccgugcaguacaaccugagccacuccuacgccggggacgcggccaaccacugcggcaccguggccaacgggguccugcagacguucaugcggauggccuggggcggcagcuacaucgcgcucgacuccgggcgcggcaacugggacugcaucaugaccagcuaccaguaccugaucauccagaacaccaccugggaggaccacugccaguucucccggcccagccccaucggguaccugggccuccugucccagcgcacgcgggacaucuacaucagccgccggcgccggggcaccuucaccuggacccugagcgacuccgaggggaaggacacgccgggcggguacugccucacccgcuggaugcugaucgaggccgagcugaagugcuucggcaacaccgccguggccaagugcaacgagaagcacgacgaggaguucugcgacaugcuccggcuguucgacuucugcaagcaggccauccagcgccugaaggcgcccgcccagaugagcauccagcucaucaacaaggccgugaacgcccugaucaacgaccagcugaucaugaagaaccaccuccgggacaucauggggauccccuacugcaacuacuccaaguacugguaccugaaccacaccacgaccggccgcaccagccugcccaagugcuggcucgucuccaacggcagcuaccugaacgagacccacuucuccgacgacaucgagcagcaggccgacaacaugaucacggagaugcugcagaaggaguacauggagcggcaggggaagaccccgcucggccugguggaccuguucguguucagcaccuccuucuaccugaucagcaucuuccuccaccuggucaagauccccacccaccgccacaucguggggaaguccugccccaagccccaccggcugaaccacaugggcaucugcagcugcgggcucuacaagcagccgggcgugcccgucaaguggaagcgcugaggacuagucccuguucccagagcccacuuuuuuuucuuuuuuugaaauaaaauagccugucuuucagaucucaaaggcucuuuucagagccaccaaaaaaaaaaaaaaaaaaaaaaaaaaaaaaaaaaaaaaaaaaaaaaaaaaaaaaaaaaaaaaaaaaaaaaaaaaaaaaaaaaaaaaaaaaaaaaaaaaaaa

SEQ ID NO: 23654 - RNA, 1764 nt, Artificial Sequence
  mRNA product Design a-2 (hSL-A100) comprising derived and/or modified sequence from LASV(LP;Clade I)__AAF86701__GPCmut2 (opt1)
aggagaguccgcucagccagguugcagaagcggcuuagcguguguccuaaucuucucucugcguguagguaggccugugccgcaaacaagcuuaccaugggccagaucaucaccuucuuccaggaggugccccacgucaucgaggaggugaugaacaucgugcugaucgcccucagccugcuggccauccucaaggggcuguacaacaucgcgaccugcggcaucaucgggcuggucgccuuccucuuccugugcggcaaguccugcagccugacgcucaagggcggguacgagcugcagacccuggagcucaacauggagacccugaacaugugcaugccgcuguccugcaccaagaacagcucccaccacuacauccgcgugggcaacgagacggggcucgagcugacccugaccaacaccagcaucaucaaccacaaguucugcaaccucuccgacgcccacaagaagaaccuguacgaccacgcccugaugagcaucaucuccacguuccaccucagcauccccaacuucaaccaguacgaggccauguccugcgacuucaacggcgggaagaucagcgugcaguacaaccugucccacagcuacgcgggcgacgccgccgagcacugcgggaccgucgccaacggcgugcugcagaccuucaugcggauggcguggggcgggcgcuacaucgcccucgacuccggcaaggggaacugggacugcaucaugaccagcuaccaguaccugaucauccagaacacgaccugggaggaccacugccaguucucccggcccagccccaucggcuaccugggccuccugucccagcgcacccgggacaucuacaucagccgccggcgccgggggaccuucacguggacccugagcgacuccgagggcaacgagacccccgggggcuacugccucacccgcuggaugcugaucgaggccgagcugaagugcuucgggaacacggccguggccaagugcaacgagaagcacgacgaggaguucugcgacaugcuccggcuguucgacuucugcaagcaggcgauccgccggcugaaggccccggcccagaugagcauccagcucaucaacaaggccgucaacgcccugaucaacgaccagcugaucaugaagaaccaccuccgcgacaucaugggcauccccuacugcaacuacuccaaguacugguaccugaaccacaccagcuccggccggaccagccugcccaagugcuggcucaucuccaacgggagcuaccugaacgagacccaguucuccgacgacaucgagcagcaggcggacaacaugaucacggagaugcugcagaaggaguacaucgagcgccagggcaagaccccgcucgggcugguggacaucuucaucuucagcaccuccuucuaccugaucagcaucuuccugcaccucaucaagauccccacccaccggcacaucgugggcaagcccugccccaagccgcaccgccugaaccacaugggggucugcuccugcggccuguacaagcaccccggcgugcccacgaaguggaagcggugaggacuagucccuguucccagagcccacuuuuuuuucuuuuuuugaaauaaaauagccugucuuucagaucucaaaggcucuuuucagagccaccaaaaaaaaaaaaaaaaaaaaaaaaaaaaaaaaaaaaaaaaaaaaaaaaaaaaaaaaaaaaaaaaaaaaaaaaaaaaaaaaaaaaaaaaaaaaaaaaaaaaa

SEQ ID NO: 23655 - RNA, 1764 nt, Artificial Sequence
  mRNA product Design a-2 (hSL-A100) comprising derived and/or modified sequence from LASV(803213;Clade II)__AAF86703__GPCmut2 (opt1)
aggagaguccgcucagccagguugcagaagcggcuuagcguguguccuaaucuucucucugcguguagguaggccugugccgcaaacaagcuuaccaugggccagaucaucaccuucuuccaggaggugccccacgucaucgaggaggugaugaacaucgugcugaucgcccucagccugcuggccauccucaaggggaucuacaacgucgcgaccugcggccuguucgggcugaucuccuuccuccugcugugcggccgcagcugcuccgugacguacaaggggguguacgagcuccagacccuggagcugaacauggccaaccucaacaugugcaugccgcugagcugcaccaagaacaacucccaccacuacaucauggucggcaacgagaccggccuggagcucacgcugaccaacaccagcaucaucaaccacaaguucugcaaccuguccgacgcccacaagaagaaccucuacgaccacgcccugaugagcaucaucuccaccuuccaccugagcauccccaacuucaaccaguacgaggccauguccugcgacuucaacgggggcaagaucagcgugcaguacaaccucucccacagcuucgcgguggacgccgccaaccacugcgggacgaucgccaacggcguccugcagaccuucaugcggauggcguggggcggguccuacaucgcccuggacagcggcaaggggaacugggacugcaucaugaccuccuaccaguaccucaucauccagaacaccacgugggaggaccacugccaguucagccgccccucccccaucggcuaccuggggcugcucagccagcggacccgcgacaucuacaucagccggcgccggcgcggcaccuucaccuggacgcuguccgacagcgagggcaacgaggcccccgggggcuacugccugacccgguggaugcucaucgaggccgagcugaagugcuucgggaacaccgccguggcgaagugcaacgagaagcacgacgaggaguucugcgacaugcugcgccucuucgacuucugcaagcaggccaucaagcggcugaagaccccggcccagauguccauccagcugaucaacaaggccgugaacgcccucaucaacgaccagcugaucaugaagaaccaccuccgcgacaucaugggcauccccuacugcaacuacagccgguacugguaccugaaccacacggucaccgggaagaccucccugccccgcugcuggcuggugagcaacggcuccuaccucaacgagacccacuucagcgacgacaucgagcagcaggcggacaacaugaucacggagaugcugcagaaggaguacauggaccggcagggcaagaccccgcuggggcucguggaccuguucgucuucuccaccagcuucuaccugaucuccaucuuccugcaccucgugaagauccccacccaccgccacaucgugggcaagcccugccccaagccgcaccggcugaaccacauggggaucugcagcugcggccuguacaagcaccccgggguccccgugaaguggaagcgcugaggacuagucccuguucccagagcccacuuuuuuuucuuuuuuugaaauaaaauagccugucuuucagaucucaaaggcucuuuucagagccaccaaaaaaaaaaaaaaaaaaaaaaaaaaaaaaaaaaaaaaaaaaaaaaaaaaaaaaaaaaaaaaaaaaaaaaaaaaaaaaaaaaaaaaaaaaaaaaaaaaaaa

SEQ ID NO: 23656 - RNA, 1764 nt, Artificial Sequence
  mRNA product Design a-2 (hSL-A100) comprising derived and/or modified sequence from LASV(GA391;Clade III)__CAA36645__GPCmut2 (opt1)
aggagaguccgcucagccagguugcagaagcggcuuagcguguguccuaaucuucucucugcguguagguaggccugugccgcaaacaagcuuaccaugggccagaucgugaccuucuuccaggaggucccccacgugaucgaggaggugaugaacaucguccugaucgcccucagcauccuggccauccugaaggggcucuacaacguggcgaccugcggccugaucgggcuggugacguuccuccugcuguccggccgcagcugcucccucaucuacaaggggaccuacgagcugcagacccuggagcucaacauggagacccugaacaugugcaugccgcugagcugcacgaagaacaacucccaccacuacauccgggucggcaacgagaccggccucgagcugacccugaccaacacgagcauccucaaccacaaguucugcaaccuguccgacgcccacaagcgcaaccuguacgaccacagccucauguccaucaucagcaccuuccaccuguccauccccaacuucaaccaguacgaggccaugagcugcgacuucaacgggggcaagaucaccgugcaguacaaccugucccacagcuucgccguggacgccgcggggcacugcggcacccucgccaacgggguccugcagacguucaugcggauggccuggggcggcuccuacaucgcccuggacagcgggcgcggcaacugggacugcaucaugaccuccuaccaguaccucaucauccagaacaccaccugggacgaccacugccaguucagccggcccucccccaucggguaccugggccugcucagccagcgcacgcgggacaucuacaucagccgccggcgccggggcaccuucaccuggacccuguccgacagcgaggggaacgagacgccgggcggguacugccugacccgcuggaugcucaucgaggcggagcugaagugcuucggcaacaccgccguggccaagugcaacgagaagcacgacgaggaguucugcgacaugcugcggcuguucgacuucugcaagcaggccauccgccggcugaagacccccgcccagauguccauccagcugaucaacaaggcggugaacgcccucaucaacgaccagcugaucaugaagaaccaccuccgcgacaucauggggauccccuacugcaacuacagccgguacugguaccucaaccacacguccaccggcaagaccagccugccccgcugcuggcugaucuccaacggcagcuaccucaacgagaccaaguucuccgacgacaucgagcagcaggccgacaacaugaucacggagaugcugcagaaggaguacaucgaccggcaggggaagaccccgcugggccuggucgaccucuucguguucagcaccuccuucuaccugaucagcaucuuccugcaccucgugaagauccccacccaccgccacaucgucgggaagcccugccccaagccgcaccggcugaaccacaugggcaucugcuccugcgggcuguacaagcagcccggcgugcccgugcgcuggaagcgcugaggacuagucccuguucccagagcccacuuuuuuuucuuuuuuugaaauaaaauagccugucuuucagaucucaaaggcucuuuucagagccaccaaaaaaaaaaaaaaaaaaaaaaaaaaaaaaaaaaaaaaaaaaaaaaaaaaaaaaaaaaaaaaaaaaaaaaaaaaaaaaaaaaaaaaaaaaaaaaaaaaaaa

SEQ ID NO: 23657 - RNA, 1767 nt, Artificial Sequence
  mRNA product Design a-2 (hSL-A100) comprising derived and/or modified sequence from LASV(AV;Clade V)__CCA30314__GPCmut2 (opt1)
aggagaguccgcucagccagguugcagaagcggcuuagcguguguccuaaucuucucucugcguguagguaggccugugccgcaaacaagcuuaccaugggccagaucgugaccuucuuccaggaggucccccacgugaucgaggaggugaugaacaucguccugaucgcccucagcauccuggccgugcugaaggggcucuacaacaucgcgaccugcggccugaucgggcugaucacguuccuccugcugugcggccgcuccugcagcuccaaccucuacaaggggguguacgagcugcagagccuggaccucaacauggagacccugaacaugugcaugccgcuguccugcaccaagaacaacagccaccacuacauccgggucggcaacgacaccggccucgagcugacgcugaccaacaccuccauccucaaccacaaguucugcaaccugagcgacgcccacaagaaggaccuguacgaccacgcccucauguccaucaucagcaccuuccaccuguccauccccaacuucaaccaguacgaggccaugagcugcgacuucaacgggggcaagaucuccgugcaguacaaccugagccacuccuacgccaucgacgcggccaaccacugcgggacgguggccaacggcauccuccagaccuucaugcgcauggccuggggcgggagcuacaucgcgcuggacuccggccgggggaacugggacugcaucaugaccagcuaccaguaccugaucauccagaacaccacgugggagaaccacugccaguucucccgccccagccccaucggcuaccucgggcugcugagccagcggacccgcgacaucuacaucucccggcgccggcgcggcaccuucaccuggacgcucagcgacuccgagggcaacgccacccccgggggcuacugccugacccgguggaugcugaucgaggccgagcucaagugcuucgggaacaccgccgucgccaagugcaacgagaagcacgacgaggaguucugcgacaugcugcgccuguucgacuucugcaagcaggcgaucagccggcucaaguccccggcccagaugagcauccagcugaucaacaaggccgugaacgcccugaucaacgaccagcucaucaugaagaaccaccuccgcgacaucaugggcauccccuacugcaacuacuccaaguacugguaccugaaccacacgaucaccgggaagaccagccugcccaagugcuggcugguguccaacggcagcuaccugaacgagacccacuucuccgacgacaucgagcagcaggccgacaacaugaucacggagaugcuccagaaggaguacauggagcggcagggcaagaccccgcuggggcuggucgaccuguucguguucagcaccuccuucuaccucaucagcaucuuccugcgccuggugaagauccccacccaccggcacaucgucggcaagcccugccccaagccgcaccgccucaaccacauggggaucugcuccugcggccuguacaagcagcccggggugcccgugcgguggaagcgcugaggacuagucccuguucccagagcccacuuuuuuuucuuuuuuugaaauaaaauagccugucuuucagaucucaaaggcucuuuucagagccaccaaaaaaaaaaaaaaaaaaaaaaaaaaaaaaaaaaaaaaaaaaaaaaaaaaaaaaaaaaaaaaaaaaaaaaaaaaaaaaaaaaaaaaaaaaaaaaaaaaaaa

SEQ ID NO: 23658 - RNA, 1764 nt, Artificial Sequence
  mRNA product Design a-2 (hSL-A100) comprising derived and/or modified sequence from LASV(Togo/2016/7082;Clade VI)__AMR44577__GPCmut2 (opt1)
aggagaguccgcucagccagguugcagaagcggcuuagcguguguccuaaucuucucucugcguguagguaggccugugccgcaaacaagcuuaccaugggccagaucaucaccuucuuccaggaggugccccacgucaucgaggaggugaugaacaucgugcugaucgcccucagccugcuggccauccucaagggggucuacaacguggcgaccugcggcaucaucgggcuggugacguuccuguuccucugcggccgcuccugcagccugaucuacaagggguccuacgagcugcagacccucgagcugaacauggagacccugaacaugugcaugccgcucagcugcaccaagaacuccagccaccacuacauccgggucggcaacgagacgggccuggagcugacccucaccaacaccuccaucaucaaccacaaguucugcaaccugagcgacgcccacaagcgcaaccuguacgaccacgcccucauguccauccugagcacguuccaccuguccauccccaacuucaaccaguacgaggccaugagcugcgacuucaacgggggcaagaucuccgugcaguacaaccucagccacgccuacgcgguggacgccgccgagcacugcgggaccgucgccaacggcgugcugcagaccuucaugcggauggcguggggcggguccuacaucgcccuggacagcggccgcgggaacugggacugcaucaugaccuccuaccaguaccucaucauccagaacacgaccugggaggaccacugccaguucagccggcccucccccaucggcuaccuggggcugcucagccagcgcacccgggacaucuacaucagccgccggcgccggggcaccuucacguggacccuguccgacagcgagggcaacgagacccccgggggcuacugccugacccgcuggaugcucaucgaggccgagcugaagugcuucgggaacacggccguggccaagugcaacgagaagcacgacgaggaguucugcgacaugcugcggcuguucgacuucugcaagcaggcgauccagcgccugaaguccccggcccagaugagcauccagcugaucaacaaggccgucaacgcccucaucaacgaccagcugaucaugaagaaccaccuccgggacaugaugggcauccccuacugcaacuacuccaaguacugguaccucaaccacaccagcuccgggcgcaccagccugcccaagugcuggcugguguccaacggcagcuaccucaacgagacccacuucuccgacgacaucgagcagcaggccgacaacaugaucacggagaugcugcagaaggaguacaucgaccggcagggcaagaccccgcuggggcucguggaccuguucgucuucagcaccuccuucuaccugaucagcaucuuccugcaccucaucaagauccccacccaccgccacaucgugggcaagcccugccccaagccgcaccggcugaaccacauggggaucugcuccugcggccuguacaagcagcccggggugcccacgcgcuggaagcggugaggacuagucccuguucccagagcccacuuuuuuuucuuuuuuugaaauaaaauagccugucuuucagaucucaaaggcucuuuucagagccaccaaaaaaaaaaaaaaaaaaaaaaaaaaaaaaaaaaaaaaaaaaaaaaaaaaaaaaaaaaaaaaaaaaaaaaaaaaaaaaaaaaaaaaaaaaaaaaaaaaaaa

SEQ ID NO: 23659 - RNA, 1764 nt, Artificial Sequence
  mRNA product Design a-2 (hSL-A100) comprising derived and/or modified sequence from LASV(KAK-428;Clade n.d. (VII))__ANH09740__GPCmut2 (opt1)
aggagaguccgcucagccagguugcagaagcggcuuagcguguguccuaaucuucucucugcguguagguaggccugugccgcaaacaagcuuaccaugggccagaucgugaccuucuuccaggaggucccccacgugaucgaggaggugaugaacaucguccugaucgcccucagccugcuggccauccucaaggggcuguacaacuucgcgaccugcggcgugaucgggcugaucacguuccuccugcugugcggccgcuccugcagcgccaccuacaaggggcaguacgagcuccagacccuggagcugaacauggagucccucaacaugugcaugccgcugagcugcaccaagaacaacucccaccacuacauccgggccggcaacaacacgggccuggagcucacccugaccaacaccagcaucaucucccacaaguucugcaaccugagcgacgcccacaagaagaaccucuacgaccacacgcugauguccaucaucaccaccuuccaccugagcauccccaacuucaaccaguacgaggccauguccugcgacuucaacgggggcaagaucagcauccaguacaaccucucccacagcuacgcgggggacgccgcccagcacugcggcaccguggccaacgggguccugcagacguucaugcgcauggcguggggcggcuccuaccuggcccucgacagcgggcggcgcggcugggacugcaucaucuccagcuaccaguaccugaucauccagaacaccaccugggacgaccacugccaguucucccggcccagccccaucggguaccugggcuucgugagccagaagacccgcgacaucuacaucucccggcgccggcgcggcacguucaccuggacccucagcgacuccgaggggcacgacaugccgggcggguacugccugacccgguggaugcugaucgaggccgaccucaagugcuucggcaacacggccguggccaagugcaacgagaagcacgacgaggaguucugcgacauguggcgccuguucgacuucugcaagcaggcgauccagcggcugaaggcccccgcccagaugaacauccagcucaucaacaaggccgucaacgcccugaucaacgaccagcugaugaugaagaaccaccuccgcgacaucauggggauccccuacugcaacuacagcaaguucugguaccugaacaacaccaccaccggccggacgucccugccccgcugcuggcucaucagcaacggcuccuaccugaacgagacccacuucagcgacgacaucgagcagcaggcggacaacaugaucaccgagaugcugcagaaggaguacauggaccggcaggggaagaccccgcucggccugguggaccuguucguguucuccacgagcuucuaccucaucaccaucuuccugcaccuggucaagauccccacccaccgccacaucguggggaagcccugccccaagccgcaccggcugaaccacaugggcaucugcuccugcgggcucuacaagcagcccggcgugcccguccgcuggaagcggugaggacuagucccuguucccagagcccacuuuuuuuucuuuuuuugaaauaaaauagccugucuuucagaucucaaaggcucuuuucagagccaccaaaaaaaaaaaaaaaaaaaaaaaaaaaaaaaaaaaaaaaaaaaaaaaaaaaaaaaaaaaaaaaaaaaaaaaaaaaaaaaaaaaaaaaaaaaaaaaaaaaaa

SEQ ID NO: 23660 - RNA, 1764 nt, Artificial Sequence; identical to SEQ ID NO: 23654
  mRNA product Design a-2 (hSL-A100) comprising derived and/or modified sequence from LASV(Pinneo-NIG-1969;Clade I)__AIT17836__GPCmut2 (opt1)

SEQ ID NO: 23661 - RNA, 1764 nt, Artificial Sequence
  mRNA product Design a-2 (hSL-A100) comprising derived and/or modified sequence from LASV(ISTH0009-NIG-2011;Clade II)__AIT17404__GPCmut2 (opt1)
aggagaguccgcucagccagguugcagaagcggcuuagcguguguccuaaucuucucucugcguguagguaggccugugccgcaaacaagcuuaccaugggccagaucaucaccuucuuccaggaggugccccacgucaucgaggaggugaugaacaucgugcugaucgcccucagccugcuggccauccucaaggggaucuacaacgucgcgaccugcggccuguucgggcugguguccuuccuccugcugugcggccgcagcugcuccacgaccuacaaggggguguacgagcuccagacccuggagcuggacauggccagccucaacaugugcaugccgcuguccugcaccaagaacaacagccaccacuacaucauggucggcaacgagacgggccuggagcucacccugaccaacaccuccaucaucaaccacaaguucugcaaccugagcgacgcccacaagaagaaccucuacgaccacgcccugauguccaucaucagcacguuccaccuguccauccccaacuucaaccaguacgaggccaugagcugcgacuucaacgggggcaagaucuccgugcaguacaaccucagccacgcguacgccguggacgccgccaaccacugcgggaccaucgcgaacggcguccugcagaccuucaugcggauggccuggggcggguccuacaucgcccuggacagcggcaagggguccugggacugcaucaugaccagcuaccaguaccucaucauccagaacacgaccugggaggaccacugccaguucucccgccccagccccaucggcuaccuggggcugcucagccagcggacccgcgacaucuacaucucccggcgccggcgcggcaccuucacguggacccugagcgacuccgagggcaacgagacccccgggggcuacugccugacccgguggaugcucaucgaggccgagcugaagugcuucgggaacacggccguggcgaagugcaacgagaagcacgacgaggaguucugcgacaugcugcgccucuucgacuucugcaagcaggccauccggcgccugaagaccccggcccagaugagcauccagcugaucaacaaggccgugaacgcccucaucaacgaccagcugaucaugaagaaccaccuccgggacaucaugggcauccccuacugcaacuacuccaaguacugguaccugaaccacaccgucaccgggaagacgagccugccccgcugcuggcugguguccaacggcagcuaccucaacgagacccacuucuccgacgacaucgagcagcaggcggacaacaugaucaccgagcugcugcagaaggaguacauggaccggcagggcaagaccccgcucgggcugguggaccuguucgucuucagcacguccuucuaccugaucagcaucuuccuccaccugaucaagauccccacccaccgccacaucaccggcaagcccugccccaagccgcaccggcugaaccacauggggaucugcuccugcggccucuacaagcaccccggggugcccgugaaguggaagcgcugaggacuagucccuguucccagagcccacuuuuuuuucuuuuuuugaaauaaaauagccugucuuucagaucucaaaggcucuuuucagagccaccaaaaaaaaaaaaaaaaaaaaaaaaaaaaaaaaaaaaaaaaaaaaaaaaaaaaaaaaaaaaaaaaaaaaaaaaaaaaaaaaaaaaaaaaaaaaaaaaaaaaa

SEQ ID NO: 23662 - RNA, 1764 nt, Artificial Sequence
  mRNA product Design a-2 (hSL-A100) comprising derived and/or modified sequence from LASV(ISTH2010-NIG-2012;Clade II)__AIT17482__GPCmut2 (opt1)
aggagaguccgcucagccagguugcagaagcggcuuagcguguguccuaaucuucucucugcguguagguaggccugugccgcaaacaagcuuaccaugggccagaucaucaccuucuuccaggaggugccccacgucaucgaggaggugaugaacaucgugcugaucgcccucagccugcuggccauccucaaggggaucuacaacgucgcgaccugcggccuguucgggcugguguccuuccuccugcugugcggccgcagcugcuccacgaccuacaaggggguguacgagcuccagacccuggagcuggacauggccagccucaacaugugcaugccgcuguccugcaccaagaacaacagccaccacuacaucauggucggcaacgagacgggccuggagcucacccugaccaacaccuccaucaucaaccacaaguucugcaaccugagcgacgcccacaagaagaaccucuacgaccacgcccugauguccaucaucagcacguuccaccuguccauccccaacuucaaccaguacgaggccaugagcugcgacuucaacgggggcaagaucuccgugcaguacaaccucagccacgcguacgccguggacgccgccaaccacugcgggaccaucgcgaacggcguccugcagaccuucaugcggauggccuggggcggguccuacaucgcccuggacagcggcaagggguccugggacugcaucaugaccagcuaccaguaccucaucauccagaacaucacgugggaggaccacugccaguucucccgccccagccccaucggcuaccuggggcugcucagccagcggacccgcgacaucuacaucucccggcgccggcgcggcaccuucaccuggacgcugagcgacuccgagggcaacgagacccccgggggcuacugccugacccgguggaugcucaucgaggccgagcugaagugcuucgggaacaccgccguggcgaagugcaacgagaagcacgacgaggaguucugcgacaugcugcgccucuucgacuucugcaagcaggccauccggcgccugaagacgccggcccagaugagcauccagcugaucaacaaggccgugaacgcccucaucaacgaccagcugaucaugaagaaccaccuccgggacaucaugggcauccccuacugcaacuacuccaaguacugguaccugaaccacaccgucaccgggaagaccagccugccccgcugcuggcugguguccaacggcagcuaccucaacgagacgcacuucuccgacgacaucgagcagcaggcggacaacaugaucaccgagcugcugcagaaggaguacaucgaccggcagggcaagaccccgcucgggcugguggaccuguucgucuucagcaccuccuucuaccugaucagcaucuuccuccaccuggugaagauccccacgcaccgccacguggucggcaagcccugccccaagccgcaccggcugaaccacauggggaucugcuccugcggccucuacaagcaccccggggugcccgugaaguggaagcgcugaggacuagucccuguucccagagcccacuuuuuuuucuuuuuuugaaauaaaauagccugucuuucagaucucaaaggcucuuuucagagccaccaaaaaaaaaaaaaaaaaaaaaaaaaaaaaaaaaaaaaaaaaaaaaaaaaaaaaaaaaaaaaaaaaaaaaaaaaaaaaaaaaaaaaaaaaaaaaaaaaaaaa

SEQ ID NO: 23663 - RNA, 1764 nt, Artificial Sequence
  mRNA product Design a-2 (hSL-A100) comprising derived and/or modified sequence from LASV(Lassa virus/H.sapiens-wt/NGA/2015/ISTH_0543;Clade II)__AVO03639__GPCmut2 (opt1)
aggagaguccgcucagccagguugcagaagcggcuuagcguguguccuaaucuucucucugcguguagguaggccugugccgcaaacaagcuuaccaugggccagaucaucaccuucuuccaggaggugccccacgucaucgaggaggugaugaacaucgugcugaucgcccucagccugcuggccauccucaaggggaucuacaacgucgcgaccugcggccuguucgggcugguguccuuccuccugcugugcggccgcagcugcuccacgaccuacaaggggguguacgagcuccagacccuggagcuggacauggccaaccucaacaugugcaugccgcugagcugcaccaagaacaacucccaccacuacaucauggucggcaacgagacgggccuggagcucacccugaccaacaccagcaucaucaaccacaaguucugcaaccuguccgacgcccacaagaagaaccucuacgaccacgcccugaugagcaucaucuccacguuccaccugagcauccccaacuucaaccaguacgaggccauguccugcgacuucaacgggggcaagaucagcgugcaguacaaccucucccacaccuacgcgguggacgccgccaaccacugcgggaccaucgccaacggcguccugcagaccuucaugcggauggcguggggcgggagcuacaucgcccuggacuccggcaaggggagcugggacugcaucaugacguccuaccaguaccucgugauccagaacaccaccugggaggaccacugccaguucagccgccccucccccaucggcuaccuggggcugcucagccagcggacccgcgacaucuacaucagccggcgccggcgcggcacguucaccuggacccuguccgacagcgagggcaacgagacccccgggggcuacugccugacgcgguggaugcucaucgaggccgagcugaagugcuucgggaacaccgccguggccaagugcaacgagaagcacgacgaggaguucugcgacaugcugcgccucuucgacuucugcaagcaggcgauccggcgccugaagaccccggcccagauguccauccagcugaucaacaaggccgucaacgcccucaucaacgaccagcugaucaugaagaaccaccuccgggacaucaugggcauccccuacugcaacuacagcaaguacugguaccugaaccacaccgugacggggaagaccucccugccccgcugcuggcuggugagcaacggcuccuaccucaacgagacccacuucagcgacgacaucgagcagcaggccgacaacaugaucaccgagcugcugcagaaggaguacaucgaccggcagggcaagacgccgcucgggcuggucgaccuguucguguucuccaccagcuucuaccugaucuccaucuuccuccaccuggugaagauccccacccaccgccacaucaccggcaagcccugccccaagccgcaccggcugaaccacauggggaucugcagcugcggccucuacaagcaccccgggguccccgugaaguggaagcgcugaggacuagucccuguucccagagcccacuuuuuuuucuuuuuuugaaauaaaauagccugucuuucagaucucaaaggcucuuuucagagccaccaaaaaaaaaaaaaaaaaaaaaaaaaaaaaaaaaaaaaaaaaaaaaaaaaaaaaaaaaaaaaaaaaaaaaaaaaaaaaaaaaaaaaaaaaaaaaaaaaaaaa

SEQ ID NO: 23664 - RNA, 1764 nt, Artificial Sequence
  mRNA product Design a-2 (hSL-A100) comprising derived and/or modified sequence from LASV(Lassa virus/H.sapiens-wt/NGA/2016/ISTH_0009;Clade II)__AVO03571__GPCmut2 (opt1)
aggagaguccgcucagccagguugcagaagcggcuuagcguguguccuaaucuucucucugcguguagguaggccugugccgcaaacaagcuuaccaugggccagaucaucaccuucuuccaggaggugccccacgucaucgaggaggugaugaacaucgugcugaucgcccucagccugcuggccauccucaaggggaucuacaacgucgcgaccugcggccugcuggggcucguguccuuccugcugcucugcggccgcagcugcuccacgaccuacaaggggguguacgagcugcagacccuggagcucgacauggccagccugaacaugugcaugccgcuguccugcaccaagaacaacagccaccacuacaucauggucggcaacgagacgggccucgagcugacccugaccaacaccuccaucaucaaccacaaguucugcaaccucagcgacgcccacaagaagaaccuguacgaccacgcccugauguccaucaucagcacguuccaccucuccauccccaacuucaaccaguacgaggccaugagcugcgacuucaacgggggccggaucuccgugcaguacaaccugagccacuccuacgcgguggacgccgccaaccacugcgggaccaucgccaacggcguccugcagaccuucaugcgcauggcguggggcgggagcuacaucgcccucgacuccggcaaggggagcugggacugcaucaugaccuccuaccaguaccugaucauccagaacacgaccugggaggaccacugccaguucagccggcccagccccaucggcuaccuggggcuccugucccagcgcacccgggacaucuacaucagccgccggcgccggggcaccuucacguggacccuguccgacagcgagggcaacgagacccccgggggcuacugccucacccgcuggaugcugaucgaggccgagcugaagugcuucgggaacacggccguggccaagugcaacgagaagcacgacgaggaguucugcgacaugcuccggcuguucgacuucugcaagcaggcgauccgccggcugaagaccccggcccagauguccauccagcucaucaacaaggccgugaacgcccugaucaacgaccagcugaucaugaagaaccaccuccgcgacaucaugggcauccccuacugcaacuacagcaaguacugguaccugaaccacaccgucaccgggaagacgucccugccccggugcuggcucgugagcaacggcuccuaccugaacgagacccacuucagcgacgacaucgagcagcaggccgacaacaugaucaccgagcugcuccagaaggaguacaucgaccgccagggcaagaccccgcuggggcugguggaccuguucgucuucuccacgagcuucuaccucaucuccaucuuccugcaccuggugaagauccccacccaccggcacaucaccggcaagcccugccccaagccgcaccgccucaaccacauggggaucugcagcugcggccuguacaaccaccccggggugcccgucaaguggaagcggugaggacuagucccuguucccagagcccacuuuuuuuucuuuuuuugaaauaaaauagccugucuuucagaucucaaaggcucuuuucagagccaccaaaaaaaaaaaaaaaaaaaaaaaaaaaaaaaaaaaaaaaaaaaaaaaaaaaaaaaaaaaaaaaaaaaaaaaaaaaaaaaaaaaaaaaaaaaaaaaaaaaaa

SEQ ID NO: 23665 - RNA, 1764 nt, Artificial Sequence
  mRNA product Design a-2 (hSL-A100) comprising derived and/or modified sequence from LASV(Lassa virus/H.sapiens-wt/NGA/2016/ISTH_0017;Clade II)__AVO03567__GPCmut2 (opt1)
aggagaguccgcucagccagguugcagaagcggcuuagcguguguccuaaucuucucucugcguguagguaggccugugccgcaaacaagcuuaccaugggccagaucaucaccuucuuccaggaggugccccacgucaucgaggaggugaugaacaucgugcugaucgcccucagccugcuggccauccucaaggggaucuacaacgucgcgaccugcggccuguucgggcugguguccuuccuccugcugugcggccgcagcugcuccacgaccuacaaggggguguacgagcuccagacccuggagcuggacauggccagccucaacaugugcaugccgcuguccugcaccaagaacaacagccaccacuacaucauggucggcaacgagacgggccuggagcucacccugaccaacaccuccaucaucaaccacaaguucugcaaccugagcgacgcccacaagaagaaccucuacgaccacgcccugauguccaucaucagcacguuccaccuguccauccccaacuucaaccaguacgaggccaugagcugcgacuucaacgggggcaagaucuccgugcaguacaaccucagccacaccuacgcgaucgacgccgccaaccacugcgggaccaucgccaacggcgugcugcagaccuucaugcggauggcguggggcggguccuacaucgcccuggacagcggcaagggguccugggacugcaucaugacgagcuaccaguaccucaucauccagaacaccaccugggaggaccacugccaguucucccgccccagccccaucggcuaccuggggcugcucagccagcggacccgcgacaucuacaucucccggcgccggcgcggcacguucaccuggacccugagcgacuccgagggcaacgagacccccgggggcuacugccugacgcgguggaugcucaucgaggccgagcugaagugcuucgggaacaccgccgucgccaagugcaacgagaagcacgacgaggaguucugcgacaugcugcgccucuucgacuucugcaagcaggcgauccggcgccugaagaccccggcccagaugagcauccagcugaucaacaaggccgugaacgcccucaucaacgaccagcugaucaugaagaaccaccuccgggacaucaugggcauccccuacugcaacuacuccaaguacugguaccugaaccacaccgugacggggaagaccagccugccccgcugcuggcuggucuccaacggcagcuaccucaacgagacccacuucuccgacgacaucgagcagcaggccgacaacaugaucaccgagcugcugcagaaggaguacauggaccggcagggcaagacgccgcucgggcugguggaccuguucguguucagcaccuccuucuaccugaucagcaucuuccuccaccugguccgcauccccacccaccggcacgugaucggcaagcccugccccaagccgcaccgccugaaccacauggggaucugcuccugcggccucuacaagcaccccggggugcccgucaaguggaagcggugaggacuagucccuguucccagagcccacuuuuuuuucuuuuuuugaaauaaaauagccugucuuucagaucucaaaggcucuuuucagagccaccaaaaaaaaaaaaaaaaaaaaaaaaaaaaaaaaaaaaaaaaaaaaaaaaaaaaaaaaaaaaaaaaaaaaaaaaaaaaaaaaaaaaaaaaaaaaaaaaaaaaa

SEQ ID NO: 23666 - RNA, 1764 nt, Artificial Sequence
  mRNA product Design a-2 (hSL-A100) comprising derived and/or modified sequence from LASV(Lassa virus/H.sapiens-wt/NGA/2018/ISTH_0959;Clade II)__AVV65099__GPCmut2 (opt1)
aggagaguccgcucagccagguugcagaagcggcuuagcguguguccuaaucuucucucugcguguagguaggccugugccgcaaacaagcuuaccaugggccagaucaucaccuucuuccaggaggugccccacgucaucgaggaggugaugaacaucgugcugaucgcccucagccugcuggccauccucaaggggaucuacaacgucgugaccugcggccuguucgggcugguguccuuccuccugcugugcggccgcagcugcuccacgaccuacaagggggucuacgagcuccagacccuggagcuggacauggcgagccucaacaugugcaugccgcuguccugcaccaagaacaacagccaccacuacaucauggugggcaacgagacgggccuggagcucacccugaccaacaccuccaucaucaaccacaaguucugcaaccugagcgacgcccacaagaagaaccucuacgaccacgcccugauguccaucaucagcacguuccaccuguccauccccaacuucaaccaguacgaggccaugagcugcgacuucaacgggggcaagaucuccgugcaguacaaccucagccacgccuacgcgaucgacgccgccaaccacugcgggaccaucgccaacggcguccugcagaccuucaugcggauggcguggggcggguccuacaucgcccuggacagcggcaagggguccugggacugcaucaugaccagcuaccaguaccucaucauccagaacacgaccugggaggaccacugccaguucucccgccccagccccaucggcuaccuggggcugcucagccagcggacccgcgacaucuacaucucccggcgccggcgcggcaccuucacguggacccugagcgacuccgagggcaacgagacccccgggggcuacugccugacccgguggaugcucaucgaggccgagcugaagugcuucgggaacacggccguggccaagugcaacgagaagcacgacgaggaguucugcgacaugcugcgccucuucgacuucugcaagcaggcgauccggcgccugaagaccccggcccagaugagcauccagcugaucaacaaggccgugaacgcccucaucaacgaccagcugaucaugaagaaccaccuccgggacaucaugggcauccccuacugcaacuacuccaaguacugguaccugaaccacaccgucaccgggaagacgagccugccccgcugcuggcugguguccaacggcagcuaccucaacgagacccacuucuccgacgacaucgagcagcaggccgacaacaugaucaccgagcugcugcagaaggaguacaucgaccggcagggcaagaccccgcucgggcugguggaccuguucgucuucagcacguccuucuaccugaucagcaucuuccuccaccuggugaagauccccacccaccgccacgugaucggcaagcccugccccaagccgcaccggcugaaccacauggggaucugcuccugcggccucuacaagcaccccgggguccccgugaaguggaagcgcugaggacuagucccuguucccagagcccacuuuuuuuucuuuuuuugaaauaaaauagccugucuuucagaucucaaaggcucuuuucagagccaccaaaaaaaaaaaaaaaaaaaaaaaaaaaaaaaaaaaaaaaaaaaaaaaaaaaaaaaaaaaaaaaaaaaaaaaaaaaaaaaaaaaaaaaaaaaaaaaaaaaaa

SEQ ID NO: 23667 - RNA, 1764 nt, Artificial Sequence
  mRNA product Design a-2 (hSL-A100) comprising derived and/or modified sequence from LASV(LASV003-NIG-2008;Clade II)__AIT17580__GPCmut2 (opt1)
aggagaguccgcucagccagguugcagaagcggcuuagcguguguccuaaucuucucucugcguguagguaggccugugccgcaaacaagcuuaccaugggccagaucaucaccuucuuccaggaggugccccacgucaucgaggaggugaugaacaucgugcugaucgcccucagccugcuggccauccucaaggggaucuacaacgucgcgaccugcggccuguucgggcugguguccuuccuccugcugugcggccgcagcugcuccacgaccuacaaggggguguacgagcuccagacccuggagcuggacauggccagccucaacaugugcaugccgcuguccugcaccaagaacaacagccaccacuacaucauggucggcaacgagacgggccuggagcucacccugaccaacaccuccaucaucaaccacaaguucugcaaccugagcgacgcccacaagaagaaccucuacgaccacgcccugauguccaucaucagcacguuccaccuguccauccccaacuucaaccaguacgaggccaugagcugcgacuucaacgggggcaagaucuccgugcaguacaaccucagccacaccuacgcgguggacgccgccaaccacugcgggaccaucgccaacggcguccugcagaccuucaugcggauggcguggggcggguccuacaucgcccuggacagcggcaagggguccugggacugcaucaugacgagcuaccaguaccucaucauccagaacaccaccugggaggaccacugccaguucucccgccccagccccaucggcuaccuggggcugcucagccagcggacccgcgacaucuacaucucccggcgccggcgcggcacguucaccuggacccugagcgacuccgagagcaacgagaccccgggcggguacugccugacgcgguggaugcucaucgaggccgagcugaagugcuucggcaacaccgccguggccaagugcaacgagaagcacgacgaggaguucugcgacaugcugcgccucuucgacuucugcaagcaggcgauccggcgccugaaggcccccgcccagauguccauccagcugaucaacaaggccgugaacgcccucaucaacgaccagcugaucaugaagaaccaccuccgggacaucauggggauccccuacugcaacuacagcaaguacugguaccugaaccacaccgucaccggccgcacgucccugccccggugcuggcuggugagcaacggguccuaccucaacgagacccacuucagcgacgacaucgagcagcaggcggacaacaugaucaccgagcugcugcagaaggaguacauggaccgccagggcaagaccccgcucggccugguggaccuguucgucuucuccacgagcuucuaccugaucuccaucuuccuccaccuggugaagauccccacccaccggcacgugaucgggaagcccugccccaagccgcaccgccugaaccacaugggcaucugcagcugcgggcucuacaagcaccccggcguccccgugaaguggaagcggugaggacuagucccuguucccagagcccacuuuuuuuucuuuuuuugaaauaaaauagccugucuuucagaucucaaaggcucuuuucagagccaccaaaaaaaaaaaaaaaaaaaaaaaaaaaaaaaaaaaaaaaaaaaaaaaaaaaaaaaaaaaaaaaaaaaaaaaaaaaaaaaaaaaaaaaaaaaaaaaaaaaaa

SEQ ID NO: 23668 - RNA, 1764 nt, Artificial Sequence
  mRNA product Design a-2 (hSL-A100) comprising derived and/or modified sequence from LASV(LASV035-NIG-2009;Clade II)__AIT17588__GPCmut2 (opt1)
aggagaguccgcucagccagguugcagaagcggcuuagcguguguccuaaucuucucucugcguguagguaggccugugccgcaaacaagcuuaccaugggccagaucaucaccuucuuccaggaggugccccacgucaucgaggaggugaugaacaucgugcugaucgcccucagccugcuggccauccucaaggggaucuacaacgucgcgaccugcggccuguucgggcugguguccuuccuccugcugugcggccgcagcugcuccacgaccuacaaggggguguacgagcuccagacccuggagcuggacauggccagccucaacaugugcaugccgcuguccugcaccaagaacaacagccaccacuacaucauggucggcaacgagacgggccuggagcucacccugaccaacaccuccaucaucaaccacaaguucugcaaccugagcgacgcccacaagaagaaccucuacgaccacgcccugauguccaucaucagcacguuccaccuguccauccccaacuucaaccaguacgaggccaugagcugcgacuucaacgggggcaagaucuccgugcaguacaaccucagccacgcguacgccguggacgccgccaaccacugcgggaccaucgcgaacggcguccugcagaccuucaugcggauggccuggggcggguccuacaucgcccuggacagcggcaagggguccugggacugcaucaugaccagcuaccaguaccucaucauccagaacacgaccugggaggaccacugccaguucucccgccccagccccaucggcuaccuggggcugcucagccagcggacccgcgacaucuacaucucccggcgccggcgcggcaccuucacguggacccugagcgacuccgagggcaacgagacccccgggggcuacugccugacccgguggaugcucaucgaggccgagcugaagugcuucgggaacacggccguggcgaagugcaacgagaagcacgacgaggaguucugcgacaugcugcgccucuucgacuucugcaagcaggccauccggcgccugaaggccccggcccagaugagcauccagcugaucaacaaggccgugaacgcgcucaucaacgaccagcugaucaugaagaaccaccuccgggacaucaugggcauccccuacugcaacuacuccaaguacugguaccugaaccacaccgucaccgggaagaccagccugccccgcugcuggcugguguccaacggcagcuaccucaacgagacgcacuucuccgacgacaucgagcagcaggccgacaacaugaucaccgagcugcugcagaaggaguacaucgaccggcagggcaagaccccgcucgggcugguggaccuguucgucuucagcaccuccuucuaccugaucagcaucuuccuccaccuggugaagauccccacgcaccgccacgugaucggcaagcccugccccaagccgcaccggcugaaccacauggggaucugcuccugcggccucuacaagcaccccgggguccccgugaaguggaagcgcugaggacuagucccuguucccagagcccacuuuuuuuucuuuuuuugaaauaaaauagccugucuuucagaucucaaaggcucuuuucagagccaccaaaaaaaaaaaaaaaaaaaaaaaaaaaaaaaaaaaaaaaaaaaaaaaaaaaaaaaaaaaaaaaaaaaaaaaaaaaaaaaaaaaaaaaaaaaaaaaaaaaaa

SEQ ID NO: 23669 - RNA, 1764 nt, Artificial Sequence
  mRNA product Design a-2 (hSL-A100) comprising derived and/or modified sequence from LASV(LASV1000-NIG-2009;Clade II)__AIT17782__GPCmut2 (opt1)
aggagaguccgcucagccagguugcagaagcggcuuagcguguguccuaaucuucucucugcguguagguaggccugugccgcaaacaagcuuaccaugggccagaucaucaccuucuuccaggaggugccccacgucaucgaggaggugaugaacaucgugcugaucgcccucagccugcuggccauccucaaggggaucuacaacgucgcgaccugcggccuguucgggcugguguccuuccuccugcugugcggccgcagcugcuccacgaccuacaaggggguguacgagcuccagacccuggagcuggacauggccagccucaacaugugcaugccgcuguccugcaccaagaacaacagccaccacuacaucauggucggcaacgagacgggccuggagcucacccugaccaacaccuccaucaucaaccacaaguucugcaaccugagcgacgcccacaagaagaaccucuacgaccacgcccugauguccaucaucagcacguuccaccuguccauccccaacuucaaccaguacgaggccaugagcugcgacuucaacgggggcaagaucuccgugcaguacaaccucagccacaccuacgcgguggacgccgccaaccacugcgggaccaucgccaacggcguccugcagaccuucaugcggauggcguggggcggguccuacaucgcccuggacagcggcaagggguccugggacugcaucaugacgagcuaccaguaccucaucauccagaacaccaccugggaggaccacugccaguucucccgccccagccccaucggcuaccuggggcugcucagccagcggacccgcgacaucuacaucucccggcgccggcgcggcacguucaccuggacccugagcgacuccgagggcaacgagacccccgggggcuacugccugacgcgguggaugcucaucgaggccgagcugaagugcuucgggaacaccgccguggccaagugcaacgagaagcacgacgaggaguucugcgacaugcugcgccucuucgacuucugcaagcaggcgaucaagcggcugaagaccccggcccagaugagcauccagcugaucaacaaggccgugaacgcccucaucaacgaccagcugaucaugaagaaccaccuccgcgacaucaugggcauccccuacugcaacuacuccaaguacugguaccugaaccacaccgucacggggaagaccagccugccccggugcuggcugguguccaacggcagcuaccucaacgagacccacuucuccgacgacaucgagcagcaggccgacaacaugaucaccgagcugcugcagaaggaguacaucgaccgccagggcaagacgccgcucgggcugguggaccuguucgucuucagcaccuccuucuaccugaucagcaucuuccuccaccuggugaagauccccacccaccggcacguggucggcaagcccugccccaagccgcaccgccugaaccacauggggaucugcuccugcggccucuacaagcaccccggggugcccgugaaguggaagcggugaggacuagucccuguucccagagcccacuuuuuuuucuuuuuuugaaauaaaauagccugucuuucagaucucaaaggcucuuuucagagccaccaaaaaaaaaaaaaaaaaaaaaaaaaaaaaaaaaaaaaaaaaaaaaaaaaaaaaaaaaaaaaaaaaaaaaaaaaaaaaaaaaaaaaaaaaaaaaaaaaaaaa

SEQ ID NO: 23670 - RNA, 1764 nt, Artificial Sequence
  mRNA product Design a-2 (hSL-A100) comprising derived and/or modified sequence from LASV(LASV221-NIG-2010;Clade II)__AIT17624__GPCmut2 (opt1)
aggagaguccgcucagccagguugcagaagcggcuuagcguguguccuaaucuucucucugcguguagguaggccugugccgcaaacaagcuuaccaugggccagaucaucaccuucuuccaggaggugccccacgucaucgaggaggugaugaacaucgugcugaucgcccucagccugcuggccauccucaaggggaucuacaacgucgcgaccugcggccuguucgggcugguguccuuccuccugcugugcggccgcagcugcuccacgaccuacaaggggguguacgagcuccagacccuggagcuggacauggccagccucaacaugugcaugccgcuguccugcaccaagaacaacagccaccacuacaucauggucggcaacgagacgggccuggagcucacccugaccaacaccuccaucaucaaccacaaguucugcaaccugagcgacgcccacaagaagaaccucuacgaccacgcccugauguccaucaucagcacguuccaccuguccauccccaacuucaaccaguacgaggccaugagcugcgacuucaacgggggcaagaucuccgugcaguacaaccucagccacaccuacgcgaucgacgccgccaaccacugcgggaccaucgccaacggcgugcugcagaccuucaugcggauggcguggggcggguccuacaucgcccuggacagcggcaagggguccugggacugcaucaugacgagcuaccaguaccucaucauccagaacaccaccugggaggaccacugccaguucucccgccccagccccaucggcuaccuggggcugcucagccagcggacccgcgacaucuacaucucccggcgccggcgcggcacguucaccuggacccugagcgacuccgagggcaacgagacccccgggggcuacugccugacgcgguggaugcucaucgaggccgagcugaagugcuucgggaacaccgccgucgccaagugcaacgagaagcacgacgaggaguucugcgacaugcugcgccucuucgacuucugcaagcaggcgauccggcgccugaagaccccggcccagaugagcauccagcugaucaacaaggccgugaacgcccucaucaacgaccagcugaucaugaagaaccaccuccgggacaucaugggcauccccuacugcaacuacuccaaguacugguaccugaaccacaccgugacggggaagaccagccugccccgcugcuggcuggucuccaacggcagcuaccucaacgagacccacuucuccgacgacaucgagcagcaggccgacaacaugaucaccgagaugcugcagaaggaguacauggaccggcagggcaagacgccgcuggggcucguggaccuguucguguucagcaccuccuucuaccugaucagcaucuuccugcaccucgucaagauccccacccaccgccacgugaucggcaagcccugccccaagccgcaccggcugaaccacauggggaucugcuccugcggccuguacaagcaccccggggugcccgucaaguggaagcgcugaggacuagucccuguucccagagcccacuuuuuuuucuuuuuuugaaauaaaauagccugucuuucagaucucaaaggcucuuuucagagccaccaaaaaaaaaaaaaaaaaaaaaaaaaaaaaaaaaaaaaaaaaaaaaaaaaaaaaaaaaaaaaaaaaaaaaaaaaaaaaaaaaaaaaaaaaaaaaaaaaaaaa

SEQ ID NO: 23671 - RNA, 1764 nt, Artificial Sequence
  mRNA product Design a-2 (hSL-A100) comprising derived and/or modified sequence from LASV(LASV237-NIG-2010;Clade II)__AIT17638__GPCmut2 (opt1)
aggagaguccgcucagccagguugcagaagcggcuuagcguguguccuaaucuucucucugcguguagguaggccugugccgcaaacaagcuuaccaugggccagaucaucaccuucuuccaggaggugccccacgucaucgaggaggugaugaacaucgugcugaucgcccucagccugcuggccauccucaaggggaucuacaacgucgcgaccugcggccuguucgggcugguguccuuccuccugcugugcggccgcagcugcuccacgaccuacaaggggguguacgagcuccagacccuggagcuggacauggccagccucaacaugugcaugccgcuguccugcaccaagaacaacagccaccacuacaucauggucggcaacgagacgggccuggagcucacccugaccaacaccuccaucaucaaccacaaguucugcaaccugagcgacgcccacaagaaggaccucuacgaccacgcccugauguccaucaucagcacguuccaccuguccauccccaacuucaaccaguacgaggccaugagcugcgacuucaacgggggcaagaucuccgugcaguacaaccucagccacaccuacgcgguggacgccgccaaccacugcgggaccaucgccaacggcguccugcagaccuucaugcggauggcguggggcggguccuacaucgcccuggacagcggcaagggguccugggacugcaucaugacgagcuaccaguaccucaucauccagaacaccaccugggaggaccacugccaguucucccgccccagccccaucggcuaccuggggcugcucagccagcggacccgcgacaucuacaucucccggcgccggcgcggcacguucaccuggacccugagcgacuccgagggcaacgagacccccgggggcuacugccugacgcgguggaugcucaucgaggccgagcugaagugcuucgggaacaccgccguggccaagugcaacgagaagcacgacgaggaguucugcgacaugcugcgccucuucgacuucugcaagcaggcgauccggcgccugaagaccccggcccagaugagcauccagcugaucaacaaggccgugaacgcccucaucaacgaccagcugaucaugaagaaccaccuccgggacaucaugggcauccccuacugcaacuacuccaaguacugguaccugaaccacaccgucacggggaagaccagccugccccgcugcuggcugguguccaacggcagcuaccucaacgagacccacuucuccgacgacaucgagcagcaggccgacaacaugaucaccgagcugcugcagaaggaguacauggaccggcagggcaagacgccgcucgggcugguggaccuguucgucuucagcaccuccuucuaccugaucagcaucuuccuccaccugaucaagauccccacccaccgccacaucaccggcaagcccugccccaagccgcaccggcugaaccacauggggaucugcuccugcggccucuacaagcaccccggggugcccgugaaguggaagcgcugaggacuagucccuguucccagagcccacuuuuuuuucuuuuuuugaaauaaaauagccugucuuucagaucucaaaggcucuuuucagagccaccaaaaaaaaaaaaaaaaaaaaaaaaaaaaaaaaaaaaaaaaaaaaaaaaaaaaaaaaaaaaaaaaaaaaaaaaaaaaaaaaaaaaaaaaaaaaaaaaaaaaa

SEQ ID NO: 23672 - RNA, 1764 nt, Artificial Sequence
  mRNA product Design a-2 (hSL-A100) comprising derived and/or modified sequence from LASV(LASV253-NIG-2011;Clade II)__AIT17670__GPCmut2 (opt1)
aggagaguccgcucagccagguugcagaagcggcuuagcguguguccuaaucuucucucugcguguagguaggccugugccgcaaacaagcuuaccaugggccagaucaucaccuucuuccaggaggugccccacgucaucgaggaggugaugaacaucgugcugaucgcccucagccugcuggccauccucaaggggaucuacaacgucgcgaccugcggccuguucgggcugguguccuuccuccugcugugcggccgcagcugcuccacgaccuacaaggggguguacgagcuccagacccuggagcuggacauggccagccucaacaugugcaugccgcuguccugcaccaagaacaacagccaccacuacaucauggucggcaacgagacgggccuggagcucacccugaccaacaccuccaucaucaaccacaaguucugcaaccugagcgacgcccacaagaagaaccucuacgaccacgcccugauguccaucaucagcacguuccaccuguccauccccaacuucaaccaguacgaggccaugagcugcgacuucaacgggggcaagaucuccgugcaguacaaccucagccacaccuacgcgguggacgccgccaaccacugcgggaccaucgccaacggcguccugcagaccuucaugcggauggcguggggcggguccuacaucgcccuggacagcggcaagggguccugggacugcaucaugacgagcuaccaguaccucaucauccagaacaccaccugggaggaccacugccaguucucccgccccagccccaucggcuaccuggggcugcucagccagcggacccgcgacaucuacaucucccggcgccggcgcggcacguucaccuggacccugagcgacuccgagggcaacgagacccccgggggcuacugccugacgcgguggaugcucaucgaggccgagcugaagugcuucgggaacaccgccguggccaagugcaacgagaagcacgacgaggaguucugcgacaugcugcgccucuucgacuucugcaagcaggcgauccggcgccugaaggccccggcccagaugagcauccagcugaucaacaaggccgugaacgcccucaucaacgaccagcugaucaugaagaaccaccuccgggacaucaugggcauccccuacugcaacuacuccaaguacugguaccugaaccacaccgucaccgggcgcacgagccugccccggugcuggcugguguccaacggcagcuaccucaacgagacccacuucuccgacgacaucgagcagcaggcggacaacaugaucaccgagcugcugcagaaggaguacaucgaccgccagggcaagaccccgcucgggcugguggaccuguucgucuucagcacguccuucuaccugaucagcaucuuccuccaccuggugaagauccccacccaccggcacaucaucggcaagcccugccccaagccgcaccgccugaaccacauggggaucugcuccugcggccucuacaagcaccccggggugcccgucaaguggaagcggugaggacuagucccuguucccagagcccacuuuuuuuucuuuuuuugaaauaaaauagccugucuuucagaucucaaaggcucuuuucagagccaccaaaaaaaaaaaaaaaaaaaaaaaaaaaaaaaaaaaaaaaaaaaaaaaaaaaaaaaaaaaaaaaaaaaaaaaaaaaaaaaaaaaaaaaaaaaaaaaaaaaaa

SEQ ID NO: 23673 - RNA, 1764 nt, Artificial Sequence
  mRNA product Design a-2 (hSL-A100) comprising derived and/or modified sequence from LASV(LASV254-NIG-2011;Clade II)__AIT17674__GPCmut2 (opt1)
aggagaguccgcucagccagguugcagaagcggcuuagcguguguccuaaucuucucucugcguguagguaggccugugccgcaaacaagcuuaccaugggccagaucaucaccuucuuccaggaggugccccacgucaucgaggaggugaugaacaucgugcugaucgcccucagccugcuggccauccucaaggggaucuacaacgucgcgaccugcggccuguucgggcugguguccuuccuccugcugugcggccgcagcugcuccacgaccuacaaggggguguacgagcuccagacccuggagcuggacaugaccaaccucaacaugugcaugccgcugagcugcacgaagaacaacucccaccacuacaucauggucggcaacgagaccggccuggagcucacccugaccaacacgagcaucaucaaccacaaguucugcaaccuguccgacgcccacaagaagaaccucuacaaccacgcccugaugagcaucaucuccaccuuccaccugagcauccccaacuucaaccaguacgaggccauguccugcgacuucaacgggggcaagaucagcgugcaguacaaccucucccacagcuacgccguggacgcggccaaccacugcgggaccaucgccaacggcguccugcagaccuucaugcggauggccuggggcggguccuacaucgcgcuggacagcggcaaggggaacugggacugcaucaugacguccuaccaguaccucaucauccagaacaccaccugggaggaccacugccaguucagccgccccucccccaucggcuaccuggggcugcucagccagcggacccgcgacaucuacaucagccggcgccggcgcggcacguucaccuggacccuguccgacagcgagggcaacgagacccccgggggcuacugccugacgcgguggaugcucaucgaggccgagcugaagugcuucgggaacaccgccguggccaagugcaacgagaagcacgacgaggaguucugcgacaugcugcgccucuucgacuucugcaagcaggccauccggcgccugaagaccccggcgcaggccaacauccagcugaucaacaaggccgugaacgcccucaucaacgaccagcugaucaugaagaaccaccuccgggacaucaugggcauccccuacugcaacuacuccaaguacugguaccugaaccacaccgucacggggaagaccagccugccccgcugcuggcugguguccaacggcagcuaccucaacgagacccacuucuccgacgacaucgagcagcaggccgacaacaugaucaccgagcugcugcagaaggaguacauggaccggcagggcaagacgccgcucgggcugguggaccuguucgucuucagcaccuccuucuaccugaucagcaucuuccuccaccuggugaagauccccacccaccgccacgugaucggcaagcccugccccaagccgcaccggcugaaccacauggggaucugcuccugcggccucuacaagcaccccgggguccccgugaaguggaagcgcugaggacuagucccuguucccagagcccacuuuuuuuucuuuuuuugaaauaaaauagccugucuuucagaucucaaaggcucuuuucagagccaccaaaaaaaaaaaaaaaaaaaaaaaaaaaaaaaaaaaaaaaaaaaaaaaaaaaaaaaaaaaaaaaaaaaaaaaaaaaaaaaaaaaaaaaaaaaaaaaaaaaaa

SEQ ID NO: 23674 - RNA, 1764 nt, Artificial Sequence
  mRNA product Design a-2 (hSL-A100) comprising derived and/or modified sequence from LASV(Nig08-A19;Clade III)__ADU56618__GPCmut2 (opt1)
aggagaguccgcucagccagguugcagaagcggcuuagcguguguccuaaucuucucucugcguguagguaggccugugccgcaaacaagcuuaccaugggccagaucgugaccuucuuccaggaggucccccacgugaucgaggaggugaugaacaucguccugaucgcccucagcauccuggccauccugaaggggcucuacaacaucgcgaccugcggccugaucgggcuggugacguuccuccugcuguccggccgcagcugcuccaugaccuacaaggggguguacgagcuccagacccuggagcugaacaugaacacccucaacaugugcaugccgcugagcugcacgaagaacaacucccaccacuacaucauggucggcaacgagaccggccuggagcucacccugaccaacacgagccugcuccaccacaaguucugcaaccuguccgacgcccacaagaagaaccuguacgaccacacccucaugagcaucaucuccaccuuccaccugagcauccccaacuucaaccaguacgaggccauguccugcgacuucaacgggggcaagaucaccgugcaguacaaccugagccacuccuacgccaucgacgccgcgaaccacugcgggacgguggccaacggcguccuccagaccuucaugcggauggccuggggcgggagcuacaucgcccuggacuccggccgcgggaagugggacugcaucaugaccagcuaccaguaccugaucauccagaacaccacgugggaggaccacugccaguucucccggcccagccccaucggcuaccucgggcugcugucccagcgcacccgggacaucuacaucagccgccggcgccggggcaccuucaccuggacgcucagcgacuccgagggcaacgagacccccgggggcuacugccugacccgcuggaugcugaucgaggcggagcucaagugcuucgggaacaccgccguggccaagugcaacgagaagcacgacgaggaguucugcgacaugcugcggcuguucgacuucugcaagcaggccauccgccggcucaaggccccggcgcagaugagcauccagcugaucaacaaggccgugaacgcccugaucaacgaccagcucaucaugaagaaccaccuccgcgacaucaugggcauccccuacugcaacuacuccaaguacugguaccugaaccacacgagcaccgggcggaccucccugccccgcugcuggcuggucagcaacggcuccuaccugaacgagacccacuucagcgacgacaucgagcagcaggccgacaacaugaucacggagaugcuccagaaggaguaccuggaccggcagggcaagaccccgcuggggcugguggaccucuucguguucuccaccagcuucuaccugaucuccaucuuccugcaccucgucaagauccccacccaccgccacaucgugggcaagcccugccccaagccgcaccggcugaaccacauggggaucugcagcugcggccuguacaagcagcccggggugcccguccgcuggaagcggugaggacuagucccuguucccagagcccacuuuuuuuucuuuuuuugaaauaaaauagccugucuuucagaucucaaaggcucuuuucagagccaccaaaaaaaaaaaaaaaaaaaaaaaaaaaaaaaaaaaaaaaaaaaaaaaaaaaaaaaaaaaaaaaaaaaaaaaaaaaaaaaaaaaaaaaaaaaaaaaaaaaaa

SEQ ID NO: 23675 - RNA, 1767 nt, Artificial Sequence
  mRNA product Design a-2 (hSL-A100) comprising derived and/or modified sequence from LASV(G1180-SLE-2010;Clade IV)__AIT17168__GPCmut2 (opt1)
aggagaguccgcucagccagguugcagaagcggcuuagcguguguccuaaucuucucucugcguguagguaggccugugccgcaaacaagcuuaccaugggccagaucgugaccuucuuccaggaggucccccacgugaucgaggaggugaugaacaucguccugaucgcccucagcauccuggccgugcugaaggggcucuacaacuucgcgaccugcggccugguggggcugcucacguuccugcugcucugcggccgcuccugcaccgccagccgguacaagggggucuacgagcugcagacccuggagcucaacauggagacccugaacaugugcaugccgcuguccugcacgaagaacaacagccaccacuacaucauggugggcaacgagaccggccucgagcugacccugaccaacacguccaucaucaaccacaaguucugcaaccucagcgacgcccacaagaagaaccuguacgaccacgcccugauguccaucaucagcaccuuccaccucuccauccccaacuucaaccaguacgaggccaugagcugcgacuucaacgggggcaagaucuccgugcaguacaaccugagccacuccuacgcgggggacgccgccaaccacugcggcaccgucgccaacggggugcugcagaccuucaugcgcauggcguggggcggcagcuacaucgcccucgacuccgggcacggcagcugggacugcaucaugacguccuaccaguaccugaucauccagaacaccaccugggaggaccacugccaguucagccggcccucccccaucggguaccugggccuccugagccagcgcacccgggacaucuacaucagccgccggcgccggggcacguucaccuggacccuguccgacagcgaggggaaggacaccccgggcggguacugccucacgcgcuggaugcugaucgaggccgagcugaagugcuucggcaacaccgccguggccaagugcaacgagaagcacgacgaggaguucugcgacaugcuccggcuguucgacuucugcaagcaggcgauccagcgccugaaggcccccgcccagauguccauccagcucaucaacaaggccgucaacgcccugaucaacgaccagcugaucaugaagaaccaccuccgggacaucauggggauccccuacugcaacuacagcaaguacugguaccugaaccacaccaccacgggcaagaccucccugcccaagugcuggcucgugagcaacggcuccuaccugaacgagacccacuucagcgacgacaucgagcagcaggcggacaacaugaucaccgagaugcugcagaaggaguacauggagcgccaggggaagacgccgcucggccugguggaccuguucgucuucuccaccagcuucuaccugaucuccaucuuccuccaccuggugaagauccccacccaccggcacaucgugggcaagagcugccccaagccccaccgccugaaccacauggggaucugcuccugcgggcucuacaagcagccgggcguccccgugaaguggaagcggugaggacuagucccuguucccagagcccacuuuuuuuucuuuuuuugaaauaaaauagccugucuuucagaucucaaaggcucuuuucagagccaccaaaaaaaaaaaaaaaaaaaaaaaaaaaaaaaaaaaaaaaaaaaaaaaaaaaaaaaaaaaaaaaaaaaaaaaaaaaaaaaaaaaaaaaaaaaaaaaaaaaaa

SEQ ID NO: 23676 - RNA, 1767 nt, Artificial Sequence
  mRNA product Design a-2 (hSL-A100) comprising derived and/or modified sequence from LASV(G1442-SLE-2011;Clade IV)__AIT17180__GPCmut2 (opt1)
aggagaguccgcucagccagguugcagaagcggcuuagcguguguccuaaucuucucucugcguguagguaggccugugccgcaaacaagcuuaccaugggccagaucgugaccuucuuccaggaggucccccacgugaucgaggaggugaugaacaucguccugaucgcccucagcauccuggccgugcugaaggggcucuacaacguggcgaccugcggccugaucgggcuggucacguuccuccugcugugcggccgcuccugcaccaccacccucuacaaggggguguacgagcugcagacgcuggagcucaacauggagacccugaacaugugcaugccgcugagcugcaccaagaacaacucccaccacuacauccgggugggcaacgagaccggccucgagcugacgcugaccaacaccagcaucaucaaccacaaguucugcaaccucuccgacgcccacaagaagaaccuguacgaccacgcccugaugagcaucaucuccaccuuccaccucagcauccccaacuucaaccaguacgaggccauguccugcgacuucaacgggggcaagaucagcguccaguacaaccugucccacagcuacgccggggacgcggccaaccacugcggcacgguggccaacggggugcugcagaccuucaugcgcauggccuggggcggcuccuacaucgcgcucgacagcgggcggggcaacugggacugcaucaugaccuccuaccaguaccugaucauccagaacaccacgugggacgaccacugccaguucagccgccccucccccaucggguaccugggccuccugagccagcggacccgcgacgucuacaucucccggcgccggcgcggcaccuucaccuggacgcugagcgacagcgaggggaaggacaccccgggcggguacugccucacccgguggaugcugaucgaggccgagcugaagugcuucggcaacaccgccguggccaagugcaacgagaagcacgacgaggaguucugcgacaugcuccgccuguucgacuucugcaagcaggccauccagcggcugaaggcgcccgcccagauguccauccagcucaucaacaaggccgugaacgcccugaucaacgaccagcugaucaugaagaaccaccuccgcgacaucauggggauccccuacugcaacuacagcaaguacugguaccugaacaacacggccaccggcaagaccucccugcccaagugcuggcucaucagcaacggcuccuaccugaacgagacccacuucagcgacgacaucgagcaggaggcggacaacaugaucacggagaugcugcagaaggaguacauggagcggcaggggaagaccccgcucggccuggucgaccuguucguguucuccaccagcuucuaccugaucuccaucuuccuccaccuggugaagauccccacccaccgccacaucgucggcaagagcugccccaagccccaccggcugaaccacauggggaucugcuccugcgggcucuacaagcagccgggcgugcccgugcgcuggaagcggugaggacuagucccuguucccagagcccacuuuuuuuucuuuuuuugaaauaaaauagccugucuuucagaucucaaaggcucuuuucagagccaccaaaaaaaaaaaaaaaaaaaaaaaaaaaaaaaaaaaaaaaaaaaaaaaaaaaaaaaaaaaaaaaaaaaaaaaaaaaaaaaaaaaaaaaaaaaaaaaaaaaaa

SEQ ID NO: 23677 - RNA, 1767 nt, Artificial Sequence
  mRNA product Design a-2 (hSL-A100) comprising derived and/or modified sequence from LASV(G3010-SLE-2013;Clade IV)__AIT17344__GPCmut2 (opt1)
aggagaguccgcucagccagguugcagaagcggcuuagcguguguccuaaucuucucucugcguguagguaggccugugccgcaaacaagcuuaccaugggccagaucgugaccuucuuccaggaggucccccacgugaucgaggaggugaugaacaucguccugaucgcccucagcauccuggccgugcugaaggggcucuacaacuucgcgaccugcggccugguggggcuggucacguuccuccugcugugcggccgcuccugcaccaccagccucuacaaggggguguacgagcugcagacccuggagcucaacauggagacgcugaacaugugcaugccgcuguccugcaccaagaacaacagccaccacuacaucauggugggcaacgagaccggccucgagcugacccugacgaacaccuccaucaucaaccacaaguucugcaaccucagcgacgcccacaagaagaaccuguacaaccacgcccugauguccaucaucagcaccuuccaccucuccauccccaacuucaaccaguacgaggccaugagcugcgacuucaacgggggcaagaucuccguccaguacaaccugagccacuccuacgccggggacgcggccagccacugcggcaccguggccaacggggugcugcagacguucaugcggauggccuggggcggcuccuacaucgcgcucgacagcggguacggcaagugggacugcaucaugaccuccuaccaguaccugaucauccagaacaccaccugggaggaccacugccaguucagccgccccucccccaucggguaccugggccuccugagccagcggacgcgcgacaucuacaucagccggcgccggcgcggcaccuucaccuggacccuguccgacagcgaggggaaggacacgccgggcggguacugccucacccgguggaugcugaucgaggccgagcugaagugcuucggcaacaccgccgucgccaagugcaacgagaagcacgacgaggaguucugcgacaugcuccgccuguucgacuucugcaagcaggccauccagcggcugaagacccccgcgcagauguccauccagcucaucaacaaggccgugaacgcccugaucaacgaccagcugaucaugaagaaccaccuccgcgacaucauggggauccccuacugcaacuacagcaaguacugguaccugaaccacacgaccaccggcaagaccucccugcccaagugcuggcucgugagcaacggcuccuaccugaacgagacgcacuucagcgacgacaucgagcagcaggccgacaacaugaucaccgagaugcugcagaaggaguacauggagcggcaggggaagaccccgcucggccuggucgaccuguucguguucuccaccagcuucuaccugaucuccaucuuccuccaccuggugaagauccccacgcaccgccacaucgucggcaagagcugccccaagccccaccggcugaaccacauggggaucugcuccugcgggcucuacaagcagccgggcgugcccgugcgcuggaagcggugaggacuagucccuguucccagagcccacuuuuuuuucuuuuuuugaaauaaaauagccugucuuucagaucucaaaggcucuuuucagagccaccaaaaaaaaaaaaaaaaaaaaaaaaaaaaaaaaaaaaaaaaaaaaaaaaaaaaaaaaaaaaaaaaaaaaaaaaaaaaaaaaaaaaaaaaaaaaaaaaaaaaa

SEQ ID NO: 23678 - RNA, 1767 nt, Artificial Sequence
  mRNA product Design a-2 (hSL-A100) comprising derived and/or modified sequence from LASV(G502-SLE-2009;Clade IV)__AIT17126__GPCmut2 (opt1)
aggagaguccgcucagccagguugcagaagcggcuuagcguguguccuaaucuucucucugcguguagguaggccugugccgcaaacaagcuuaccaugggccagaucgugaccuucuuccaggaggucccccacgugaucgaggaggugaugaacaucguccugaucgcccucagcauccuggccgugcugaaggggcucuacaacuucgcgaccugcggccugguggggcugcucacguuccugcugcucugcggccgcuccugcaccaccgggcuguacaagggcgucuacgagcugcagacccucgagcugaacauggagacgcugaacaugugcaugccgcucagcugcaccaagaacaacucccaccacuacaucauggugggcaacgagaccgggcuggagcugacccucacgaacaccagcaucaucaaccacaaguucugcaaccuguccgacgcccacaagaagaaccuguacgaccacgcccucaugagcaucaucuccaccuuccaccugagcauccccaacuucaaccaguacgaggccauguccugcgacuucaacggcgggaagaucagcgugcaguacaaccugucccacagcuacgccggcgacgcggccgaccacugcgggaccgucgccaacggcgugcuccagacguucaugcggauggccuggggcggguccuacaucgcgcuggacagcggccgcgggcggugggacugcaucaugaccuccuaccaguaccugaucauccagaacaccaccugggaggaccacugccaguucagccgccccucccccaucggcuaccucggccugcugagccagcggacgcgcgacaucuacaucucccggcgccggcgcgggaccuucaccuggacccucagcgacagcgagggcaaggacacgcccgggggcuacugccugacccgguggaugcugaucgaggccgagcucaagugcuucgggaacaccgccguggccaagugcaacgagaagcacgacgaggaguucugcgacaugcugcgccuguucgacuucugcaagcaggccauccagcggcucaaggcgccggcccagauguccauccagcugaucaacaaggccgucaacgcccugaucaacgaccagcucgugaugaagaaccaccuccgcgacaucaugggcauccccuacugcaacuacagccgguacugguaccugaaccacaccacgaccggccgcaccucccugcccaagugcuggcuggugagcaacggguccuaccugaacgagacccacuucagcgacgacaucgagcagcaggccgacaacaugaucacggagaugcuccagaaggaguacauggagcggcagggcaagaccccgcuggggcuggucgaccuguucguguucuccaccagcuucuaccucaucuccaucuuccugcaccuggugaagauccccacccaccgccacaucgucggcaagagcugccccaagccccaccggcucaaccacauggggaucugcuccugcggccuguacaagcagccgggcgugcccgugaaguggaagcgcugaggacuagucccuguucccagagcccacuuuuuuuucuuuuuuugaaauaaaauagccugucuuucagaucucaaaggcucuuuucagagccaccaaaaaaaaaaaaaaaaaaaaaaaaaaaaaaaaaaaaaaaaaaaaaaaaaaaaaaaaaaaaaaaaaaaaaaaaaaaaaaaaaaaaaaaaaaaaaaaaaaaaa

SEQ ID NO: 23679 - RNA, 1767 nt, Artificial Sequence
  mRNA product Design a-2 (hSL-A100) comprising derived and/or modified sequence from LASV(G733-SLE-2010;Clade IV)__AIT17154__GPCmut2 (opt1)
aggagaguccgcucagccagguugcagaagcggcuuagcguguguccuaaucuucucucugcguguagguaggccugugccgcaaacaagcuuaccaugggccagaucgugaccuucuuccaggaggucccccacgugaucgaggaggugaugaacaucguccugaucgcccucagcauccuggccgugcugaaggggcucuacaacuucgcgaccugcggcaucguggggcuggucuccuuccugcuccugugcggccgcagcugcacgaccucccuguacaaggggguguacgagcuccagacccuggagcugaacauggagacccucaacaugugcaugccgcugagcugcacgaagaacaacucccaccacuacaucauggugggcaacgagaccggccuggagcucacccugaccaacacgagcaucaucaaccacaaguucugcaaccuguccgacgcccacaagaagaaccucuacgaccacgcccugaugagcaucaucuccaccuuccaccugagcauccccaacuucaaccaguacgaggccauguccugcgacuucaacgggggcaagaucagcguccaguacaaccucucccacagcuacgccggggacgcggccaaccacugcggcaccaucgccaacggggugcugcagaccuucaugcggauggccuggggcggcuccuacaucgcgcuggacagcgggcgcgaccggugggacugcaucaugacguccuaccaguaccucaucauccagaacaccaccugggaggaccacugccaguucagccgccccucccccaucggcuaccuggggcugcucagccagcggacccgcgacaucuacaucagccggcgccggcgcggcacguucaccuggacccuguccgacagcgagggcaaggacacccccgggggcuacugccugacgcgguggaugcucaucgaggccgagcugaagugcuucgggaacaccgccguggccaagugcaacgagaagcacgacgaggaguucugcgacaugcugcgccucuucgacuucugcaagcaggccauccagcggcugaaggcgccggcccagauguccauccagcugaucaacaaggccgucaacgcccucaucaacgaccagcugaucaugaagaaccaccuccgcgacaucaugggcauccccuacugcaacuacagcaaguacugguaccugaaccacaccaccacggggaagaccucccugcccaagugcuggcuggugagcaacggcuccuaccucaacgagacccacuucagcgacgacaucgagcagcaggccgacaacaugaucaccgagaugcugcagaaggaguacauggagcggcagggcaagacgccgcuggggcucguggaccuguucgucuucuccaccagcuucuaccugaucuccaucuuccugcaccucgugaagauccccacccaccgccacguggucggcaagagcugccccaagccccaccggcugaaccacauggggaucugcuccugcggccuguacgggcagccgggcgugcccgugaaguggaagcgcugaggacuagucccuguucccagagcccacuuuuuuuucuuuuuuugaaauaaaauagccugucuuucagaucucaaaggcucuuuucagagccaccaaaaaaaaaaaaaaaaaaaaaaaaaaaaaaaaaaaaaaaaaaaaaaaaaaaaaaaaaaaaaaaaaaaaaaaaaaaaaaaaaaaaaaaaaaaaaaaaaaaaa

SEQ ID NO: 23680 - RNA, 1767 nt, Artificial Sequence
  mRNA product Design a-2 (hSL-A100) comprising derived and/or modified sequence from MOPV/LASV reassortant(IGS-1;Clade IV)__AFY05576__GPCmut2 (opt1)
aggagaguccgcucagccagguugcagaagcggcuuagcguguguccuaaucuucucucugcguguagguaggccugugccgcaaacaagcuuaccaugggccagaucgugaccuucuuccaggaggucccccacgugaucgaggaggugaugaacaucguccugaucgcccucagcgugcuggccgugcugaaggggcucuacaacuucgcgaccugcggccuggucgggcuggugacguuccuccugcugugcggccgcuccugcaccaccagccucuacaaggggguguacgagcugcagacccuggagcucaacauggagacgcugaacaugugcaugccgcuguccugcaccaagaacaacagccaccacuacaucauggucggcaacgagaccggccucgagcugacccugacgaacaccuccaucaucaaccacaaguucugcaaccucagcgacgcccacaagaagaaccuguacgaccacgcccugauguccaucaucagcaccuuccaccucuccauccccaacuucaaccaguacgaggccaugagcugcgacuucaacgggggcaagaucuccgugcaguacaaccugagccacuccuacgccggggacgcggccaaccacugcggcaccguggccaacgggguccugcagacguucaugcggauggccuggggcggcagcuacaucgcgcucgacuccgggcgcggcaacugggacugcaucaugaccagcuaccaguaccugaucauccagaacaccaccugggaggaccacugccaguucucccggcccagccccaucggguaccugggccuccugucccagcgcacgcgggacaucuacaucagccgccggcgccggggcaccuucaccuggacccugagcgacuccgagggggaggacacgccgggcggguacugccucacccgcuggaugcugaucgaggccgagcugaagugcuucggcaacaccgccguggccaagugcaacgagaagcacgacgaggaguucugcgacaugcuccggcuguucgacuucugcaagcaggccauccagcgccugaaggcgcccgcccagaugagcauccagcucaucaacaaggccgugaacgcccugaucaacgaccagcugaucaugaagaaccaccuccgggacaucauggggauccccuacugcaacuacuccaaguacugguaccugaaccacaccacgaccggccgcaccagccugcccaagugcuggcucgucuccaacggcagcuaccugaacgagacccacuucuccgacgacaucgagcagcaggccgacaacaugaucacggagaugcugcagaaggaguacauggagcggcaggggaagaccccgcucggccugguggaccuguucguguucagcaccuccuucuaccugaucagcaucuuccuccaccuggucaagauccccacccaccgccacaucguggggaaguccugccccaagccccaccggcugaaccacaugggcaucugcagcugcgggcucuacaagcagccgggcgugcccgucaaguggaagcgcugaggacuagucccuguucccagagcccacuuuuuuuucuuuuuuugaaauaaaauagccugucuuucagaucucaaaggcucuuuucagagccaccaaaaaaaaaaaaaaaaaaaaaaaaaaaaaaaaaaaaaaaaaaaaaaaaaaaaaaaaaaaaaaaaaaaaaaaaaaaaaaaaaaaaaaaaaaaaaaaaaaaaa

SEQ ID NO: 23681 - RNA, 1767 nt, Artificial Sequence
  mRNA product Design a-2 (hSL-A100) comprising derived and/or modified sequence from LASV(LM765-SLE-2012;Clade IV)__AIT17814__GPCmut2 (opt1)
aggagaguccgcucagccagguugcagaagcggcuuagcguguguccuaaucuucucucugcguguagguaggccugugccgcaaacaagcuuaccaugggccagaucgugaccuucuuccaggaggucccccacgugaucgaggaggugaugaacaucguccugaucgcccucagcauccuggccgugcugaaggggcucuacaacuucgcgaccugcggccugguggggcuggucacguuccuccugcugugcggccgcuccugcaccaccagccucuacaaggggguguacgagcugcagacccuggagcucaacauggagacgcugaacaugugcaugccgcuguccugcaccaagaacaacagccaccacuacaucauggugggcaacgagaccggccucgagcugacccugacgaacaccuccaucaucgaccacaaguucugcaaccucagcgacgcccaccggaagaaccuguacgaccacgcccugauguccaucaucagcaccuuccaccucuccauccccaacuucaaccaguacgaggccaugagcugcgacuucaacgggggcaagaucuccguccaguacaaccugagccacuccuacgccaaggacgcggccgaccacugcgggaccguggccaacggcgugcugcagacguucaugcgcauggccuggggcgggagcuacaucgcgcucgacuccggccgggggcgcugggacugcaucaugaccagcuaccaguaccugaucauccagaacaccaccugggaggaccacugccaguucucccggcccagccccaucggcuaccuggggcuccugucccagcgcacgcgggacaucuacaucagccgccggcgccggggcaccuucaccuggacccugagcgacuccgagggcaaggacacgcccgggggcuacugccucacccgcuggaugcugaucgaggccgagcugaagugcuucgggaacaccgccgucgccaagugcaacgagaagcacgacgaggaguucugcgacaugcuccggcuguucgacuucugcaagcaggccauccagcgccugaaggcgccggcccagaugagcauccagcucaucaacaaggccgugaacgcccugaucaacgaccagcugaucaugaagaaccaccuccgggacaucaugggcauccccuacugcaacuacuccaaguacugguaccugaaccacaccacgaccgggaagaccagccugcccaagugcuggcucguguccaacggcagcuaccugaacgagacccacuucuccgacgacaucgagcagcaggccgacaacaugaucacggagaugcugcagaaggaguacauggagcgccagggcaagaccccgcucgggcuggucgaccuguucguguucagcaccuccuucuaccugaucagcaucuuccuccaccuggugaagauccccacccaccggcacaucgucggcaagcccugccccaagccgcaccgccugaaccacauggggaucugcuccugcggccucuacaagcagcccggggugcccgugaaguggaagcggugaggacuagucccuguucccagagcccacuuuuuuuucuuuuuuugaaauaaaauagccugucuuucagaucucaaaggcucuuuucagagccaccaaaaaaaaaaaaaaaaaaaaaaaaaaaaaaaaaaaaaaaaaaaaaaaaaaaaaaaaaaaaaaaaaaaaaaaaaaaaaaaaaaaaaaaaaaaaaaaaaaaaa

SEQ ID NO: 23682 - RNA, 1767 nt, Artificial Sequence
  mRNA product Design a-2 (hSL-A100) comprising derived and/or modified sequence from LASV(LM776-SLE-2012;Clade IV)__AIT17824__GPCmut2 (opt1)
aggagaguccgcucagccagguugcagaagcggcuuagcguguguccuaaucuucucucugcguguagguaggccugugccgcaaacaagcuuaccaugggccagaucgugaccuucuuccaggaggucccccacgugaucgaggaggugaugaacaucguccugaucgcccucagcauccuggccgugcugaaggggcucuacaacuucgcgaccugcggccugguggggcuggucacguuccuccugcugugcggccgcuccugcaccaccagcguguacaaggggguguacgagcuccagacccuggagcugaacauggagacgcucaacaugugcaugccgcuguccugcaccaagaacaacagccaccacuacaucauggucggcaacgagaccggccuggagcucacccugacgaacaccuccaucaucaaccacaaguucugcaaccugagcgacgcccacaagaagaaccucuacgaccacgcccugauguccaucaucagcaccuuccaccuguccauccccaacuucaaccaguacgaggccaugagcugcgacuucaacgggggcaagaucuccgugcaguacaaccucagccacuccuacgccggggacgcggccaaccacugcggcaccguggccaacgggguccugcagacguucaugcggauggccuggggcggcagcuacaucgcgcuggacuccgggcacggcaagugggacugcaucaugaccagcuaccaguaccucaucauccagaacaccaccugggaggaccacugccaguucucccgccccagccccaucggguaccugggccugcucucccagcggacgcgcgacaucuacaucagccggcgccggcgcggcaccuucaccuggacccugagcgacuccgaggggaaggacacgccgggcggguacugccugacccgguggaugcucaucgaggccgagcugaagugcuucggcaacaccgccguggccaagugcaacgagaagcacgacgaggaguucugcgacaugcugcgccucuucgacuucugcaagcaggccauccagcggcugaaggcgcccgcccagaugagcauccagcugaucaacaaggccgugaacgcccucaucaacgaccagcugaucaugaagaaccaccuccgcgacaucauggggauccccuacugcaacuacuccaaguacugguaccugaaccacaccacgaccggcaagaccagccugcccaagugcuggcuggucuccaacggcagcuaccucaacgagacccacuucuccgacgacaucgagcagcaggccgacaacaugaucacggagaugcugcagaaggaguacauggagcggcaggggaagaccccgcugggccucguggaccuguucguguucagcaccuccuucuaccugaucagcaucuuccugcaccucgucaagauccccacccaccgccacaucguggggaaguccugccccaagccccaccggcugaaccacaugggcaucugcagcugcgggcuguacaagcagccgggcgugcccguccgcuggaagcggugaggacuagucccuguucccagagcccacuuuuuuuucuuuuuuugaaauaaaauagccugucuuucagaucucaaaggcucuuuucagagccaccaaaaaaaaaaaaaaaaaaaaaaaaaaaaaaaaaaaaaaaaaaaaaaaaaaaaaaaaaaaaaaaaaaaaaaaaaaaaaaaaaaaaaaaaaaaaaaaaaaaaa

SEQ ID NO: 23683 - RNA, 1767 nt, Artificial Sequence
  mRNA product Design a-2 (hSL-A100) comprising derived and/or modified sequence from LASV(Mad39;Clade IV)__ANH09722__GPCmut2 (opt1)
aggagaguccgcucagccagguugcagaagcggcuuagcguguguccuaaucuucucucugcguguagguaggccugugccgcaaacaagcuuaccaugggccagaucgugaccuucuuccaggaggucccccacgugaucgaggaggugaugaacaucguccugaucgcccucagcauccuggccgugcugaaggggcucuacaacguggcgaccugcggccugaucgggcuggucacguuccuccugcugugcggccgcuccugcaccaccacccucuacaaggggguguacgagcugcaggcccuggagcucaacauggagacgcugaacaugugcaugccgcugagcugcaccaagaacaacucccaccacuacauccgggugggcaacgagaccggccucgagcugacccugacgaacaccagccucaucaaccacaaguucugcaaccuguccgacgcccacaagaagaaccuguacgaccacgcccucaugagcaucaucuccaccuuccaccugagcauccccaacuucaaccaguacgaggccauguccugcgacuucaacgacgggaagaucagcguccaguacaaccugucccacaccuacgcgggcgacacggccaaccacugcgggaccguggccaacggcgugcuccagaccuucaugcgcauggccuggggcgggagcuacaucgcgcuggacuccggccgcgggggcugggacugcaucaugaccagcuaccaguaccugaucauccagaacacgaccugggaggaccacugccaguucucccggcccagccccaucggguaccucggccugcugucccagcggacccgcgacaucuacaucagccggcgccggcgcggcaccuucacguggacccucuccgacagcgaggggaaggacaccccgggcggguacugccugacccgguggaugcugaucgaggccgagcucaagugcuucggcaacacggccgucgccaagugcaacgagaagcacgacgaggaguucugcgacaugcugcgccuguucgacuucugcaagcaggccauccagcggcucaaggcgcccgcccagaugagcauccagcugaucaacaaggccgugaacgcccugaucaacgaccagcucaucaugaagaaccaccuccgcgacaucauggggauccccuacugcaacuacuccaaguacugguaccugaaccacaccgugaccggcaagaccagccugcccaagugcuggcuggucuccaacggcagcuaccugaacgagacgcacuucuccgacgacaucgagcagcaggccgacaacaugaucaccgagaugcuccagaaggaguacauggagcggcaggggaagaccccgcugggccugguggaccuguucguguucagcaccuccuucuaccucaucagcaucuuccugcaccuggucaagauccccacgcaccgccacgugguggggaagcccugccccaagccgcaccggcucaaccacaugggcaucugcuccugcggguucuacaagcagcccggcguccccgugcgcuggaagcggugaggacuagucccuguucccagagcccacuuuuuuuucuuuuuuugaaauaaaauagccugucuuucagaucucaaaggcucuuuucagagccaccaaaaaaaaaaaaaaaaaaaaaaaaaaaaaaaaaaaaaaaaaaaaaaaaaaaaaaaaaaaaaaaaaaaaaaaaaaaaaaaaaaaaaaaaaaaaaaaaaaaaa

SEQ ID NO: 23684 - RNA, 1767 nt, Artificial Sequence
  mRNA product Design a-2 (hSL-A100) comprising derived and/or modified sequence from LASV(Z0947-SLE-2011;Clade IV)__AIT17840__GPCmut2 (opt1)
aggagaguccgcucagccagguugcagaagcggcuuagcguguguccuaaucuucucucugcguguagguaggccugugccgcaaacaagcuuaccaugggccagaucgugaccuucuuccaggaggucccccacgugaucgaggaggugaugaacaucguccugaucgcccucagcauccuggccgugcugaaggggcucuacaacuucgcgaccugcggccugguggggcuggucacguuccuccugcugugcggccgcuccugcaccaucagccucuacaaggggguguacgagcugcagacccuggagcucaacauggagacccugaacaugugcaugccgcuguccugcacgaagaacaacagccaccacuacaucauggugggcaacgagaccggccucgagcugacccugaccaacacguccaucaucaaccacaaguucugcaaccucagcgacgcccacaagaagaaccuguacgaccacgcccugauguccaucaucagcaccuuccaccucuccauccccaacuucaaccaguacgaggccaugagcugcgacuucaacgggggcaagaucuccguccaguacaaccugagccacuccuacgccggggacgcggccaaccacugcggcaccguggccaacggggugcugcagaccuucaugcggauggccuggggcggcagcuacaucgcgcucgacuccgggcgcgaccggugggacugcaucaugacgagcuaccaguaccugaucauccagaacaccaccugggaggaccacugccaguucucccgccccagccccaucggcuaccuggggcuccugucccagcggacccgcgacaucuacaucagccggcgccggcgcggcacguucaccuggacccugagcgacuccgagggcaaggacacccccgggggcuacugccucacgcgguggaugcugaucgaggccgagcugaagugcuucgggaacaccgccgucgccaagugcaacgagaagcacgacgaggaguucugcgacaugcuccgccuguucgacuucugcaagcaggccauccagcggcugaaggcgccggcccagaugagcauccagcucaucaacaaggccgugaacgcccugaucaacgaccagcugaucaugaagaaccaccuccgcgacaucaugggcauccccuacugcaacuacuccaaguacugguaccugaaccacaccaccacggggaagaccagccugcccaagugcuggcucguguccaacggcagcuaccugaacgagacccacuucuccgacgacaucgagcagcaggccgacaacaugaucaccgagaugcugcagaaggaguacauggagcggcagggcaagacgccgcucgggcuggucgaccuguucguguucagcaccuccuucuaccugaucagcaucuuccuccaccuggugaagauccccacccaccgccacaucgucggcaagcccugccccaagccgcaccggcugaaccacauggggaucugcuccugcggccucuacaagcagcccggggugcccgugaaguggaagcgcugaggacuagucccuguucccagagcccacuuuuuuuucuuuuuuugaaauaaaauagccugucuuucagaucucaaaggcucuuuucagagccaccaaaaaaaaaaaaaaaaaaaaaaaaaaaaaaaaaaaaaaaaaaaaaaaaaaaaaaaaaaaaaaaaaaaaaaaaaaaaaaaaaaaaaaaaaaaaaaaaaaaaa

SEQ ID NO: 23685 - RNA, 1767 nt, Artificial Sequence
  mRNA product Design a-2 (hSL-A100) comprising derived and/or modified sequence from LASV(Josiah;Clade IV)__NP_694870__GPCmut2 (opt4)
aggagaguccgcucagccagguugcagaagcggcuuagcguguguccuaaucuucucucugcguguagguaggccugugccgcaaacaagcuuaccaugggccagaucgugaccuucuuccaggaggugccccacgugaucgaggaggugaugaacaucgugcugaucgcccugagcgugcuggccgugcugaagggccuguacaacuucgccaccugcggccuggugggccuggugaccuuccugcugcugugcggcagaagcugcaccaccagccuguacaagggcguguacgagcugcagacccuggagcugaacauggagacccugaacaugugcaugccccugagcugcaccaagaacaacagccaccacuacaucauggugggcaacgagaccggccuggagcugacccugaccaacaccagcaucaucaaccacaaguucugcaaccugagcgacgcccacaagaagaaccuguacgaccacgcccugaugagcaucaucagcaccuuccaccugagcauccccaacuucaaccaguacgaggccaugagcugcgacuucaacggcggcaagaucagcgugcaguacaaccugagccacagcuacgccggcgacgccgccaaccacugcggcaccguggccaacggcgugcugcagaccuucaugagaauggccuggggcggcagcuacaucgcccuggacagcggcagaggcaacugggacugcaucaugaccagcuaccaguaccugaucauccagaacaccaccugggaggaccacugccaguucagcagacccagccccaucggcuaccugggccugcugagccagagaaccagagacaucuacaucagcagaagaagaagaggcaccuucaccuggacccugagcgacagcgagggcaaggacacccccggcggcuacugccugaccagauggaugcugaucgaggccgagcugaagugcuucggcaacaccgccguggccaagugcaacgagaagcacgacgaggaguucugcgacaugcugagacuguucgacuucugcaagcaggccauccagagacugaaggcccccgcccagaugagcauccagcugaucaacaaggccgugaacgcccugaucaacgaccagcugaucaugaagaaccaccugagagacaucaugggcauccccuacugcaacuacagcaaguacugguaccugaaccacaccaccaccggcagaaccagccugcccaagugcuggcuggugagcaacggcagcuaccugaacgagacccacuucagcgacgacaucgagcagcaggccgacaacaugaucaccgagaugcugcagaaggaguacauggagagacagggcaagaccccccugggccugguggaccuguucguguucagcaccagcuucuaccugaucagcaucuuccugcaccuggugaagauccccacccacagacacaucgugggcaagagcugccccaagccccacagacugaaccacaugggcaucugcagcugcggccuguacaagcagcccggcgugcccgugaaguggaagagaugaggacuagucccuguucccagagcccacuuuuuuuucuuuuuuugaaauaaaauagccugucuuucagaucucaaaggcucuuuucagagccaccaaaaaaaaaaaaaaaaaaaaaaaaaaaaaaaaaaaaaaaaaaaaaaaaaaaaaaaaaaaaaaaaaaaaaaaaaaaaaaaaaaaaaaaaaaaaaaaaaaaaa

SEQ ID NO: 23686 - RNA, 1764 nt, Artificial Sequence
  mRNA product Design a-2 (hSL-A100) comprising derived and/or modified sequence from LASV(LP;Clade I)__AAF86701__GPCmut2 (opt4)
aggagaguccgcucagccagguugcagaagcggcuuagcguguguccuaaucuucucucugcguguagguaggccugugccgcaaacaagcuuaccaugggccagaucaucaccuucuuccaggaggugccccacgugaucgaggaggugaugaacaucgugcugaucgcccugagccugcuggccauccugaagggccuguacaacaucgccaccugcggcaucaucggccugguggccuuccuguuccugugcggcaagagcugcagccugacccugaagggcggcuacgagcugcagacccuggagcugaacauggagacccugaacaugugcaugccccugagcugcaccaagaacagcagccaccacuacaucagagugggcaacgagaccggccuggagcugacccugaccaacaccagcaucaucaaccacaaguucugcaaccugagcgacgcccacaagaagaaccuguacgaccacgcccugaugagcaucaucagcaccuuccaccugagcauccccaacuucaaccaguacgaggccaugagcugcgacuucaacggcggcaagaucagcgugcaguacaaccugagccacagcuacgccggcgacgccgccgagcacugcggcaccguggccaacggcgugcugcagaccuucaugagaauggccuggggcggcagauacaucgcccuggacagcggcaagggcaacugggacugcaucaugaccagcuaccaguaccugaucauccagaacaccaccugggaggaccacugccaguucagcagacccagccccaucggcuaccugggccugcugagccagagaaccagagacaucuacaucagcagaagaagaagaggcaccuucaccuggacccugagcgacagcgagggcaacgagacccccggcggcuacugccugaccagauggaugcugaucgaggccgagcugaagugcuucggcaacaccgccguggccaagugcaacgagaagcacgacgaggaguucugcgacaugcugagacuguucgacuucugcaagcaggccaucagaagacugaaggcccccgcccagaugagcauccagcugaucaacaaggccgugaacgcccugaucaacgaccagcugaucaugaagaaccaccugagagacaucaugggcauccccuacugcaacuacagcaaguacugguaccugaaccacaccagcagcggcagaaccagccugcccaagugcuggcugaucagcaacggcagcuaccugaacgagacccaguucagcgacgacaucgagcagcaggccgacaacaugaucaccgagaugcugcagaaggaguacaucgagagacagggcaagaccccccugggccugguggacaucuucaucuucagcaccagcuucuaccugaucagcaucuuccugcaccugaucaagauccccacccacagacacaucgugggcaagcccugccccaagccccacagacugaaccacaugggcgugugcagcugcggccuguacaagcaccccggcgugcccaccaaguggaagagaugaggacuagucccuguucccagagcccacuuuuuuuucuuuuuuugaaauaaaauagccugucuuucagaucucaaaggcucuuuucagagccaccaaaaaaaaaaaaaaaaaaaaaaaaaaaaaaaaaaaaaaaaaaaaaaaaaaaaaaaaaaaaaaaaaaaaaaaaaaaaaaaaaaaaaaaaaaaaaaaaaaaaa

SEQ ID NO: 23687 - RNA, 1764 nt, Artificial Sequence
  mRNA product Design a-2 (hSL-A100) comprising derived and/or modified sequence from LASV(803213;Clade II)__AAF86703__GPCmut2 (opt4)
aggagaguccgcucagccagguugcagaagcggcuuagcguguguccuaaucuucucucugcguguagguaggccugugccgcaaacaagcuuaccaugggccagaucaucaccuucuuccaggaggugccccacgugaucgaggaggugaugaacaucgugcugaucgcccugagccugcuggccauccugaagggcaucuacaacguggccaccugcggccuguucggccugaucagcuuccugcugcugugcggcagaagcugcagcgugaccuacaagggcguguacgagcugcagacccuggagcugaacauggccaaccugaacaugugcaugccccugagcugcaccaagaacaacagccaccacuacaucauggugggcaacgagaccggccuggagcugacccugaccaacaccagcaucaucaaccacaaguucugcaaccugagcgacgcccacaagaagaaccuguacgaccacgcccugaugagcaucaucagcaccuuccaccugagcauccccaacuucaaccaguacgaggccaugagcugcgacuucaacggcggcaagaucagcgugcaguacaaccugagccacagcuucgccguggacgccgccaaccacugcggcaccaucgccaacggcgugcugcagaccuucaugagaauggccuggggcggcagcuacaucgcccuggacagcggcaagggcaacugggacugcaucaugaccagcuaccaguaccugaucauccagaacaccaccugggaggaccacugccaguucagcagacccagccccaucggcuaccugggccugcugagccagagaaccagagacaucuacaucagcagaagaagaagaggcaccuucaccuggacccugagcgacagcgagggcaacgaggcccccggcggcuacugccugaccagauggaugcugaucgaggccgagcugaagugcuucggcaacaccgccguggccaagugcaacgagaagcacgacgaggaguucugcgacaugcugagacuguucgacuucugcaagcaggccaucaagagacugaagacccccgcccagaugagcauccagcugaucaacaaggccgugaacgcccugaucaacgaccagcugaucaugaagaaccaccugagagacaucaugggcauccccuacugcaacuacagcagauacugguaccugaaccacaccgugaccggcaagaccagccugcccagaugcuggcuggugagcaacggcagcuaccugaacgagacccacuucagcgacgacaucgagcagcaggccgacaacaugaucaccgagaugcugcagaaggaguacauggacagacagggcaagaccccccugggccugguggaccuguucguguucagcaccagcuucuaccugaucagcaucuuccugcaccuggugaagauccccacccacagacacaucgugggcaagcccugccccaagccccacagacugaaccacaugggcaucugcagcugcggccuguacaagcaccccggcgugcccgugaaguggaagagaugaggacuagucccuguucccagagcccacuuuuuuuucuuuuuuugaaauaaaauagccugucuuucagaucucaaaggcucuuuucagagccaccaaaaaaaaaaaaaaaaaaaaaaaaaaaaaaaaaaaaaaaaaaaaaaaaaaaaaaaaaaaaaaaaaaaaaaaaaaaaaaaaaaaaaaaaaaaaaaaaaaaaa

SEQ ID NO: 23688 - RNA, 1764 nt, Artificial Sequence
  mRNA product Design a-2 (hSL-A100) comprising derived and/or modified sequence from LASV(GA391;Clade III)__CAA36645__GPCmut2 (opt4)
aggagaguccgcucagccagguugcagaagcggcuuagcguguguccuaaucuucucucugcguguagguaggccugugccgcaaacaagcuuaccaugggccagaucgugaccuucuuccaggaggugccccacgugaucgaggaggugaugaacaucgugcugaucgcccugagcauccuggccauccugaagggccuguacaacguggccaccugcggccugaucggccuggugaccuuccugcugcugagcggcagaagcugcagccugaucuacaagggcaccuacgagcugcagacccuggagcugaacauggagacccugaacaugugcaugccccugagcugcaccaagaacaacagccaccacuacaucagagugggcaacgagaccggccuggagcugacccugaccaacaccagcauccugaaccacaaguucugcaaccugagcgacgcccacaagagaaaccuguacgaccacagccugaugagcaucaucagcaccuuccaccugagcauccccaacuucaaccaguacgaggccaugagcugcgacuucaacggcggcaagaucaccgugcaguacaaccugagccacagcuucgccguggacgccgccggccacugcggcacccuggccaacggcgugcugcagaccuucaugagaauggccuggggcggcagcuacaucgcccuggacagcggcagaggcaacugggacugcaucaugaccagcuaccaguaccugaucauccagaacaccaccugggacgaccacugccaguucagcagacccagccccaucggcuaccugggccugcugagccagagaaccagagacaucuacaucagcagaagaagaagaggcaccuucaccuggacccugagcgacagcgagggcaacgagacccccggcggcuacugccugaccagauggaugcugaucgaggccgagcugaagugcuucggcaacaccgccguggccaagugcaacgagaagcacgacgaggaguucugcgacaugcugagacuguucgacuucugcaagcaggccaucagaagacugaagacccccgcccagaugagcauccagcugaucaacaaggccgugaacgcccugaucaacgaccagcugaucaugaagaaccaccugagagacaucaugggcauccccuacugcaacuacagcagauacugguaccugaaccacaccagcaccggcaagaccagccugcccagaugcuggcugaucagcaacggcagcuaccugaacgagaccaaguucagcgacgacaucgagcagcaggccgacaacaugaucaccgagaugcugcagaaggaguacaucgacagacagggcaagaccccccugggccugguggaccuguucguguucagcaccagcuucuaccugaucagcaucuuccugcaccuggugaagauccccacccacagacacaucgugggcaagcccugccccaagccccacagacugaaccacaugggcaucugcagcugcggccuguacaagcagcccggcgugcccgugagauggaagagaugaggacuagucccuguucccagagcccacuuuuuuuucuuuuuuugaaauaaaauagccugucuuucagaucucaaaggcucuuuucagagccaccaaaaaaaaaaaaaaaaaaaaaaaaaaaaaaaaaaaaaaaaaaaaaaaaaaaaaaaaaaaaaaaaaaaaaaaaaaaaaaaaaaaaaaaaaaaaaaaaaaaaa

SEQ ID NO: 23689 - RNA, 1767 nt, Artificial Sequence
  mRNA product Design a-2 (hSL-A100) comprising derived and/or modified sequence from LASV(AV;Clade V)__CCA30314__GPCmut2 (opt4)
aggagaguccgcucagccagguugcagaagcggcuuagcguguguccuaaucuucucucugcguguagguaggccugugccgcaaacaagcuuaccaugggccagaucgugaccuucuuccaggaggugccccacgugaucgaggaggugaugaacaucgugcugaucgcccugagcauccuggccgugcugaagggccuguacaacaucgccaccugcggccugaucggccugaucaccuuccugcugcugugcggcagaagcugcagcagcaaccuguacaagggcguguacgagcugcagagccuggaccugaacauggagacccugaacaugugcaugccccugagcugcaccaagaacaacagccaccacuacaucagagugggcaacgacaccggccuggagcugacccugaccaacaccagcauccugaaccacaaguucugcaaccugagcgacgcccacaagaaggaccuguacgaccacgcccugaugagcaucaucagcaccuuccaccugagcauccccaacuucaaccaguacgaggccaugagcugcgacuucaacggcggcaagaucagcgugcaguacaaccugagccacagcuacgccaucgacgccgccaaccacugcggcaccguggccaacggcauccugcagaccuucaugagaauggccuggggcggcagcuacaucgcccuggacagcggcagaggcaacugggacugcaucaugaccagcuaccaguaccugaucauccagaacaccaccugggagaaccacugccaguucagcagacccagccccaucggcuaccugggccugcugagccagagaaccagagacaucuacaucagcagaagaagaagaggcaccuucaccuggacccugagcgacagcgagggcaacgccacccccggcggcuacugccugaccagauggaugcugaucgaggccgagcugaagugcuucggcaacaccgccguggccaagugcaacgagaagcacgacgaggaguucugcgacaugcugagacuguucgacuucugcaagcaggccaucagcagacugaagagccccgcccagaugagcauccagcugaucaacaaggccgugaacgcccugaucaacgaccagcugaucaugaagaaccaccugagagacaucaugggcauccccuacugcaacuacagcaaguacugguaccugaaccacaccaucaccggcaagaccagccugcccaagugcuggcuggugagcaacggcagcuaccugaacgagacccacuucagcgacgacaucgagcagcaggccgacaacaugaucaccgagaugcugcagaaggaguacauggagagacagggcaagaccccccugggccugguggaccuguucguguucagcaccagcuucuaccugaucagcaucuuccugagacuggugaagauccccacccacagacacaucgugggcaagcccugccccaagccccacagacugaaccacaugggcaucugcagcugcggccuguacaagcagcccggcgugcccgugagauggaagagaugaggacuagucccuguucccagagcccacuuuuuuuucuuuuuuugaaauaaaauagccugucuuucagaucucaaaggcucuuuucagagccaccaaaaaaaaaaaaaaaaaaaaaaaaaaaaaaaaaaaaaaaaaaaaaaaaaaaaaaaaaaaaaaaaaaaaaaaaaaaaaaaaaaaaaaaaaaaaaaaaaaaaa

SEQ ID NO: 23690 - RNA, 1764 nt, Artificial Sequence
  mRNA product Design a-2 (hSL-A100) comprising derived and/or modified sequence from LASV(Togo/2016/7082;Clade VI)__AMR44577__GPCmut2 (opt4)
aggagaguccgcucagccagguugcagaagcggcuuagcguguguccuaaucuucucucugcguguagguaggccugugccgcaaacaagcuuaccaugggccagaucaucaccuucuuccaggaggugccccacgugaucgaggaggugaugaacaucgugcugaucgcccugagccugcuggccauccugaagggcguguacaacguggccaccugcggcaucaucggccuggugaccuuccuguuccugugcggcagaagcugcagccugaucuacaagggcagcuacgagcugcagacccuggagcugaacauggagacccugaacaugugcaugccccugagcugcaccaagaacagcagccaccacuacaucagagugggcaacgagaccggccuggagcugacccugaccaacaccagcaucaucaaccacaaguucugcaaccugagcgacgcccacaagagaaaccuguacgaccacgcccugaugagcauccugagcaccuuccaccugagcauccccaacuucaaccaguacgaggccaugagcugcgacuucaacggcggcaagaucagcgugcaguacaaccugagccacgccuacgccguggacgccgccgagcacugcggcaccguggccaacggcgugcugcagaccuucaugagaauggccuggggcggcagcuacaucgcccuggacagcggcagaggcaacugggacugcaucaugaccagcuaccaguaccugaucauccagaacaccaccugggaggaccacugccaguucagcagacccagccccaucggcuaccugggccugcugagccagagaaccagagacaucuacaucagcagaagaagaagaggcaccuucaccuggacccugagcgacagcgagggcaacgagacccccggcggcuacugccugaccagauggaugcugaucgaggccgagcugaagugcuucggcaacaccgccguggccaagugcaacgagaagcacgacgaggaguucugcgacaugcugagacuguucgacuucugcaagcaggccauccagagacugaagagccccgcccagaugagcauccagcugaucaacaaggccgugaacgcccugaucaacgaccagcugaucaugaagaaccaccugagagacaugaugggcauccccuacugcaacuacagcaaguacugguaccugaaccacaccagcagcggcagaaccagccugcccaagugcuggcuggugagcaacggcagcuaccugaacgagacccacuucagcgacgacaucgagcagcaggccgacaacaugaucaccgagaugcugcagaaggaguacaucgacagacagggcaagaccccccugggccugguggaccuguucguguucagcaccagcuucuaccugaucagcaucuuccugcaccugaucaagauccccacccacagacacaucgugggcaagcccugccccaagccccacagacugaaccacaugggcaucugcagcugcggccuguacaagcagcccggcgugcccaccagauggaagagaugaggacuagucccuguucccagagcccacuuuuuuuucuuuuuuugaaauaaaauagccugucuuucagaucucaaaggcucuuuucagagccaccaaaaaaaaaaaaaaaaaaaaaaaaaaaaaaaaaaaaaaaaaaaaaaaaaaaaaaaaaaaaaaaaaaaaaaaaaaaaaaaaaaaaaaaaaaaaaaaaaaaaa

SEQ ID NO: 23691 - RNA, 1764 nt, Artificial Sequence
  mRNA product Design a-2 (hSL-A100) comprising derived and/or modified sequence from LASV(KAK-428;Clade n.d. (VII))__ANH09740__GPCmut2 (opt4)
aggagaguccgcucagccagguugcagaagcggcuuagcguguguccuaaucuucucucugcguguagguaggccugugccgcaaacaagcuuaccaugggccagaucgugaccuucuuccaggaggugccccacgugaucgaggaggugaugaacaucgugcugaucgcccugagccugcuggccauccugaagggccuguacaacuucgccaccugcggcgugaucggccugaucaccuuccugcugcugugcggcagaagcugcagcgccaccuacaagggccaguacgagcugcagacccuggagcugaacauggagagccugaacaugugcaugccccugagcugcaccaagaacaacagccaccacuacaucagagccggcaacaacaccggccuggagcugacccugaccaacaccagcaucaucagccacaaguucugcaaccugagcgacgcccacaagaagaaccuguacgaccacacccugaugagcaucaucaccaccuuccaccugagcauccccaacuucaaccaguacgaggccaugagcugcgacuucaacggcggcaagaucagcauccaguacaaccugagccacagcuacgccggcgacgccgcccagcacugcggcaccguggccaacggcgugcugcagaccuucaugagaauggccuggggcggcagcuaccuggcccuggacagcggcagaagaggcugggacugcaucaucagcagcuaccaguaccugaucauccagaacaccaccugggacgaccacugccaguucagcagacccagccccaucggcuaccugggcuucgugagccagaagaccagagacaucuacaucagcagaagaagaagaggcaccuucaccuggacccugagcgacagcgagggccacgacaugcccggcggcuacugccugaccagauggaugcugaucgaggccgaccugaagugcuucggcaacaccgccguggccaagugcaacgagaagcacgacgaggaguucugcgacauguggagacuguucgacuucugcaagcaggccauccagagacugaaggcccccgcccagaugaacauccagcugaucaacaaggccgugaacgcccugaucaacgaccagcugaugaugaagaaccaccugagagacaucaugggcauccccuacugcaacuacagcaaguucugguaccugaacaacaccaccaccggcagaaccagccugcccagaugcuggcugaucagcaacggcagcuaccugaacgagacccacuucagcgacgacaucgagcagcaggccgacaacaugaucaccgagaugcugcagaaggaguacauggacagacagggcaagaccccccugggccugguggaccuguucguguucagcaccagcuucuaccugaucaccaucuuccugcaccuggugaagauccccacccacagacacaucgugggcaagcccugccccaagccccacagacugaaccacaugggcaucugcagcugcggccuguacaagcagcccggcgugcccgugagauggaagagaugaggacuagucccuguucccagagcccacuuuuuuuucuuuuuuugaaauaaaauagccugucuuucagaucucaaaggcucuuuucagagccaccaaaaaaaaaaaaaaaaaaaaaaaaaaaaaaaaaaaaaaaaaaaaaaaaaaaaaaaaaaaaaaaaaaaaaaaaaaaaaaaaaaaaaaaaaaaaaaaaaaaaa

SEQ ID NO: 23692 - RNA, 1764 nt, Artificial Sequence; identical to SEQ ID NO: 23686
  mRNA product Design a-2 (hSL-A100) comprising derived and/or modified sequence from LASV(Pinneo-NIG-1969;Clade I)__AIT17836__GPCmut2 (opt4)

SEQ ID NO: 23693 - RNA, 1764 nt, Artificial Sequence
  mRNA product Design a-2 (hSL-A100) comprising derived and/or modified sequence from LASV(ISTH0009-NIG-2011;Clade II)__AIT17404__GPCmut2 (opt4)
aggagaguccgcucagccagguugcagaagcggcuuagcguguguccuaaucuucucucugcguguagguaggccugugccgcaaacaagcuuaccaugggccagaucaucaccuucuuccaggaggugccccacgugaucgaggaggugaugaacaucgugcugaucgcccugagccugcuggccauccugaagggcaucuacaacguggccaccugcggccuguucggccuggugagcuuccugcugcugugcggcagaagcugcagcaccaccuacaagggcguguacgagcugcagacccuggagcuggacauggccagccugaacaugugcaugccccugagcugcaccaagaacaacagccaccacuacaucauggugggcaacgagaccggccuggagcugacccugaccaacaccagcaucaucaaccacaaguucugcaaccugagcgacgcccacaagaagaaccuguacgaccacgcccugaugagcaucaucagcaccuuccaccugagcauccccaacuucaaccaguacgaggccaugagcugcgacuucaacggcggcaagaucagcgugcaguacaaccugagccacgccuacgccguggacgccgccaaccacugcggcaccaucgccaacggcgugcugcagaccuucaugagaauggccuggggcggcagcuacaucgcccuggacagcggcaagggcagcugggacugcaucaugaccagcuaccaguaccugaucauccagaacaccaccugggaggaccacugccaguucagcagacccagccccaucggcuaccugggccugcugagccagagaaccagagacaucuacaucagcagaagaagaagaggcaccuucaccuggacccugagcgacagcgagggcaacgagacccccggcggcuacugccugaccagauggaugcugaucgaggccgagcugaagugcuucggcaacaccgccguggccaagugcaacgagaagcacgacgaggaguucugcgacaugcugagacuguucgacuucugcaagcaggccaucagaagacugaagacccccgcccagaugagcauccagcugaucaacaaggccgugaacgcccugaucaacgaccagcugaucaugaagaaccaccugagagacaucaugggcauccccuacugcaacuacagcaaguacugguaccugaaccacaccgugaccggcaagaccagccugcccagaugcuggcuggugagcaacggcagcuaccugaacgagacccacuucagcgacgacaucgagcagcaggccgacaacaugaucaccgagcugcugcagaaggaguacauggacagacagggcaagaccccccugggccugguggaccuguucguguucagcaccagcuucuaccugaucagcaucuuccugcaccugaucaagauccccacccacagacacaucaccggcaagcccugccccaagccccacagacugaaccacaugggcaucugcagcugcggccuguacaagcaccccggcgugcccgugaaguggaagagaugaggacuagucccuguucccagagcccacuuuuuuuucuuuuuuugaaauaaaauagccugucuuucagaucucaaaggcucuuuucagagccaccaaaaaaaaaaaaaaaaaaaaaaaaaaaaaaaaaaaaaaaaaaaaaaaaaaaaaaaaaaaaaaaaaaaaaaaaaaaaaaaaaaaaaaaaaaaaaaaaaaaaa

SEQ ID NO: 23694 - RNA, 1764 nt, Artificial Sequence
  mRNA product Design a-2 (hSL-A100) comprising derived and/or modified sequence from LASV(ISTH2010-NIG-2012;Clade II)__AIT17482__GPCmut2 (opt4)
aggagaguccgcucagccagguugcagaagcggcuuagcguguguccuaaucuucucucugcguguagguaggccugugccgcaaacaagcuuaccaugggccagaucaucaccuucuuccaggaggugccccacgugaucgaggaggugaugaacaucgugcugaucgcccugagccugcuggccauccugaagggcaucuacaacguggccaccugcggccuguucggccuggugagcuuccugcugcugugcggcagaagcugcagcaccaccuacaagggcguguacgagcugcagacccuggagcuggacauggccagccugaacaugugcaugccccugagcugcaccaagaacaacagccaccacuacaucauggugggcaacgagaccggccuggagcugacccugaccaacaccagcaucaucaaccacaaguucugcaaccugagcgacgcccacaagaagaaccuguacgaccacgcccugaugagcaucaucagcaccuuccaccugagcauccccaacuucaaccaguacgaggccaugagcugcgacuucaacggcggcaagaucagcgugcaguacaaccugagccacgccuacgccguggacgccgccaaccacugcggcaccaucgccaacggcgugcugcagaccuucaugagaauggccuggggcggcagcuacaucgcccuggacagcggcaagggcagcugggacugcaucaugaccagcuaccaguaccugaucauccagaacaucaccugggaggaccacugccaguucagcagacccagccccaucggcuaccugggccugcugagccagagaaccagagacaucuacaucagcagaagaagaagaggcaccuucaccuggacccugagcgacagcgagggcaacgagacccccggcggcuacugccugaccagauggaugcugaucgaggccgagcugaagugcuucggcaacaccgccguggccaagugcaacgagaagcacgacgaggaguucugcgacaugcugagacuguucgacuucugcaagcaggccaucagaagacugaagacccccgcccagaugagcauccagcugaucaacaaggccgugaacgcccugaucaacgaccagcugaucaugaagaaccaccugagagacaucaugggcauccccuacugcaacuacagcaaguacugguaccugaaccacaccgugaccggcaagaccagccugcccagaugcuggcuggugagcaacggcagcuaccugaacgagacccacuucagcgacgacaucgagcagcaggccgacaacaugaucaccgagcugcugcagaaggaguacaucgacagacagggcaagaccccccugggccugguggaccuguucguguucagcaccagcuucuaccugaucagcaucuuccugcaccuggugaagauccccacccacagacacguggugggcaagcccugccccaagccccacagacugaaccacaugggcaucugcagcugcggccuguacaagcaccccggcgugcccgugaaguggaagagaugaggacuagucccuguucccagagcccacuuuuuuuucuuuuuuugaaauaaaauagccugucuuucagaucucaaaggcucuuuucagagccaccaaaaaaaaaaaaaaaaaaaaaaaaaaaaaaaaaaaaaaaaaaaaaaaaaaaaaaaaaaaaaaaaaaaaaaaaaaaaaaaaaaaaaaaaaaaaaaaaaaaaa

SEQ ID NO: 23695 - RNA, 1764 nt, Artificial Sequence
  mRNA product Design a-2 (hSL-A100) comprising derived and/or modified sequence from LASV(Lassa virus/H.sapiens-wt/NGA/2015/ISTH_0543;Clade II)__AVO03639__GPCmut2 (opt4)
aggagaguccgcucagccagguugcagaagcggcuuagcguguguccuaaucuucucucugcguguagguaggccugugccgcaaacaagcuuaccaugggccagaucaucaccuucuuccaggaggugccccacgugaucgaggaggugaugaacaucgugcugaucgcccugagccugcuggccauccugaagggcaucuacaacguggccaccugcggccuguucggccuggugagcuuccugcugcugugcggcagaagcugcagcaccaccuacaagggcguguacgagcugcagacccuggagcuggacauggccaaccugaacaugugcaugccccugagcugcaccaagaacaacagccaccacuacaucauggugggcaacgagaccggccuggagcugacccugaccaacaccagcaucaucaaccacaaguucugcaaccugagcgacgcccacaagaagaaccuguacgaccacgcccugaugagcaucaucagcaccuuccaccugagcauccccaacuucaaccaguacgaggccaugagcugcgacuucaacggcggcaagaucagcgugcaguacaaccugagccacaccuacgccguggacgccgccaaccacugcggcaccaucgccaacggcgugcugcagaccuucaugagaauggccuggggcggcagcuacaucgcccuggacagcggcaagggcagcugggacugcaucaugaccagcuaccaguaccuggugauccagaacaccaccugggaggaccacugccaguucagcagacccagccccaucggcuaccugggccugcugagccagagaaccagagacaucuacaucagcagaagaagaagaggcaccuucaccuggacccugagcgacagcgagggcaacgagacccccggcggcuacugccugaccagauggaugcugaucgaggccgagcugaagugcuucggcaacaccgccguggccaagugcaacgagaagcacgacgaggaguucugcgacaugcugagacuguucgacuucugcaagcaggccaucagaagacugaagacccccgcccagaugagcauccagcugaucaacaaggccgugaacgcccugaucaacgaccagcugaucaugaagaaccaccugagagacaucaugggcauccccuacugcaacuacagcaaguacugguaccugaaccacaccgugaccggcaagaccagccugcccagaugcuggcuggugagcaacggcagcuaccugaacgagacccacuucagcgacgacaucgagcagcaggccgacaacaugaucaccgagcugcugcagaaggaguacaucgacagacagggcaagaccccccugggccugguggaccuguucguguucagcaccagcuucuaccugaucagcaucuuccugcaccuggugaagauccccacccacagacacaucaccggcaagcccugccccaagccccacagacugaaccacaugggcaucugcagcugcggccuguacaagcaccccggcgugcccgugaaguggaagagaugaggacuagucccuguucccagagcccacuuuuuuuucuuuuuuugaaauaaaauagccugucuuucagaucucaaaggcucuuuucagagccaccaaaaaaaaaaaaaaaaaaaaaaaaaaaaaaaaaaaaaaaaaaaaaaaaaaaaaaaaaaaaaaaaaaaaaaaaaaaaaaaaaaaaaaaaaaaaaaaaaaaaa

SEQ ID NO: 23696 - RNA, 1764 nt, Artificial Sequence
  mRNA product Design a-2 (hSL-A100) comprising derived and/or modified sequence from LASV(Lassa virus/H.sapiens-wt/NGA/2016/ISTH_0009;Clade II)__AVO03571__GPCmut2 (opt4)
aggagaguccgcucagccagguugcagaagcggcuuagcguguguccuaaucuucucucugcguguagguaggccugugccgcaaacaagcuuaccaugggccagaucaucaccuucuuccaggaggugccccacgugaucgaggaggugaugaacaucgugcugaucgcccugagccugcuggccauccugaagggcaucuacaacguggccaccugcggccugcugggccuggugagcuuccugcugcugugcggcagaagcugcagcaccaccuacaagggcguguacgagcugcagacccuggagcuggacauggccagccugaacaugugcaugccccugagcugcaccaagaacaacagccaccacuacaucauggugggcaacgagaccggccuggagcugacccugaccaacaccagcaucaucaaccacaaguucugcaaccugagcgacgcccacaagaagaaccuguacgaccacgcccugaugagcaucaucagcaccuuccaccugagcauccccaacuucaaccaguacgaggccaugagcugcgacuucaacggcggcagaaucagcgugcaguacaaccugagccacagcuacgccguggacgccgccaaccacugcggcaccaucgccaacggcgugcugcagaccuucaugagaauggccuggggcggcagcuacaucgcccuggacagcggcaagggcagcugggacugcaucaugaccagcuaccaguaccugaucauccagaacaccaccugggaggaccacugccaguucagcagacccagccccaucggcuaccugggccugcugagccagagaaccagagacaucuacaucagcagaagaagaagaggcaccuucaccuggacccugagcgacagcgagggcaacgagacccccggcggcuacugccugaccagauggaugcugaucgaggccgagcugaagugcuucggcaacaccgccguggccaagugcaacgagaagcacgacgaggaguucugcgacaugcugagacuguucgacuucugcaagcaggccaucagaagacugaagacccccgcccagaugagcauccagcugaucaacaaggccgugaacgcccugaucaacgaccagcugaucaugaagaaccaccugagagacaucaugggcauccccuacugcaacuacagcaaguacugguaccugaaccacaccgugaccggcaagaccagccugcccagaugcuggcuggugagcaacggcagcuaccugaacgagacccacuucagcgacgacaucgagcagcaggccgacaacaugaucaccgagcugcugcagaaggaguacaucgacagacagggcaagaccccccugggccugguggaccuguucguguucagcaccagcuucuaccugaucagcaucuuccugcaccuggugaagauccccacccacagacacaucaccggcaagcccugccccaagccccacagacugaaccacaugggcaucugcagcugcggccuguacaaccaccccggcgugcccgugaaguggaagagaugaggacuagucccuguucccagagcccacuuuuuuuucuuuuuuugaaauaaaauagccugucuuucagaucucaaaggcucuuuucagagccaccaaaaaaaaaaaaaaaaaaaaaaaaaaaaaaaaaaaaaaaaaaaaaaaaaaaaaaaaaaaaaaaaaaaaaaaaaaaaaaaaaaaaaaaaaaaaaaaaaaaaa

SEQ ID NO: 23697 - RNA, 1764 nt, Artificial Sequence
  mRNA product Design a-2 (hSL-A100) comprising derived and/or modified sequence from LASV(Lassa virus/H.sapiens-wt/NGA/2016/ISTH_0017;Clade II)__AVO03567__GPCmut2 (opt4)
aggagaguccgcucagccagguugcagaagcggcuuagcguguguccuaaucuucucucugcguguagguaggccugugccgcaaacaagcuuaccaugggccagaucaucaccuucuuccaggaggugccccacgugaucgaggaggugaugaacaucgugcugaucgcccugagccugcuggccauccugaagggcaucuacaacguggccaccugcggccuguucggccuggugagcuuccugcugcugugcggcagaagcugcagcaccaccuacaagggcguguacgagcugcagacccuggagcuggacauggccagccugaacaugugcaugccccugagcugcaccaagaacaacagccaccacuacaucauggugggcaacgagaccggccuggagcugacccugaccaacaccagcaucaucaaccacaaguucugcaaccugagcgacgcccacaagaagaaccuguacgaccacgcccugaugagcaucaucagcaccuuccaccugagcauccccaacuucaaccaguacgaggccaugagcugcgacuucaacggcggcaagaucagcgugcaguacaaccugagccacaccuacgccaucgacgccgccaaccacugcggcaccaucgccaacggcgugcugcagaccuucaugagaauggccuggggcggcagcuacaucgcccuggacagcggcaagggcagcugggacugcaucaugaccagcuaccaguaccugaucauccagaacaccaccugggaggaccacugccaguucagcagacccagccccaucggcuaccugggccugcugagccagagaaccagagacaucuacaucagcagaagaagaagaggcaccuucaccuggacccugagcgacagcgagggcaacgagacccccggcggcuacugccugaccagauggaugcugaucgaggccgagcugaagugcuucggcaacaccgccguggccaagugcaacgagaagcacgacgaggaguucugcgacaugcugagacuguucgacuucugcaagcaggccaucagaagacugaagacccccgcccagaugagcauccagcugaucaacaaggccgugaacgcccugaucaacgaccagcugaucaugaagaaccaccugagagacaucaugggcauccccuacugcaacuacagcaaguacugguaccugaaccacaccgugaccggcaagaccagccugcccagaugcuggcuggugagcaacggcagcuaccugaacgagacccacuucagcgacgacaucgagcagcaggccgacaacaugaucaccgagcugcugcagaaggaguacauggacagacagggcaagaccccccugggccugguggaccuguucguguucagcaccagcuucuaccugaucagcaucuuccugcaccuggugagaauccccacccacagacacgugaucggcaagcccugccccaagccccacagacugaaccacaugggcaucugcagcugcggccuguacaagcaccccggcgugcccgugaaguggaagagaugaggacuagucccuguucccagagcccacuuuuuuuucuuuuuuugaaauaaaauagccugucuuucagaucucaaaggcucuuuucagagccaccaaaaaaaaaaaaaaaaaaaaaaaaaaaaaaaaaaaaaaaaaaaaaaaaaaaaaaaaaaaaaaaaaaaaaaaaaaaaaaaaaaaaaaaaaaaaaaaaaaaaa

SEQ ID NO: 23698 - RNA, 1764 nt, Artificial Sequence
  mRNA product Design a-2 (hSL-A100) comprising derived and/or modified sequence from LASV(Lassa virus/H.sapiens-wt/NGA/2018/ISTH_0959;Clade II)__AVV65099__GPCmut2 (opt4)
aggagaguccgcucagccagguugcagaagcggcuuagcguguguccuaaucuucucucugcguguagguaggccugugccgcaaacaagcuuaccaugggccagaucaucaccuucuuccaggaggugccccacgugaucgaggaggugaugaacaucgugcugaucgcccugagccugcuggccauccugaagggcaucuacaacguggugaccugcggccuguucggccuggugagcuuccugcugcugugcggcagaagcugcagcaccaccuacaagggcguguacgagcugcagacccuggagcuggacauggccagccugaacaugugcaugccccugagcugcaccaagaacaacagccaccacuacaucauggugggcaacgagaccggccuggagcugacccugaccaacaccagcaucaucaaccacaaguucugcaaccugagcgacgcccacaagaagaaccuguacgaccacgcccugaugagcaucaucagcaccuuccaccugagcauccccaacuucaaccaguacgaggccaugagcugcgacuucaacggcggcaagaucagcgugcaguacaaccugagccacgccuacgccaucgacgccgccaaccacugcggcaccaucgccaacggcgugcugcagaccuucaugagaauggccuggggcggcagcuacaucgcccuggacagcggcaagggcagcugggacugcaucaugaccagcuaccaguaccugaucauccagaacaccaccugggaggaccacugccaguucagcagacccagccccaucggcuaccugggccugcugagccagagaaccagagacaucuacaucagcagaagaagaagaggcaccuucaccuggacccugagcgacagcgagggcaacgagacccccggcggcuacugccugaccagauggaugcugaucgaggccgagcugaagugcuucggcaacaccgccguggccaagugcaacgagaagcacgacgaggaguucugcgacaugcugagacuguucgacuucugcaagcaggccaucagaagacugaagacccccgcccagaugagcauccagcugaucaacaaggccgugaacgcccugaucaacgaccagcugaucaugaagaaccaccugagagacaucaugggcauccccuacugcaacuacagcaaguacugguaccugaaccacaccgugaccggcaagaccagccugcccagaugcuggcuggugagcaacggcagcuaccugaacgagacccacuucagcgacgacaucgagcagcaggccgacaacaugaucaccgagcugcugcagaaggaguacaucgacagacagggcaagaccccccugggccugguggaccuguucguguucagcaccagcuucuaccugaucagcaucuuccugcaccuggugaagauccccacccacagacacgugaucggcaagcccugccccaagccccacagacugaaccacaugggcaucugcagcugcggccuguacaagcaccccggcgugcccgugaaguggaagagaugaggacuagucccuguucccagagcccacuuuuuuuucuuuuuuugaaauaaaauagccugucuuucagaucucaaaggcucuuuucagagccaccaaaaaaaaaaaaaaaaaaaaaaaaaaaaaaaaaaaaaaaaaaaaaaaaaaaaaaaaaaaaaaaaaaaaaaaaaaaaaaaaaaaaaaaaaaaaaaaaaaaaa

SEQ ID NO: 23699 - RNA, 1764 nt, Artificial Sequence
  mRNA product Design a-2 (hSL-A100) comprising derived and/or modified sequence from LASV(LASV003-NIG-2008;Clade II)__AIT17580__GPCmut2 (opt4)
aggagaguccgcucagccagguugcagaagcggcuuagcguguguccuaaucuucucucugcguguagguaggccugugccgcaaacaagcuuaccaugggccagaucaucaccuucuuccaggaggugccccacgugaucgaggaggugaugaacaucgugcugaucgcccugagccugcuggccauccugaagggcaucuacaacguggccaccugcggccuguucggccuggugagcuuccugcugcugugcggcagaagcugcagcaccaccuacaagggcguguacgagcugcagacccuggagcuggacauggccagccugaacaugugcaugccccugagcugcaccaagaacaacagccaccacuacaucauggugggcaacgagaccggccuggagcugacccugaccaacaccagcaucaucaaccacaaguucugcaaccugagcgacgcccacaagaagaaccuguacgaccacgcccugaugagcaucaucagcaccuuccaccugagcauccccaacuucaaccaguacgaggccaugagcugcgacuucaacggcggcaagaucagcgugcaguacaaccugagccacaccuacgccguggacgccgccaaccacugcggcaccaucgccaacggcgugcugcagaccuucaugagaauggccuggggcggcagcuacaucgcccuggacagcggcaagggcagcugggacugcaucaugaccagcuaccaguaccugaucauccagaacaccaccugggaggaccacugccaguucagcagacccagccccaucggcuaccugggccugcugagccagagaaccagagacaucuacaucagcagaagaagaagaggcaccuucaccuggacccugagcgacagcgagagcaacgagacccccggcggcuacugccugaccagauggaugcugaucgaggccgagcugaagugcuucggcaacaccgccguggccaagugcaacgagaagcacgacgaggaguucugcgacaugcugagacuguucgacuucugcaagcaggccaucagaagacugaaggcccccgcccagaugagcauccagcugaucaacaaggccgugaacgcccugaucaacgaccagcugaucaugaagaaccaccugagagacaucaugggcauccccuacugcaacuacagcaaguacugguaccugaaccacaccgugaccggcagaaccagccugcccagaugcuggcuggugagcaacggcagcuaccugaacgagacccacuucagcgacgacaucgagcagcaggccgacaacaugaucaccgagcugcugcagaaggaguacauggacagacagggcaagaccccccugggccugguggaccuguucguguucagcaccagcuucuaccugaucagcaucuuccugcaccuggugaagauccccacccacagacacgugaucggcaagcccugccccaagccccacagacugaaccacaugggcaucugcagcugcggccuguacaagcaccccggcgugcccgugaaguggaagagaugaggacuagucccuguucccagagcccacuuuuuuuucuuuuuuugaaauaaaauagccugucuuucagaucucaaaggcucuuuucagagccaccaaaaaaaaaaaaaaaaaaaaaaaaaaaaaaaaaaaaaaaaaaaaaaaaaaaaaaaaaaaaaaaaaaaaaaaaaaaaaaaaaaaaaaaaaaaaaaaaaaaaa

SEQ ID NO: 23700 - RNA, 1764 nt, Artificial Sequence
  mRNA product Design a-2 (hSL-A100) comprising derived and/or modified sequence from LASV(LASV035-NIG-2009;Clade II)__AIT17588__GPCmut2 (opt4)
aggagaguccgcucagccagguugcagaagcggcuuagcguguguccuaaucuucucucugcguguagguaggccugugccgcaaacaagcuuaccaugggccagaucaucaccuucuuccaggaggugccccacgugaucgaggaggugaugaacaucgugcugaucgcccugagccugcuggccauccugaagggcaucuacaacguggccaccugcggccuguucggccuggugagcuuccugcugcugugcggcagaagcugcagcaccaccuacaagggcguguacgagcugcagacccuggagcuggacauggccagccugaacaugugcaugccccugagcugcaccaagaacaacagccaccacuacaucauggugggcaacgagaccggccuggagcugacccugaccaacaccagcaucaucaaccacaaguucugcaaccugagcgacgcccacaagaagaaccuguacgaccacgcccugaugagcaucaucagcaccuuccaccugagcauccccaacuucaaccaguacgaggccaugagcugcgacuucaacggcggcaagaucagcgugcaguacaaccugagccacgccuacgccguggacgccgccaaccacugcggcaccaucgccaacggcgugcugcagaccuucaugagaauggccuggggcggcagcuacaucgcccuggacagcggcaagggcagcugggacugcaucaugaccagcuaccaguaccugaucauccagaacaccaccugggaggaccacugccaguucagcagacccagccccaucggcuaccugggccugcugagccagagaaccagagacaucuacaucagcagaagaagaagaggcaccuucaccuggacccugagcgacagcgagggcaacgagacccccggcggcuacugccugaccagauggaugcugaucgaggccgagcugaagugcuucggcaacaccgccguggccaagugcaacgagaagcacgacgaggaguucugcgacaugcugagacuguucgacuucugcaagcaggccaucagaagacugaaggcccccgcccagaugagcauccagcugaucaacaaggccgugaacgcccugaucaacgaccagcugaucaugaagaaccaccugagagacaucaugggcauccccuacugcaacuacagcaaguacugguaccugaaccacaccgugaccggcaagaccagccugcccagaugcuggcuggugagcaacggcagcuaccugaacgagacccacuucagcgacgacaucgagcagcaggccgacaacaugaucaccgagcugcugcagaaggaguacaucgacagacagggcaagaccccccugggccugguggaccuguucguguucagcaccagcuucuaccugaucagcaucuuccugcaccuggugaagauccccacccacagacacgugaucggcaagcccugccccaagccccacagacugaaccacaugggcaucugcagcugcggccuguacaagcaccccggcgugcccgugaaguggaagagaugaggacuagucccuguucccagagcccacuuuuuuuucuuuuuuugaaauaaaauagccugucuuucagaucucaaaggcucuuuucagagccaccaaaaaaaaaaaaaaaaaaaaaaaaaaaaaaaaaaaaaaaaaaaaaaaaaaaaaaaaaaaaaaaaaaaaaaaaaaaaaaaaaaaaaaaaaaaaaaaaaaaaa

SEQ ID NO: 23701 - RNA, 1764 nt, Artificial Sequence
  mRNA product Design a-2 (hSL-A100) comprising derived and/or modified sequence from LASV(LASV1000-NIG-2009;Clade II)__AIT17782__GPCmut2 (opt4)
aggagaguccgcucagccagguugcagaagcggcuuagcguguguccuaaucuucucucugcguguagguaggccugugccgcaaacaagcuuaccaugggccagaucaucaccuucuuccaggaggugccccacgugaucgaggaggugaugaacaucgugcugaucgcccugagccugcuggccauccugaagggcaucuacaacguggccaccugcggccuguucggccuggugagcuuccugcugcugugcggcagaagcugcagcaccaccuacaagggcguguacgagcugcagacccuggagcuggacauggccagccugaacaugugcaugccccugagcugcaccaagaacaacagccaccacuacaucauggugggcaacgagaccggccuggagcugacccugaccaacaccagcaucaucaaccacaaguucugcaaccugagcgacgcccacaagaagaaccuguacgaccacgcccugaugagcaucaucagcaccuuccaccugagcauccccaacuucaaccaguacgaggccaugagcugcgacuucaacggcggcaagaucagcgugcaguacaaccugagccacaccuacgccguggacgccgccaaccacugcggcaccaucgccaacggcgugcugcagaccuucaugagaauggccuggggcggcagcuacaucgcccuggacagcggcaagggcagcugggacugcaucaugaccagcuaccaguaccugaucauccagaacaccaccugggaggaccacugccaguucagcagacccagccccaucggcuaccugggccugcugagccagagaaccagagacaucuacaucagcagaagaagaagaggcaccuucaccuggacccugagcgacagcgagggcaacgagacccccggcggcuacugccugaccagauggaugcugaucgaggccgagcugaagugcuucggcaacaccgccguggccaagugcaacgagaagcacgacgaggaguucugcgacaugcugagacuguucgacuucugcaagcaggccaucaagagacugaagacccccgcccagaugagcauccagcugaucaacaaggccgugaacgcccugaucaacgaccagcugaucaugaagaaccaccugagagacaucaugggcauccccuacugcaacuacagcaaguacugguaccugaaccacaccgugaccggcaagaccagccugcccagaugcuggcuggugagcaacggcagcuaccugaacgagacccacuucagcgacgacaucgagcagcaggccgacaacaugaucaccgagcugcugcagaaggaguacaucgacagacagggcaagaccccccugggccugguggaccuguucguguucagcaccagcuucuaccugaucagcaucuuccugcaccuggugaagauccccacccacagacacguggugggcaagcccugccccaagccccacagacugaaccacaugggcaucugcagcugcggccuguacaagcaccccggcgugcccgugaaguggaagagaugaggacuagucccuguucccagagcccacuuuuuuuucuuuuuuugaaauaaaauagccugucuuucagaucucaaaggcucuuuucagagccaccaaaaaaaaaaaaaaaaaaaaaaaaaaaaaaaaaaaaaaaaaaaaaaaaaaaaaaaaaaaaaaaaaaaaaaaaaaaaaaaaaaaaaaaaaaaaaaaaaaaaa

SEQ ID NO: 23702 - RNA, 1764 nt, Artificial Sequence
  mRNA product Design a-2 (hSL-A100) comprising derived and/or modified sequence from LASV(LASV221-NIG-2010;Clade II)__AIT17624__GPCmut2 (opt4)
aggagaguccgcucagccagguugcagaagcggcuuagcguguguccuaaucuucucucugcguguagguaggccugugccgcaaacaagcuuaccaugggccagaucaucaccuucuuccaggaggugccccacgugaucgaggaggugaugaacaucgugcugaucgcccugagccugcuggccauccugaagggcaucuacaacguggccaccugcggccuguucggccuggugagcuuccugcugcugugcggcagaagcugcagcaccaccuacaagggcguguacgagcugcagacccuggagcuggacauggccagccugaacaugugcaugccccugagcugcaccaagaacaacagccaccacuacaucauggugggcaacgagaccggccuggagcugacccugaccaacaccagcaucaucaaccacaaguucugcaaccugagcgacgcccacaagaagaaccuguacgaccacgcccugaugagcaucaucagcaccuuccaccugagcauccccaacuucaaccaguacgaggccaugagcugcgacuucaacggcggcaagaucagcgugcaguacaaccugagccacaccuacgccaucgacgccgccaaccacugcggcaccaucgccaacggcgugcugcagaccuucaugagaauggccuggggcggcagcuacaucgcccuggacagcggcaagggcagcugggacugcaucaugaccagcuaccaguaccugaucauccagaacaccaccugggaggaccacugccaguucagcagacccagccccaucggcuaccugggccugcugagccagagaaccagagacaucuacaucagcagaagaagaagaggcaccuucaccuggacccugagcgacagcgagggcaacgagacccccggcggcuacugccugaccagauggaugcugaucgaggccgagcugaagugcuucggcaacaccgccguggccaagugcaacgagaagcacgacgaggaguucugcgacaugcugagacuguucgacuucugcaagcaggccaucagaagacugaagacccccgcccagaugagcauccagcugaucaacaaggccgugaacgcccugaucaacgaccagcugaucaugaagaaccaccugagagacaucaugggcauccccuacugcaacuacagcaaguacugguaccugaaccacaccgugaccggcaagaccagccugcccagaugcuggcuggugagcaacggcagcuaccugaacgagacccacuucagcgacgacaucgagcagcaggccgacaacaugaucaccgagaugcugcagaaggaguacauggacagacagggcaagaccccccugggccugguggaccuguucguguucagcaccagcuucuaccugaucagcaucuuccugcaccuggugaagauccccacccacagacacgugaucggcaagcccugccccaagccccacagacugaaccacaugggcaucugcagcugcggccuguacaagcaccccggcgugcccgugaaguggaagagaugaggacuagucccuguucccagagcccacuuuuuuuucuuuuuuugaaauaaaauagccugucuuucagaucucaaaggcucuuuucagagccaccaaaaaaaaaaaaaaaaaaaaaaaaaaaaaaaaaaaaaaaaaaaaaaaaaaaaaaaaaaaaaaaaaaaaaaaaaaaaaaaaaaaaaaaaaaaaaaaaaaaaa

SEQ ID NO: 23703 - RNA, 1764 nt, Artificial Sequence
  mRNA product Design a-2 (hSL-A100) comprising derived and/or modified sequence from LASV(LASV237-NIG-2010;Clade II)__AIT17638__GPCmut2 (opt4)
aggagaguccgcucagccagguugcagaagcggcuuagcguguguccuaaucuucucucugcguguagguaggccugugccgcaaacaagcuuaccaugggccagaucaucaccuucuuccaggaggugccccacgugaucgaggaggugaugaacaucgugcugaucgcccugagccugcuggccauccugaagggcaucuacaacguggccaccugcggccuguucggccuggugagcuuccugcugcugugcggcagaagcugcagcaccaccuacaagggcguguacgagcugcagacccuggagcuggacauggccagccugaacaugugcaugccccugagcugcaccaagaacaacagccaccacuacaucauggugggcaacgagaccggccuggagcugacccugaccaacaccagcaucaucaaccacaaguucugcaaccugagcgacgcccacaagaaggaccuguacgaccacgcccugaugagcaucaucagcaccuuccaccugagcauccccaacuucaaccaguacgaggccaugagcugcgacuucaacggcggcaagaucagcgugcaguacaaccugagccacaccuacgccguggacgccgccaaccacugcggcaccaucgccaacggcgugcugcagaccuucaugagaauggccuggggcggcagcuacaucgcccuggacagcggcaagggcagcugggacugcaucaugaccagcuaccaguaccugaucauccagaacaccaccugggaggaccacugccaguucagcagacccagccccaucggcuaccugggccugcugagccagagaaccagagacaucuacaucagcagaagaagaagaggcaccuucaccuggacccugagcgacagcgagggcaacgagacccccggcggcuacugccugaccagauggaugcugaucgaggccgagcugaagugcuucggcaacaccgccguggccaagugcaacgagaagcacgacgaggaguucugcgacaugcugagacuguucgacuucugcaagcaggccaucagaagacugaagacccccgcccagaugagcauccagcugaucaacaaggccgugaacgcccugaucaacgaccagcugaucaugaagaaccaccugagagacaucaugggcauccccuacugcaacuacagcaaguacugguaccugaaccacaccgugaccggcaagaccagccugcccagaugcuggcuggugagcaacggcagcuaccugaacgagacccacuucagcgacgacaucgagcagcaggccgacaacaugaucaccgagcugcugcagaaggaguacauggacagacagggcaagaccccccugggccugguggaccuguucguguucagcaccagcuucuaccugaucagcaucuuccugcaccugaucaagauccccacccacagacacaucaccggcaagcccugccccaagccccacagacugaaccacaugggcaucugcagcugcggccuguacaagcaccccggcgugcccgugaaguggaagagaugaggacuagucccuguucccagagcccacuuuuuuuucuuuuuuugaaauaaaauagccugucuuucagaucucaaaggcucuuuucagagccaccaaaaaaaaaaaaaaaaaaaaaaaaaaaaaaaaaaaaaaaaaaaaaaaaaaaaaaaaaaaaaaaaaaaaaaaaaaaaaaaaaaaaaaaaaaaaaaaaaaaaa

SEQ ID NO: 23704 - RNA, 1764 nt, Artificial Sequence
  mRNA product Design a-2 (hSL-A100) comprising derived and/or modified sequence from LASV(LASV253-NIG-2011;Clade II)__AIT17670__GPCmut2 (opt4)
aggagaguccgcucagccagguugcagaagcggcuuagcguguguccuaaucuucucucugcguguagguaggccugugccgcaaacaagcuuaccaugggccagaucaucaccuucuuccaggaggugccccacgugaucgaggaggugaugaacaucgugcugaucgcccugagccugcuggccauccugaagggcaucuacaacguggccaccugcggccuguucggccuggugagcuuccugcugcugugcggcagaagcugcagcaccaccuacaagggcguguacgagcugcagacccuggagcuggacauggccagccugaacaugugcaugccccugagcugcaccaagaacaacagccaccacuacaucauggugggcaacgagaccggccuggagcugacccugaccaacaccagcaucaucaaccacaaguucugcaaccugagcgacgcccacaagaagaaccuguacgaccacgcccugaugagcaucaucagcaccuuccaccugagcauccccaacuucaaccaguacgaggccaugagcugcgacuucaacggcggcaagaucagcgugcaguacaaccugagccacaccuacgccguggacgccgccaaccacugcggcaccaucgccaacggcgugcugcagaccuucaugagaauggccuggggcggcagcuacaucgcccuggacagcggcaagggcagcugggacugcaucaugaccagcuaccaguaccugaucauccagaacaccaccugggaggaccacugccaguucagcagacccagccccaucggcuaccugggccugcugagccagagaaccagagacaucuacaucagcagaagaagaagaggcaccuucaccuggacccugagcgacagcgagggcaacgagacccccggcggcuacugccugaccagauggaugcugaucgaggccgagcugaagugcuucggcaacaccgccguggccaagugcaacgagaagcacgacgaggaguucugcgacaugcugagacuguucgacuucugcaagcaggccaucagaagacugaaggcccccgcccagaugagcauccagcugaucaacaaggccgugaacgcccugaucaacgaccagcugaucaugaagaaccaccugagagacaucaugggcauccccuacugcaacuacagcaaguacugguaccugaaccacaccgugaccggcagaaccagccugcccagaugcuggcuggugagcaacggcagcuaccugaacgagacccacuucagcgacgacaucgagcagcaggccgacaacaugaucaccgagcugcugcagaaggaguacaucgacagacagggcaagaccccccugggccugguggaccuguucguguucagcaccagcuucuaccugaucagcaucuuccugcaccuggugaagauccccacccacagacacaucaucggcaagcccugccccaagccccacagacugaaccacaugggcaucugcagcugcggccuguacaagcaccccggcgugcccgugaaguggaagagaugaggacuagucccuguucccagagcccacuuuuuuuucuuuuuuugaaauaaaauagccugucuuucagaucucaaaggcucuuuucagagccaccaaaaaaaaaaaaaaaaaaaaaaaaaaaaaaaaaaaaaaaaaaaaaaaaaaaaaaaaaaaaaaaaaaaaaaaaaaaaaaaaaaaaaaaaaaaaaaaaaaaaa

SEQ ID NO: 23705 - RNA, 1764 nt, Artificial Sequence
  mRNA product Design a-2 (hSL-A100) comprising derived and/or modified sequence from LASV(LASV254-NIG-2011;Clade II)__AIT17674__GPCmut2 (opt4)
aggagaguccgcucagccagguugcagaagcggcuuagcguguguccuaaucuucucucugcguguagguaggccugugccgcaaacaagcuuaccaugggccagaucaucaccuucuuccaggaggugccccacgugaucgaggaggugaugaacaucgugcugaucgcccugagccugcuggccauccugaagggcaucuacaacguggccaccugcggccuguucggccuggugagcuuccugcugcugugcggcagaagcugcagcaccaccuacaagggcguguacgagcugcagacccuggagcuggacaugaccaaccugaacaugugcaugccccugagcugcaccaagaacaacagccaccacuacaucauggugggcaacgagaccggccuggagcugacccugaccaacaccagcaucaucaaccacaaguucugcaaccugagcgacgcccacaagaagaaccuguacaaccacgcccugaugagcaucaucagcaccuuccaccugagcauccccaacuucaaccaguacgaggccaugagcugcgacuucaacggcggcaagaucagcgugcaguacaaccugagccacagcuacgccguggacgccgccaaccacugcggcaccaucgccaacggcgugcugcagaccuucaugagaauggccuggggcggcagcuacaucgcccuggacagcggcaagggcaacugggacugcaucaugaccagcuaccaguaccugaucauccagaacaccaccugggaggaccacugccaguucagcagacccagccccaucggcuaccugggccugcugagccagagaaccagagacaucuacaucagcagaagaagaagaggcaccuucaccuggacccugagcgacagcgagggcaacgagacccccggcggcuacugccugaccagauggaugcugaucgaggccgagcugaagugcuucggcaacaccgccguggccaagugcaacgagaagcacgacgaggaguucugcgacaugcugagacuguucgacuucugcaagcaggccaucagaagacugaagacccccgcccaggccaacauccagcugaucaacaaggccgugaacgcccugaucaacgaccagcugaucaugaagaaccaccugagagacaucaugggcauccccuacugcaacuacagcaaguacugguaccugaaccacaccgugaccggcaagaccagccugcccagaugcuggcuggugagcaacggcagcuaccugaacgagacccacuucagcgacgacaucgagcagcaggccgacaacaugaucaccgagcugcugcagaaggaguacauggacagacagggcaagaccccccugggccugguggaccuguucguguucagcaccagcuucuaccugaucagcaucuuccugcaccuggugaagauccccacccacagacacgugaucggcaagcccugccccaagccccacagacugaaccacaugggcaucugcagcugcggccuguacaagcaccccggcgugcccgugaaguggaagagaugaggacuagucccuguucccagagcccacuuuuuuuucuuuuuuugaaauaaaauagccugucuuucagaucucaaaggcucuuuucagagccaccaaaaaaaaaaaaaaaaaaaaaaaaaaaaaaaaaaaaaaaaaaaaaaaaaaaaaaaaaaaaaaaaaaaaaaaaaaaaaaaaaaaaaaaaaaaaaaaaaaaaa

SEQ ID NO: 23706 - RNA, 1764 nt, Artificial Sequence
  mRNA product Design a-2 (hSL-A100) comprising derived and/or modified sequence from LASV(Nig08-A19;Clade III)__ADU56618__GPCmut2 (opt4)
aggagaguccgcucagccagguugcagaagcggcuuagcguguguccuaaucuucucucugcguguagguaggccugugccgcaaacaagcuuaccaugggccagaucgugaccuucuuccaggaggugccccacgugaucgaggaggugaugaacaucgugcugaucgcccugagcauccuggccauccugaagggccuguacaacaucgccaccugcggccugaucggccuggugaccuuccugcugcugagcggcagaagcugcagcaugaccuacaagggcguguacgagcugcagacccuggagcugaacaugaacacccugaacaugugcaugccccugagcugcaccaagaacaacagccaccacuacaucauggugggcaacgagaccggccuggagcugacccugaccaacaccagccugcugcaccacaaguucugcaaccugagcgacgcccacaagaagaaccuguacgaccacacccugaugagcaucaucagcaccuuccaccugagcauccccaacuucaaccaguacgaggccaugagcugcgacuucaacggcggcaagaucaccgugcaguacaaccugagccacagcuacgccaucgacgccgccaaccacugcggcaccguggccaacggcgugcugcagaccuucaugagaauggccuggggcggcagcuacaucgcccuggacagcggcagaggcaagugggacugcaucaugaccagcuaccaguaccugaucauccagaacaccaccugggaggaccacugccaguucagcagacccagccccaucggcuaccugggccugcugagccagagaaccagagacaucuacaucagcagaagaagaagaggcaccuucaccuggacccugagcgacagcgagggcaacgagacccccggcggcuacugccugaccagauggaugcugaucgaggccgagcugaagugcuucggcaacaccgccguggccaagugcaacgagaagcacgacgaggaguucugcgacaugcugagacuguucgacuucugcaagcaggccaucagaagacugaaggcccccgcccagaugagcauccagcugaucaacaaggccgugaacgcccugaucaacgaccagcugaucaugaagaaccaccugagagacaucaugggcauccccuacugcaacuacagcaaguacugguaccugaaccacaccagcaccggcagaaccagccugcccagaugcuggcuggugagcaacggcagcuaccugaacgagacccacuucagcgacgacaucgagcagcaggccgacaacaugaucaccgagaugcugcagaaggaguaccuggacagacagggcaagaccccccugggccugguggaccuguucguguucagcaccagcuucuaccugaucagcaucuuccugcaccuggugaagauccccacccacagacacaucgugggcaagcccugccccaagccccacagacugaaccacaugggcaucugcagcugcggccuguacaagcagcccggcgugcccgugagauggaagagaugaggacuagucccuguucccagagcccacuuuuuuuucuuuuuuugaaauaaaauagccugucuuucagaucucaaaggcucuuuucagagccaccaaaaaaaaaaaaaaaaaaaaaaaaaaaaaaaaaaaaaaaaaaaaaaaaaaaaaaaaaaaaaaaaaaaaaaaaaaaaaaaaaaaaaaaaaaaaaaaaaaaaa

SEQ ID NO: 23707 - RNA, 1767 nt, Artificial Sequence
  mRNA product Design a-2 (hSL-A100) comprising derived and/or modified sequence from LASV(G1180-SLE-2010;Clade IV)__AIT17168__GPCmut2 (opt4)
aggagaguccgcucagccagguugcagaagcggcuuagcguguguccuaaucuucucucugcguguagguaggccugugccgcaaacaagcuuaccaugggccagaucgugaccuucuuccaggaggugccccacgugaucgaggaggugaugaacaucgugcugaucgcccugagcauccuggccgugcugaagggccuguacaacuucgccaccugcggccuggugggccugcugaccuuccugcugcugugcggcagaagcugcaccgccagcagauacaagggcguguacgagcugcagacccuggagcugaacauggagacccugaacaugugcaugccccugagcugcaccaagaacaacagccaccacuacaucauggugggcaacgagaccggccuggagcugacccugaccaacaccagcaucaucaaccacaaguucugcaaccugagcgacgcccacaagaagaaccuguacgaccacgcccugaugagcaucaucagcaccuuccaccugagcauccccaacuucaaccaguacgaggccaugagcugcgacuucaacggcggcaagaucagcgugcaguacaaccugagccacagcuacgccggcgacgccgccaaccacugcggcaccguggccaacggcgugcugcagaccuucaugagaauggccuggggcggcagcuacaucgcccuggacagcggccacggcagcugggacugcaucaugaccagcuaccaguaccugaucauccagaacaccaccugggaggaccacugccaguucagcagacccagccccaucggcuaccugggccugcugagccagagaaccagagacaucuacaucagcagaagaagaagaggcaccuucaccuggacccugagcgacagcgagggcaaggacacccccggcggcuacugccugaccagauggaugcugaucgaggccgagcugaagugcuucggcaacaccgccguggccaagugcaacgagaagcacgacgaggaguucugcgacaugcugagacuguucgacuucugcaagcaggccauccagagacugaaggcccccgcccagaugagcauccagcugaucaacaaggccgugaacgcccugaucaacgaccagcugaucaugaagaaccaccugagagacaucaugggcauccccuacugcaacuacagcaaguacugguaccugaaccacaccaccaccggcaagaccagccugcccaagugcuggcuggugagcaacggcagcuaccugaacgagacccacuucagcgacgacaucgagcagcaggccgacaacaugaucaccgagaugcugcagaaggaguacauggagagacagggcaagaccccccugggccugguggaccuguucguguucagcaccagcuucuaccugaucagcaucuuccugcaccuggugaagauccccacccacagacacaucgugggcaagagcugccccaagccccacagacugaaccacaugggcaucugcagcugcggccuguacaagcagcccggcgugcccgugaaguggaagagaugaggacuagucccuguucccagagcccacuuuuuuuucuuuuuuugaaauaaaauagccugucuuucagaucucaaaggcucuuuucagagccaccaaaaaaaaaaaaaaaaaaaaaaaaaaaaaaaaaaaaaaaaaaaaaaaaaaaaaaaaaaaaaaaaaaaaaaaaaaaaaaaaaaaaaaaaaaaaaaaaaaaaa

SEQ ID NO: 23708 - RNA, 1767 nt, Artificial Sequence
  mRNA product Design a-2 (hSL-A100) comprising derived and/or modified sequence from LASV(G1442-SLE-2011;Clade IV)__AIT17180__GPCmut2 (opt4)
aggagaguccgcucagccagguugcagaagcggcuuagcguguguccuaaucuucucucugcguguagguaggccugugccgcaaacaagcuuaccaugggccagaucgugaccuucuuccaggaggugccccacgugaucgaggaggugaugaacaucgugcugaucgcccugagcauccuggccgugcugaagggccuguacaacguggccaccugcggccugaucggccuggugaccuuccugcugcugugcggcagaagcugcaccaccacccuguacaagggcguguacgagcugcagacccuggagcugaacauggagacccugaacaugugcaugccccugagcugcaccaagaacaacagccaccacuacaucagagugggcaacgagaccggccuggagcugacccugaccaacaccagcaucaucaaccacaaguucugcaaccugagcgacgcccacaagaagaaccuguacgaccacgcccugaugagcaucaucagcaccuuccaccugagcauccccaacuucaaccaguacgaggccaugagcugcgacuucaacggcggcaagaucagcgugcaguacaaccugagccacagcuacgccggcgacgccgccaaccacugcggcaccguggccaacggcgugcugcagaccuucaugagaauggccuggggcggcagcuacaucgcccuggacagcggcagaggcaacugggacugcaucaugaccagcuaccaguaccugaucauccagaacaccaccugggacgaccacugccaguucagcagacccagccccaucggcuaccugggccugcugagccagagaaccagagacguguacaucagcagaagaagaagaggcaccuucaccuggacccugagcgacagcgagggcaaggacacccccggcggcuacugccugaccagauggaugcugaucgaggccgagcugaagugcuucggcaacaccgccguggccaagugcaacgagaagcacgacgaggaguucugcgacaugcugagacuguucgacuucugcaagcaggccauccagagacugaaggcccccgcccagaugagcauccagcugaucaacaaggccgugaacgcccugaucaacgaccagcugaucaugaagaaccaccugagagacaucaugggcauccccuacugcaacuacagcaaguacugguaccugaacaacaccgccaccggcaagaccagccugcccaagugcuggcugaucagcaacggcagcuaccugaacgagacccacuucagcgacgacaucgagcaggaggccgacaacaugaucaccgagaugcugcagaaggaguacauggagagacagggcaagaccccccugggccugguggaccuguucguguucagcaccagcuucuaccugaucagcaucuuccugcaccuggugaagauccccacccacagacacaucgugggcaagagcugccccaagccccacagacugaaccacaugggcaucugcagcugcggccuguacaagcagcccggcgugcccgugagauggaagagaugaggacuagucccuguucccagagcccacuuuuuuuucuuuuuuugaaauaaaauagccugucuuucagaucucaaaggcucuuuucagagccaccaaaaaaaaaaaaaaaaaaaaaaaaaaaaaaaaaaaaaaaaaaaaaaaaaaaaaaaaaaaaaaaaaaaaaaaaaaaaaaaaaaaaaaaaaaaaaaaaaaaaa

SEQ ID NO: 23709 - RNA, 1767 nt, Artificial Sequence
  mRNA product Design a-2 (hSL-A100) comprising derived and/or modified sequence from LASV(G3010-SLE-2013;Clade IV)__AIT17344__GPCmut2 (opt4)
aggagaguccgcucagccagguugcagaagcggcuuagcguguguccuaaucuucucucugcguguagguaggccugugccgcaaacaagcuuaccaugggccagaucgugaccuucuuccaggaggugccccacgugaucgaggaggugaugaacaucgugcugaucgcccugagcauccuggccgugcugaagggccuguacaacuucgccaccugcggccuggugggccuggugaccuuccugcugcugugcggcagaagcugcaccaccagccuguacaagggcguguacgagcugcagacccuggagcugaacauggagacccugaacaugugcaugccccugagcugcaccaagaacaacagccaccacuacaucauggugggcaacgagaccggccuggagcugacccugaccaacaccagcaucaucaaccacaaguucugcaaccugagcgacgcccacaagaagaaccuguacaaccacgcccugaugagcaucaucagcaccuuccaccugagcauccccaacuucaaccaguacgaggccaugagcugcgacuucaacggcggcaagaucagcgugcaguacaaccugagccacagcuacgccggcgacgccgccagccacugcggcaccguggccaacggcgugcugcagaccuucaugagaauggccuggggcggcagcuacaucgcccuggacagcggcuacggcaagugggacugcaucaugaccagcuaccaguaccugaucauccagaacaccaccugggaggaccacugccaguucagcagacccagccccaucggcuaccugggccugcugagccagagaaccagagacaucuacaucagcagaagaagaagaggcaccuucaccuggacccugagcgacagcgagggcaaggacacccccggcggcuacugccugaccagauggaugcugaucgaggccgagcugaagugcuucggcaacaccgccguggccaagugcaacgagaagcacgacgaggaguucugcgacaugcugagacuguucgacuucugcaagcaggccauccagagacugaagacccccgcccagaugagcauccagcugaucaacaaggccgugaacgcccugaucaacgaccagcugaucaugaagaaccaccugagagacaucaugggcauccccuacugcaacuacagcaaguacugguaccugaaccacaccaccaccggcaagaccagccugcccaagugcuggcuggugagcaacggcagcuaccugaacgagacccacuucagcgacgacaucgagcagcaggccgacaacaugaucaccgagaugcugcagaaggaguacauggagagacagggcaagaccccccugggccugguggaccuguucguguucagcaccagcuucuaccugaucagcaucuuccugcaccuggugaagauccccacccacagacacaucgugggcaagagcugccccaagccccacagacugaaccacaugggcaucugcagcugcggccuguacaagcagcccggcgugcccgugagauggaagagaugaggacuagucccuguucccagagcccacuuuuuuuucuuuuuuugaaauaaaauagccugucuuucagaucucaaaggcucuuuucagagccaccaaaaaaaaaaaaaaaaaaaaaaaaaaaaaaaaaaaaaaaaaaaaaaaaaaaaaaaaaaaaaaaaaaaaaaaaaaaaaaaaaaaaaaaaaaaaaaaaaaaaa

SEQ ID NO: 23710 - RNA, 1767 nt, Artificial Sequence
  mRNA product Design a-2 (hSL-A100) comprising derived and/or modified sequence from LASV(G502-SLE-2009;Clade IV)__AIT17126__GPCmut2 (opt4)
aggagaguccgcucagccagguugcagaagcggcuuagcguguguccuaaucuucucucugcguguagguaggccugugccgcaaacaagcuuaccaugggccagaucgugaccuucuuccaggaggugccccacgugaucgaggaggugaugaacaucgugcugaucgcccugagcauccuggccgugcugaagggccuguacaacuucgccaccugcggccuggugggccugcugaccuuccugcugcugugcggcagaagcugcaccaccggccuguacaagggcguguacgagcugcagacccuggagcugaacauggagacccugaacaugugcaugccccugagcugcaccaagaacaacagccaccacuacaucauggugggcaacgagaccggccuggagcugacccugaccaacaccagcaucaucaaccacaaguucugcaaccugagcgacgcccacaagaagaaccuguacgaccacgcccugaugagcaucaucagcaccuuccaccugagcauccccaacuucaaccaguacgaggccaugagcugcgacuucaacggcggcaagaucagcgugcaguacaaccugagccacagcuacgccggcgacgccgccgaccacugcggcaccguggccaacggcgugcugcagaccuucaugagaauggccuggggcggcagcuacaucgcccuggacagcggcagaggcagaugggacugcaucaugaccagcuaccaguaccugaucauccagaacaccaccugggaggaccacugccaguucagcagacccagccccaucggcuaccugggccugcugagccagagaaccagagacaucuacaucagcagaagaagaagaggcaccuucaccuggacccugagcgacagcgagggcaaggacacccccggcggcuacugccugaccagauggaugcugaucgaggccgagcugaagugcuucggcaacaccgccguggccaagugcaacgagaagcacgacgaggaguucugcgacaugcugagacuguucgacuucugcaagcaggccauccagagacugaaggcccccgcccagaugagcauccagcugaucaacaaggccgugaacgcccugaucaacgaccagcuggugaugaagaaccaccugagagacaucaugggcauccccuacugcaacuacagcagauacugguaccugaaccacaccaccaccggcagaaccagccugcccaagugcuggcuggugagcaacggcagcuaccugaacgagacccacuucagcgacgacaucgagcagcaggccgacaacaugaucaccgagaugcugcagaaggaguacauggagagacagggcaagaccccccugggccugguggaccuguucguguucagcaccagcuucuaccugaucagcaucuuccugcaccuggugaagauccccacccacagacacaucgugggcaagagcugccccaagccccacagacugaaccacaugggcaucugcagcugcggccuguacaagcagcccggcgugcccgugaaguggaagagaugaggacuagucccuguucccagagcccacuuuuuuuucuuuuuuugaaauaaaauagccugucuuucagaucucaaaggcucuuuucagagccaccaaaaaaaaaaaaaaaaaaaaaaaaaaaaaaaaaaaaaaaaaaaaaaaaaaaaaaaaaaaaaaaaaaaaaaaaaaaaaaaaaaaaaaaaaaaaaaaaaaaaa

SEQ ID NO: 23711 - RNA, 1767 nt, Artificial Sequence
  mRNA product Design a-2 (hSL-A100) comprising derived and/or modified sequence from LASV(G733-SLE-2010;Clade IV)__AIT17154__GPCmut2 (opt4)
aggagaguccgcucagccagguugcagaagcggcuuagcguguguccuaaucuucucucugcguguagguaggccugugccgcaaacaagcuuaccaugggccagaucgugaccuucuuccaggaggugccccacgugaucgaggaggugaugaacaucgugcugaucgcccugagcauccuggccgugcugaagggccuguacaacuucgccaccugcggcaucgugggccuggugagcuuccugcugcugugcggcagaagcugcaccaccagccuguacaagggcguguacgagcugcagacccuggagcugaacauggagacccugaacaugugcaugccccugagcugcaccaagaacaacagccaccacuacaucauggugggcaacgagaccggccuggagcugacccugaccaacaccagcaucaucaaccacaaguucugcaaccugagcgacgcccacaagaagaaccuguacgaccacgcccugaugagcaucaucagcaccuuccaccugagcauccccaacuucaaccaguacgaggccaugagcugcgacuucaacggcggcaagaucagcgugcaguacaaccugagccacagcuacgccggcgacgccgccaaccacugcggcaccaucgccaacggcgugcugcagaccuucaugagaauggccuggggcggcagcuacaucgcccuggacagcggcagagacagaugggacugcaucaugaccagcuaccaguaccugaucauccagaacaccaccugggaggaccacugccaguucagcagacccagccccaucggcuaccugggccugcugagccagagaaccagagacaucuacaucagcagaagaagaagaggcaccuucaccuggacccugagcgacagcgagggcaaggacacccccggcggcuacugccugaccagauggaugcugaucgaggccgagcugaagugcuucggcaacaccgccguggccaagugcaacgagaagcacgacgaggaguucugcgacaugcugagacuguucgacuucugcaagcaggccauccagagacugaaggcccccgcccagaugagcauccagcugaucaacaaggccgugaacgcccugaucaacgaccagcugaucaugaagaaccaccugagagacaucaugggcauccccuacugcaacuacagcaaguacugguaccugaaccacaccaccaccggcaagaccagccugcccaagugcuggcuggugagcaacggcagcuaccugaacgagacccacuucagcgacgacaucgagcagcaggccgacaacaugaucaccgagaugcugcagaaggaguacauggagagacagggcaagaccccccugggccugguggaccuguucguguucagcaccagcuucuaccugaucagcaucuuccugcaccuggugaagauccccacccacagacacguggugggcaagagcugccccaagccccacagacugaaccacaugggcaucugcagcugcggccuguacggccagcccggcgugcccgugaaguggaagagaugaggacuagucccuguucccagagcccacuuuuuuuucuuuuuuugaaauaaaauagccugucuuucagaucucaaaggcucuuuucagagccaccaaaaaaaaaaaaaaaaaaaaaaaaaaaaaaaaaaaaaaaaaaaaaaaaaaaaaaaaaaaaaaaaaaaaaaaaaaaaaaaaaaaaaaaaaaaaaaaaaaaaa

SEQ ID NO: 23712 - RNA, 1767 nt, Artificial Sequence
  mRNA product Design a-2 (hSL-A100) comprising derived and/or modified sequence from MOPV/LASV reassortant(IGS-1;Clade IV)__AFY05576__GPCmut2 (opt4)
aggagaguccgcucagccagguugcagaagcggcuuagcguguguccuaaucuucucucugcguguagguaggccugugccgcaaacaagcuuaccaugggccagaucgugaccuucuuccaggaggugccccacgugaucgaggaggugaugaacaucgugcugaucgcccugagcgugcuggccgugcugaagggccuguacaacuucgccaccugcggccuggugggccuggugaccuuccugcugcugugcggcagaagcugcaccaccagccuguacaagggcguguacgagcugcagacccuggagcugaacauggagacccugaacaugugcaugccccugagcugcaccaagaacaacagccaccacuacaucauggugggcaacgagaccggccuggagcugacccugaccaacaccagcaucaucaaccacaaguucugcaaccugagcgacgcccacaagaagaaccuguacgaccacgcccugaugagcaucaucagcaccuuccaccugagcauccccaacuucaaccaguacgaggccaugagcugcgacuucaacggcggcaagaucagcgugcaguacaaccugagccacagcuacgccggcgacgccgccaaccacugcggcaccguggccaacggcgugcugcagaccuucaugagaauggccuggggcggcagcuacaucgcccuggacagcggcagaggcaacugggacugcaucaugaccagcuaccaguaccugaucauccagaacaccaccugggaggaccacugccaguucagcagacccagccccaucggcuaccugggccugcugagccagagaaccagagacaucuacaucagcagaagaagaagaggcaccuucaccuggacccugagcgacagcgagggcgaggacacccccggcggcuacugccugaccagauggaugcugaucgaggccgagcugaagugcuucggcaacaccgccguggccaagugcaacgagaagcacgacgaggaguucugcgacaugcugagacuguucgacuucugcaagcaggccauccagagacugaaggcccccgcccagaugagcauccagcugaucaacaaggccgugaacgcccugaucaacgaccagcugaucaugaagaaccaccugagagacaucaugggcauccccuacugcaacuacagcaaguacugguaccugaaccacaccaccaccggcagaaccagccugcccaagugcuggcuggugagcaacggcagcuaccugaacgagacccacuucagcgacgacaucgagcagcaggccgacaacaugaucaccgagaugcugcagaaggaguacauggagagacagggcaagaccccccugggccugguggaccuguucguguucagcaccagcuucuaccugaucagcaucuuccugcaccuggugaagauccccacccacagacacaucgugggcaagagcugccccaagccccacagacugaaccacaugggcaucugcagcugcggccuguacaagcagcccggcgugcccgugaaguggaagagaugaggacuagucccuguucccagagcccacuuuuuuuucuuuuuuugaaauaaaauagccugucuuucagaucucaaaggcucuuuucagagccaccaaaaaaaaaaaaaaaaaaaaaaaaaaaaaaaaaaaaaaaaaaaaaaaaaaaaaaaaaaaaaaaaaaaaaaaaaaaaaaaaaaaaaaaaaaaaaaaaaaaaa

SEQ ID NO: 23713 - RNA, 1767 nt, Artificial Sequence
  mRNA product Design a-2 (hSL-A100) comprising derived and/or modified sequence from LASV(LM765-SLE-2012;Clade IV)__AIT17814__GPCmut2 (opt4)
aggagaguccgcucagccagguugcagaagcggcuuagcguguguccuaaucuucucucugcguguagguaggccugugccgcaaacaagcuuaccaugggccagaucgugaccuucuuccaggaggugccccacgugaucgaggaggugaugaacaucgugcugaucgcccugagcauccuggccgugcugaagggccuguacaacuucgccaccugcggccuggugggccuggugaccuuccugcugcugugcggcagaagcugcaccaccagccuguacaagggcguguacgagcugcagacccuggagcugaacauggagacccugaacaugugcaugccccugagcugcaccaagaacaacagccaccacuacaucauggugggcaacgagaccggccuggagcugacccugaccaacaccagcaucaucgaccacaaguucugcaaccugagcgacgcccacagaaagaaccuguacgaccacgcccugaugagcaucaucagcaccuuccaccugagcauccccaacuucaaccaguacgaggccaugagcugcgacuucaacggcggcaagaucagcgugcaguacaaccugagccacagcuacgccaaggacgccgccgaccacugcggcaccguggccaacggcgugcugcagaccuucaugagaauggccuggggcggcagcuacaucgcccuggacagcggcagaggcagaugggacugcaucaugaccagcuaccaguaccugaucauccagaacaccaccugggaggaccacugccaguucagcagacccagccccaucggcuaccugggccugcugagccagagaaccagagacaucuacaucagcagaagaagaagaggcaccuucaccuggacccugagcgacagcgagggcaaggacacccccggcggcuacugccugaccagauggaugcugaucgaggccgagcugaagugcuucggcaacaccgccguggccaagugcaacgagaagcacgacgaggaguucugcgacaugcugagacuguucgacuucugcaagcaggccauccagagacugaaggcccccgcccagaugagcauccagcugaucaacaaggccgugaacgcccugaucaacgaccagcugaucaugaagaaccaccugagagacaucaugggcauccccuacugcaacuacagcaaguacugguaccugaaccacaccaccaccggcaagaccagccugcccaagugcuggcuggugagcaacggcagcuaccugaacgagacccacuucagcgacgacaucgagcagcaggccgacaacaugaucaccgagaugcugcagaaggaguacauggagagacagggcaagaccccccugggccugguggaccuguucguguucagcaccagcuucuaccugaucagcaucuuccugcaccuggugaagauccccacccacagacacaucgugggcaagcccugccccaagccccacagacugaaccacaugggcaucugcagcugcggccuguacaagcagcccggcgugcccgugaaguggaagagaugaggacuagucccuguucccagagcccacuuuuuuuucuuuuuuugaaauaaaauagccugucuuucagaucucaaaggcucuuuucagagccaccaaaaaaaaaaaaaaaaaaaaaaaaaaaaaaaaaaaaaaaaaaaaaaaaaaaaaaaaaaaaaaaaaaaaaaaaaaaaaaaaaaaaaaaaaaaaaaaaaaaaa

SEQ ID NO: 23714 - RNA, 1767 nt, Artificial Sequence
  mRNA product Design a-2 (hSL-A100) comprising derived and/or modified sequence from LASV(LM776-SLE-2012;Clade IV)__AIT17824__GPCmut2 (opt4)
aggagaguccgcucagccagguugcagaagcggcuuagcguguguccuaaucuucucucugcguguagguaggccugugccgcaaacaagcuuaccaugggccagaucgugaccuucuuccaggaggugccccacgugaucgaggaggugaugaacaucgugcugaucgcccugagcauccuggccgugcugaagggccuguacaacuucgccaccugcggccuggugggccuggugaccuuccugcugcugugcggcagaagcugcaccaccagcguguacaagggcguguacgagcugcagacccuggagcugaacauggagacccugaacaugugcaugccccugagcugcaccaagaacaacagccaccacuacaucauggugggcaacgagaccggccuggagcugacccugaccaacaccagcaucaucaaccacaaguucugcaaccugagcgacgcccacaagaagaaccuguacgaccacgcccugaugagcaucaucagcaccuuccaccugagcauccccaacuucaaccaguacgaggccaugagcugcgacuucaacggcggcaagaucagcgugcaguacaaccugagccacagcuacgccggcgacgccgccaaccacugcggcaccguggccaacggcgugcugcagaccuucaugagaauggccuggggcggcagcuacaucgcccuggacagcggccacggcaagugggacugcaucaugaccagcuaccaguaccugaucauccagaacaccaccugggaggaccacugccaguucagcagacccagccccaucggcuaccugggccugcugagccagagaaccagagacaucuacaucagcagaagaagaagaggcaccuucaccuggacccugagcgacagcgagggcaaggacacccccggcggcuacugccugaccagauggaugcugaucgaggccgagcugaagugcuucggcaacaccgccguggccaagugcaacgagaagcacgacgaggaguucugcgacaugcugagacuguucgacuucugcaagcaggccauccagagacugaaggcccccgcccagaugagcauccagcugaucaacaaggccgugaacgcccugaucaacgaccagcugaucaugaagaaccaccugagagacaucaugggcauccccuacugcaacuacagcaaguacugguaccugaaccacaccaccaccggcaagaccagccugcccaagugcuggcuggugagcaacggcagcuaccugaacgagacccacuucagcgacgacaucgagcagcaggccgacaacaugaucaccgagaugcugcagaaggaguacauggagagacagggcaagaccccccugggccugguggaccuguucguguucagcaccagcuucuaccugaucagcaucuuccugcaccuggugaagauccccacccacagacacaucgugggcaagagcugccccaagccccacagacugaaccacaugggcaucugcagcugcggccuguacaagcagcccggcgugcccgugagauggaagagaugaggacuagucccuguucccagagcccacuuuuuuuucuuuuuuugaaauaaaauagccugucuuucagaucucaaaggcucuuuucagagccaccaaaaaaaaaaaaaaaaaaaaaaaaaaaaaaaaaaaaaaaaaaaaaaaaaaaaaaaaaaaaaaaaaaaaaaaaaaaaaaaaaaaaaaaaaaaaaaaaaaaaa

SEQ ID NO: 23715 - RNA, 1767 nt, Artificial Sequence
  mRNA product Design a-2 (hSL-A100) comprising derived and/or modified sequence from LASV(Mad39;Clade IV)__ANH09722__GPCmut2 (opt4)
aggagaguccgcucagccagguugcagaagcggcuuagcguguguccuaaucuucucucugcguguagguaggccugugccgcaaacaagcuuaccaugggccagaucgugaccuucuuccaggaggugccccacgugaucgaggaggugaugaacaucgugcugaucgcccugagcauccuggccgugcugaagggccuguacaacguggccaccugcggccugaucggccuggugaccuuccugcugcugugcggcagaagcugcaccaccacccuguacaagggcguguacgagcugcaggcccuggagcugaacauggagacccugaacaugugcaugccccugagcugcaccaagaacaacagccaccacuacaucagagugggcaacgagaccggccuggagcugacccugaccaacaccagccugaucaaccacaaguucugcaaccugagcgacgcccacaagaagaaccuguacgaccacgcccugaugagcaucaucagcaccuuccaccugagcauccccaacuucaaccaguacgaggccaugagcugcgacuucaacgacggcaagaucagcgugcaguacaaccugagccacaccuacgccggcgacaccgccaaccacugcggcaccguggccaacggcgugcugcagaccuucaugagaauggccuggggcggcagcuacaucgcccuggacagcggcagaggcggcugggacugcaucaugaccagcuaccaguaccugaucauccagaacaccaccugggaggaccacugccaguucagcagacccagccccaucggcuaccugggccugcugagccagagaaccagagacaucuacaucagcagaagaagaagaggcaccuucaccuggacccugagcgacagcgagggcaaggacacccccggcggcuacugccugaccagauggaugcugaucgaggccgagcugaagugcuucggcaacaccgccguggccaagugcaacgagaagcacgacgaggaguucugcgacaugcugagacuguucgacuucugcaagcaggccauccagagacugaaggcccccgcccagaugagcauccagcugaucaacaaggccgugaacgcccugaucaacgaccagcugaucaugaagaaccaccugagagacaucaugggcauccccuacugcaacuacagcaaguacugguaccugaaccacaccgugaccggcaagaccagccugcccaagugcuggcuggugagcaacggcagcuaccugaacgagacccacuucagcgacgacaucgagcagcaggccgacaacaugaucaccgagaugcugcagaaggaguacauggagagacagggcaagaccccccugggccugguggaccuguucguguucagcaccagcuucuaccugaucagcaucuuccugcaccuggugaagauccccacccacagacacguggugggcaagcccugccccaagccccacagacugaaccacaugggcaucugcagcugcggcuucuacaagcagcccggcgugcccgugagauggaagagaugaggacuagucccuguucccagagcccacuuuuuuuucuuuuuuugaaauaaaauagccugucuuucagaucucaaaggcucuuuucagagccaccaaaaaaaaaaaaaaaaaaaaaaaaaaaaaaaaaaaaaaaaaaaaaaaaaaaaaaaaaaaaaaaaaaaaaaaaaaaaaaaaaaaaaaaaaaaaaaaaaaaaa

SEQ ID NO: 23716 - RNA, 1767 nt, Artificial Sequence
  mRNA product Design a-2 (hSL-A100) comprising derived and/or modified sequence from LASV(Z0947-SLE-2011;Clade IV)__AIT17840__GPCmut2 (opt4)
aggagaguccgcucagccagguugcagaagcggcuuagcguguguccuaaucuucucucugcguguagguaggccugugccgcaaacaagcuuaccaugggccagaucgugaccuucuuccaggaggugccccacgugaucgaggaggugaugaacaucgugcugaucgcccugagcauccuggccgugcugaagggccuguacaacuucgccaccugcggccuggugggccuggugaccuuccugcugcugugcggcagaagcugcaccaucagccuguacaagggcguguacgagcugcagacccuggagcugaacauggagacccugaacaugugcaugccccugagcugcaccaagaacaacagccaccacuacaucauggugggcaacgagaccggccuggagcugacccugaccaacaccagcaucaucaaccacaaguucugcaaccugagcgacgcccacaagaagaaccuguacgaccacgcccugaugagcaucaucagcaccuuccaccugagcauccccaacuucaaccaguacgaggccaugagcugcgacuucaacggcggcaagaucagcgugcaguacaaccugagccacagcuacgccggcgacgccgccaaccacugcggcaccguggccaacggcgugcugcagaccuucaugagaauggccuggggcggcagcuacaucgcccuggacagcggcagagacagaugggacugcaucaugaccagcuaccaguaccugaucauccagaacaccaccugggaggaccacugccaguucagcagacccagccccaucggcuaccugggccugcugagccagagaaccagagacaucuacaucagcagaagaagaagaggcaccuucaccuggacccugagcgacagcgagggcaaggacacccccggcggcuacugccugaccagauggaugcugaucgaggccgagcugaagugcuucggcaacaccgccguggccaagugcaacgagaagcacgacgaggaguucugcgacaugcugagacuguucgacuucugcaagcaggccauccagagacugaaggcccccgcccagaugagcauccagcugaucaacaaggccgugaacgcccugaucaacgaccagcugaucaugaagaaccaccugagagacaucaugggcauccccuacugcaacuacagcaaguacugguaccugaaccacaccaccaccggcaagaccagccugcccaagugcuggcuggugagcaacggcagcuaccugaacgagacccacuucagcgacgacaucgagcagcaggccgacaacaugaucaccgagaugcugcagaaggaguacauggagagacagggcaagaccccccugggccugguggaccuguucguguucagcaccagcuucuaccugaucagcaucuuccugcaccuggugaagauccccacccacagacacaucgugggcaagcccugccccaagccccacagacugaaccacaugggcaucugcagcugcggccuguacaagcagcccggcgugcccgugaaguggaagagaugaggacuagucccuguucccagagcccacuuuuuuuucuuuuuuugaaauaaaauagccugucuuucagaucucaaaggcucuuuucagagccaccaaaaaaaaaaaaaaaaaaaaaaaaaaaaaaaaaaaaaaaaaaaaaaaaaaaaaaaaaaaaaaaaaaaaaaaaaaaaaaaaaaaaaaaaaaaaaaaaaaaaa

SEQ ID NO: 23717 - RNA, 1767 nt, Artificial Sequence
  mRNA product Design a-2 (hSL-A100) comprising derived and/or modified sequence from LASV(Josiah;Clade IV)__NP_694870__GPCmut2 (opt5)
aggagaguccgcucagccagguugcagaagcggcuuagcguguguccuaaucuucucucugcguguagguaggccugugccgcaaacaagcuuaccaugggccagaucgugaccuucuuucaagaggucccccacguuauugaagaggugaugaacaucgugcugauugcccucagcguccuggcugugcuuaaggggcuguacaauuucgccacaugcggacucguuggccuggugacguuucuucugcucugugggagauccugcaccacaucucuguauaaaggagucuacgaacugcagacccucgagcugaacauggaaacacuuaauauguguaugccucugagcugcaccaagaacaauucccaucacuauaucauggugggcaacgagacagggcucgagcugacccuuacgaauaccucuauuaucaaccauaaauucuguaaucugagcgacgcgcacaagaaaaaccucuacgaucaugcucugauguccaucauuucuacauuucaccugagcaucccgaauuucaaccaguaugaagccauguccugcgacuuuaauggaggcaagauuagcguucaguacaaccucucucacuccuaugccggcgaugcugccaaucauugugggaccguggcuaacggaguccugcaaacauucaugcggauggccuggggcgggagcuacaucgcgcuugacucuggacgcggcaacugggauugcauuaugaccuccuaccaguaucugaucauucagaauacgacaugggaggaccacugucaguuuagcagacccucuccuaucggguaccucggacugcuuucccaacggacccgcgauaucuauauuagcagacggcgcagaggcacauucaccuggacccuguccgacucugaaggcaaggauacacccgggggauacugccucacgcgguggaugcugaucgaggccgagcugaaauguuuuggcaacaccgcuguggccaagugcaaugaaaaacaugacgaggaguucugcgauaugcuccgccuguuugacuucuguaagcaggcuauucagagacuuaaagccccugcgcagaugagcauccaacugauuaacaaggccgugaaugcucucaucaacgaucagcugaucaugaagaaucaccuucgggacauuauggggauccccuauugcaacuacuccaaauauugguaccugaaucacacaaccacaggacgcaccagccucccuaaguguuggcuggucucuaacggcuccuaccugaaugaaacgcauuucagcgacgauauugaacagcaagccgacaacaugaucacagagaugcuccagaaagaguauauggaaagacaggggaagaccccgcugggacuuguugaucuguuuguguucucuaccagcuuuuaccucauuuccaucuuccugcaccuggugaaaauccccacacaucggcacauugucggcaagucuugcccuaaaccccaucgccuuaaucacaugggcaucuguagcugcgggcucuauaagcagccuggagugcccguuaaguggaaaagaugaggacuagucccuguucccagagcccacuuuuuuuucuuuuuuugaaauaaaauagccugucuuucagaucucaaaggcucuuuucagagccaccaaaaaaaaaaaaaaaaaaaaaaaaaaaaaaaaaaaaaaaaaaaaaaaaaaaaaaaaaaaaaaaaaaaaaaaaaaaaaaaaaaaaaaaaaaaaaaaaaaaaa

SEQ ID NO: 23718 - RNA, 1764 nt, Artificial Sequence
  mRNA product Design a-2 (hSL-A100) comprising derived and/or modified sequence from LASV(LP;Clade I)__AAF86701__GPCmut2 (opt5)
aggagaguccgcucagccagguugcagaagcggcuuagcguguguccuaaucuucucucugcguguagguaggccugugccgcaaacaagcuuaccaugggccagaucauuaccuucuuucaagaggugccccacgucaucgaagagguuaugaacauugugcugaucgcccucagccugcuugcuauucugaaggggcucuacaauaucgccacaugcggaaucauuggccugguggcguuccuuuuucugugugggaaauccugcucucucacgcugaagggaggcuaugaacugcagacccucgagcugaacauggaaacacuuaauauguguaugccucugagcugcaccaaaaacuccucucaucacuacaucagagucgggaaugagacaggacucgagcugacccuuacaaacaccagcauuaucaaucauaaguucuguaaccuguccgacgcucacaaaaagaaucucuaugaucaugcccugaugucuauuaucagcacguuucaccuguccauuccgaacuucaaucaguacgaagccaugagcugcgacuuuaacggcggcaagaucucugugcaguauaaucucucccacagcuacgcuggggaugccgcugagcauuguggaaccguugccaacggcgugcugcaaacauucaugcggauggcguggggagggcgcuauaucgcccuugacucuggcaaagggaauugggauugcauuaugaccuccuaccaguaccugaucauucagaacacaaccugggaagaccacugucaguuuagcagacccucuccuaucggauaucucggccugcuuucccaacggacgcgcgauauuuacaucagcagacggcgcagaggcacauucaccuggacacuguccgacucugaggggaacgagacccccggaggcuauugccucacccgguggaugcugaucgaagcugagcugaaguguuuugggaauacagccgucgcuaaaugcaacgaaaagcaugaugaggaguucugcgacaugcuccgccuguuugauuucuguaaacaggccauuagacggcuuaaggcgccugcccagaugagcauccagcugauuaauaaggcugugaacgcccucaucaaugaccaacugauuaugaaaaaccaccuucgcgauaucaugggaauccccuacugcaauuauuccaaguacugguaucugaaccacacgagcucuggcagaaccucccucccuaaauguuggcugauuagcaaugggucuuaccugaacgaaacacaguucagcgacgacaucgagcagcaagcugauaauaugauuaccgaaaugcuccagaaggaguacaucgaacggcagggaaaaacaccgcugggccuuguugacauuuuuaucuucuccaccucuuuuuaucugauuagcaucuuccuccaucugaucaagauucccacgcaccgccauaucgugggcaaaccuugccccaagccucacagacugaaccauaugggggucuguuccugcggacuuuacaagcaccccggcgugccgacaaaauggaagcggugaggacuagucccuguucccagagcccacuuuuuuuucuuuuuuugaaauaaaauagccugucuuucagaucucaaaggcucuuuucagagccaccaaaaaaaaaaaaaaaaaaaaaaaaaaaaaaaaaaaaaaaaaaaaaaaaaaaaaaaaaaaaaaaaaaaaaaaaaaaaaaaaaaaaaaaaaaaaaaaaaaaaa

SEQ ID NO: 23719 - RNA, 1764 nt, Artificial Sequence
  mRNA product Design a-2 (hSL-A100) comprising derived and/or modified sequence from LASV(803213;Clade II)__AAF86703__GPCmut2 (opt5)
aggagaguccgcucagccagguugcagaagcggcuuagcguguguccuaaucuucucucugcguguagguaggccugugccgcaaacaagcuuaccaugggccagaucauuaccuucuuucaagaggugccccacgucaucgaagagguuaugaacauugugcugaucgcccucagccugcuugcuauucugaaggggaucuacaauguggccacaugcggacucuucggccugaucuccuuucuucugcucugugggagaucuugcagcgucacguauaaaggaguguacgaacugcagacccuggagcucaacauggcgaaucugaacauguguaugccucuuuccugcacaaagaauaacucucaucacuauauuaugguuggcaaugaaaccgggcuggagcucacacugaccaacacaagcaucauuaaucauaaauucuguaaccuuuccgacgcucacaagaaaaaucuguacgaucaugcccucaugucuaucauuagcaccuuucaccuguccaucccgaacuucaaucaguaugaggccaugagcugcgacuuuaacggaggcaagauuucugugcaguacaaucugucccacagcuucgcugucgaugccgcuaaccauuguggcacgaucgccaacggggugcuccaaaccuuuaugcggauggcguggggaggcucuuauaucgcccuggacuccgggaagggaaauugggauugcauuaugacaagcuaccaguaccuuaucauucagaacaccacaugggaagaccacugucaguucucucgccccuccccuaucggcuaucuggggcuccugagccaaagaacccgggauauuuacaucucccgcagacggcgcggaacguuuacauggacccuuucugacagcgagggcaaugaagcucccggcggguauugccugacaagauggaugcucaucgaggccgagcugaaauguuucggaaacaccgcuguugccaagugcaaugaaaaacaugaugaggaauuuugcgacaugcugcgccucuucgauuucuguaagcaggcgauuaaacggcugaagaccccugcccagauguccauccagcuuauuaacaaggcugugaaugcccugaucaacgaccaacucauuaugaaaaaucaccugagagauaucaugggcauccccuacugcaacuauagccgguacugguaucuuaaucacacagucacggggaagaccucucugccucgcuguuggcucguguccaacggaagcuaccugaaugagacacauuuuucugacgacauugaacagcaggcugauaacaugaucaccgagaugcugcaaaaagaguacauggacagacagggcaagacaccgcucgggcugguggaucuuuucgucuuuagcaccuccuucuaucugauuucuaucuuucuccaccugguuaaaauucccacgcaucggcacaucgugggaaagccuugccccaaaccucaucgccugaaucacaugggcauuuguagcugcggccuuuacaagcaccccggggugccggucaaguggaaaagaugaggacuagucccuguucccagagcccacuuuuuuuucuuuuuuugaaauaaaauagccugucuuucagaucucaaaggcucuuuucagagccaccaaaaaaaaaaaaaaaaaaaaaaaaaaaaaaaaaaaaaaaaaaaaaaaaaaaaaaaaaaaaaaaaaaaaaaaaaaaaaaaaaaaaaaaaaaaaaaaaaaaaa

SEQ ID NO: 23720 - RNA, 1764 nt, Artificial Sequence
  mRNA product Design a-2 (hSL-A100) comprising derived and/or modified sequence from LASV(GA391;Clade III)__CAA36645__GPCmut2 (opt5)
aggagaguccgcucagccagguugcagaagcggcuuagcguguguccuaaucuucucucugcguguagguaggccugugccgcaaacaagcuuaccaugggccagaucgugaccuucuuucaagaggucccccacguuauugaagaggugaugaacaucgugcugauugcccucagcauccuggcuauucuuaaggggcuguacaaugucgccacaugcggacucaucggccuggugacguuccuucugcucuccgggagaucuuguagccugaucuauaaaggaaccuacgaacugcagacacucgagcugaacauggaaacccuuaauaugugcaugccucuguccuguacaaagaacaauucucaucacuauauucggguuggcaacgagaccgggcucgagcugacacuuaccaauacgagcauccugaaccauaaauuuugcaaucucuccgacgcgcacaagcgcaaccuguacgaucauucucugaugagcauuaucuccaccuuccaccucagcauuccgaauuuuaaccaguaugaagcuaugucuugugacuucaauggaggcaaaaucacagugcaguacaaccugucccacagcuuugccgucgaugccgcuggccauugcgggacccuugccaauggagugcugcaaacauucaugagaauggcuuggggcgggucuuauauugcccucgacuccggacggggcaacugggauuguaucaugaccagcuaccaguaccugaucauucagaacacgacaugggacgaucacugccaguuuucucgccccuccccuaucggguaucuuggacugcucagccaaagaacccgggacauuuacaucucccgcagacggcgcggcacauucaccuggacccugucugauagcgagggcaaugaaacacccgggggauauugucugacgagauggaugcucauugaggcggagcugaagugcuuuggcaacaccgccguugcuaaguguaaugaaaaacaugacgaggaguucugcgauaugcuucggcuguuugacuucugcaagcaggccauccgcagacucaaaaccccugcucagauguccauccagcugauuaacaaggccgugaaugcgcuuaucaacgaucaacugauuaugaaaaaucaccuccgggacaucauggggauucccuacuguaacuauagccgcuacugguaucugaaucacacaucuacaggaaagaccucccugccuagaugcuggcucaucagcaacggcucuuaccugaaugaaacgaaguucagcgacgauaucgaacagcaggccgacaacaugauuacagagaugcuucaaaaagaguacaucgaucggcaggggaagaccccgcugggacucgucgaccuguuuguguucuccaccucuuuuuaucugauuagcaucuuccuucaucucgugaaaauucccacacacagacauaucgucggcaagccuugucccaaaccucaccgccugaaucauaugggcauuugcuccugugggcuguacaagcagcccggaguuccggugcgguggaaaagaugaggacuagucccuguucccagagcccacuuuuuuuucuuuuuuugaaauaaaauagccugucuuucagaucucaaaggcucuuuucagagccaccaaaaaaaaaaaaaaaaaaaaaaaaaaaaaaaaaaaaaaaaaaaaaaaaaaaaaaaaaaaaaaaaaaaaaaaaaaaaaaaaaaaaaaaaaaaaaaaaaaaaa

SEQ ID NO: 23721 - RNA, 1767 nt, Artificial Sequence
  mRNA product Design a-2 (hSL-A100) comprising derived and/or modified sequence from LASV(AV;Clade V)__CCA30314__GPCmut2 (opt5)
aggagaguccgcucagccagguugcagaagcggcuuagcguguguccuaaucuucucucugcguguagguaggccugugccgcaaacaagcuuaccaugggccagaucgugaccuucuuucaagaggucccccacguuauugaagaggugaugaacaucgugcugauugcccucagcauccuggcuguccuuaaggggcuguacaauauugccacaugcggacucaucggccugaucacguuccuucugcucugugggagauccugcucuagcaaccuguauaaaggaguguacgaacugcagucccucgaccugaauauggagacccuuaacauguguaugccucugucuugcacaaagaauaacagccaucacuauauucggguuggcaaugauaccgggcucgaacugacacuuaccaacacauccauccugaaucauaaauuuuguaaccucucugacgcgcacaagaaagaucuguacgaccaugcucugaugagcauuaucuccaccuuccaccucagcauuccgaauuuuaaccaguaugaggccaugucuugcgauuucaauggaggcaagaucuccgugcaguacaaccugagccacucuuaugccauugacgcugccaaucauuguggcacggucgcuaacgggauccuucaaaccuuuaugcgcauggccuggggaggcuccuacaucgcgcuggauagcgggagaggaaacugggacugcauuaugacaucuuaccaguaucucaucauucagaauaccacaugggagaaccacugucaguucucccggcccagcccuaucggcuaccuggggcuucugucccaacgcaccagagauauuuauaucucucggcgcagacggggaacguuuacauggacccucagcgacuccgaaggcaaugccacacccggcggguacugccugacccgcuggaugcugaucgaggcugaacucaaguguuucggaaacaccgccguggcuaaaugcaaugagaagcaugaugaggaauuuugcgacaugcugagacuuuucgauuuuuguaaacaggccauuagccggcugaagucuccugcgcagauguccauccagcucauuaacaaagccguuaaugcucugaucaacgaccaacuuauuaugaagaaucaucugcgcgacaucaugggcauccccuauugcaacuacagcaaguauugguaccucaaucacacaauuacggggaaaaccucucugccuaaguguuggcuggugagcaacggauccuaccucaaugagacacacuucucugaugacaucgaacagcaggccgauaacaugauuaccgagaugcugcaaaaagaauauauggagagacagggcaagacaccgcuugggcuggucgaccucuucguguuuagcaccuccuucuaccugaucagcauuuuucugcggcuugugaaaauccccacgcaccgccauauugucggaaagccuugccccaaaccucacagacucaaucauaugggcaucuguucuugcggccuguauaagcagcccgggguuccggugcgguggaagagaugaggacuagucccuguucccagagcccacuuuuuuuucuuuuuuugaaauaaaauagccugucuuucagaucucaaaggcucuuuucagagccaccaaaaaaaaaaaaaaaaaaaaaaaaaaaaaaaaaaaaaaaaaaaaaaaaaaaaaaaaaaaaaaaaaaaaaaaaaaaaaaaaaaaaaaaaaaaaaaaaaaaaa

SEQ ID NO: 23722 - RNA, 1764 nt, Artificial Sequence
  mRNA product Design a-2 (hSL-A100) comprising derived and/or modified sequence from LASV(Togo/2016/7082;Clade VI)__AMR44577__GPCmut2 (opt5)
aggagaguccgcucagccagguugcagaagcggcuuagcguguguccuaaucuucucucugcguguagguaggccugugccgcaaacaagcuuaccaugggccagaucauuaccuucuuucaagaggugccccacgucaucgaagagguuaugaacauugugcugaucgcccucagccugcuugcuauucugaaggggguguacaaugucgccacaugcggaaucaucggccucgugacguuccuguuucuuugugggagauccugcucucugauuuauaaaggaagcuacgaacuccagacccuggagcugaacauggaaacacucaauauguguaugccucuguccugcaccaagaacucuagccaucacuauauccggguuggcaaugagacagggcuugagcugacccucacaaacaccuccauuaucaaucauaaauucuguaaccugucugacgcgcacaagcgcaaucuuuacgaucaugcucugaugagcauucucuccacguuucaccugagcaucccgaacuucaaucaguaugaagccaugucuugcgacuuuaacggaggcaaaauuuccgugcaguacaaucugagccacgccuaugcugucgaugccgcugagcauuguggcaccguggccaacgggguucuccaaacauucaugagaauggcguggggaggcucuuacaucgcccuggacuccgggcggggaaauugggauugcaucaugaccagcuaccaguaucuuauuauccagaacacaaccugggaagaccacugucaguuuucucgccccuccccuauuggcuaccuggggcuccugagccaaagaacgcgggauaucuauauuucccgcagacggcgcggaacauucaccuggacacuuucugacagcgagggcaacgagacccccggcggguacugccugaccagauggaugcucaucgaagcugagcugaaguguuuuggaaauacagccguggcuaagugcaacgaaaaacaugaugaggaguucugcgacaugcugcggcucuuugauuucuguaagcaggccauccagcgccugaaauccccugcgcagaugagcauucaacuuaucaauaaggccgucaacgcucugauuaaugaccagcucaucaugaaaaaccaccugagagauaugaugggcauucccuauugcaauuacucuaaguauugguaccuuaaccacacguccagcgggcggaccucucugccuaaguguuggcucgugagcaauggauccuaccugaacgaaacacauuucucugacgacaucgagcagcaagccgauaauaugaucaccgaaaugcugcagaaagaguauauugaccgccagggcaagacaccgcucgggcugguggaucuuuuugucuucagcaccuccuuuuaccugaucagcauuuuccuccaccugaucaaaauucccacgcauagacacaucguuggaaagccuugccccaaaccucaucggcugaaccacaugggcauuuguucuugcggccuuuauaagcagcccggggugccgacaagauggaaacgcugaggacuagucccuguucccagagcccacuuuuuuuucuuuuuuugaaauaaaauagccugucuuucagaucucaaaggcucuuuucagagccaccaaaaaaaaaaaaaaaaaaaaaaaaaaaaaaaaaaaaaaaaaaaaaaaaaaaaaaaaaaaaaaaaaaaaaaaaaaaaaaaaaaaaaaaaaaaaaaaaaaaaa

SEQ ID NO: 23723 - RNA, 1764 nt, Artificial Sequence
  mRNA product Design a-2 (hSL-A100) comprising derived and/or modified sequence from LASV(KAK-428;Clade n.d. (VII))__ANH09740__GPCmut2 (opt5)
aggagaguccgcucagccagguugcagaagcggcuuagcguguguccuaaucuucucucugcguguagguaggccugugccgcaaacaagcuuaccaugggccagaucgugaccuucuuucaagaggucccccacguuauugaagaggugaugaacaucgugcugauugcccucagccugcuugcuauccugaaggggcucuacaauuucgccacaugcggagucauuggccugaucacguuucuucugcucugugggagauccugcucugcgaccuauaaaggacaguacgaacugcagacacuggagcucaacauggaaagccugaauauguguaugccucuuuccugcaccaagaacaauucucaucacuauauccgggcuggcaacaauacagggcuggagcucacccugacaaacaccagcauuaucucccauaaauucuguaaucuuucugacgcccacaagaaaaaccuguacgaucauacgcucaugagcauuaucaccacauuucaccuguccauuccgaauuucaaccaguaugaggccaugagcugcgacuuuaauggaggcaagaucucuauucaauacaaccugucccacagcuaugcuggcgaugccgcucagcauugugggaccguggccaauggaguucuccagacauucaugcgcauggcguggggcgggucuuaccuggcccuugacuccggaagacggggcugggauugcaucaucagcucuuaccaguaucugauuauccaaaacaccacgugggacgaucacugucaguuuucccgccccagcccuauuggguaccucggauucgugucccagaagacaagagacaucuauauuucucggcgcagacggggcaccuuuacauggacccugagcgauuccgaaggccaugacaugcccgggggauacugccuuacccgcuggaugcugaucgaggcugaucucaaauguuucggcaacacagccgucgcuaagugcaaugaaaaacacgacgaggaguuuugcgauauguggagacuguucgacuucuguaagcaggccauccaacggcugaaagcgccugcccagaugaacauucagcucaucaauaaggcugugaacgcccugauuaaugaccaacuuaugaugaagaaccaucugcgcgauaucauggggauucccuauugcaauuacagcaaauuuugguaucucaacaauacgaccacaggaagaaccucucugccucgguguuggcuuaucuccaacggcagcuaccugaaugaaacacacuucucugacgauaucgagcagcaggcugacaacaugauuaccgaaaugcuccagaaggaguacauggaucgccaagggaaaacgccgcugggacugguugaccucuuuguguucagcacauccuuuuaucugaucaccauuuuccuucaccuggucaagauccccacccauagacacauugugggcaaaccuugccccaagccucaucggcucaaucacaugggcaucuguucuugcgggcuguacaaacagcccggagugccggucagauggaagcgcugaggacuagucccuguucccagagcccacuuuuuuuucuuuuuuugaaauaaaauagccugucuuucagaucucaaaggcucuuuucagagccaccaaaaaaaaaaaaaaaaaaaaaaaaaaaaaaaaaaaaaaaaaaaaaaaaaaaaaaaaaaaaaaaaaaaaaaaaaaaaaaaaaaaaaaaaaaaaaaaaaaaaa

SEQ ID NO: 23724 - RNA, 1764 nt, Artificial Sequence; identical to SEQ ID NO: 23718
  mRNA product Design a-2 (hSL-A100) comprising derived and/or modified sequence from LASV(Pinneo-NIG-1969;Clade I)__AIT17836__GPCmut2 (opt5)

SEQ ID NO: 23725 - RNA, 1764 nt, Artificial Sequence
  mRNA product Design a-2 (hSL-A100) comprising derived and/or modified sequence from LASV(ISTH0009-NIG-2011;Clade II)__AIT17404__GPCmut2 (opt5)
aggagaguccgcucagccagguugcagaagcggcuuagcguguguccuaaucuucucucugcguguagguaggccugugccgcaaacaagcuuaccaugggccagaucauuaccuucuuucaagaggugccccacgucaucgaagagguuaugaacauugugcugaucgcccucagccugcuugcuauucugaaggggaucuacaauguggccacaugcggacucuucggccuggucuccuuucuucugcucugugggagaucuugcagcacgaccuauaaaggaguguacgaacugcagacacuggagcucgacauggcgucccugaacauguguaugccucuuucuugcaccaagaauaacagccaucacuauaucaugguuggcaaugaaacagggcuggagcucacccugacaaacaccuccauuaucaaucauaaauucuguaaccuuucugaugcucacaagaaaaaucuguacgaccaugcccucaugagcauuaucuccacguuucaccugagcauuccgaacuucaaucaguaugaggccaugucuugcgauuuuaacggaggcaagaucuccgugcaguacaaucugagccacgcuuaugccgucgacgcugccaaccauuguggcaccauugcgaauggggugcuccaaacauucaugcggauggccuggggaggcucuuacaucgcucuggauuccgggaagggaagcugggacugcaucaugaccucuuaccaguaucuuauuauccagaacacaaccugggaagaucacugucaguuuucccgccccagcccuauuggcuaccuggggcuccugucccaaagaacgcgggacaucuauauuucucgcagacggcgcggaacauucaccuggacacuuagcgauuccgagggcaacgaaacccccggcggguacugccugaccagauggaugcucaucgaggccgagcugaaauguuuuggaaauacagcuguugccaagugcaacgaaaaacaugacgaggaguucugcgauaugcugcggcucuuugacuucuguaagcaggcgauccgcagacugaaaacgccugcccagaugagcauucagcuuaucaauaaggcugugaacgcccugauuaaugaucaacucaucaugaagaaccaucugcgggacauuaugggcauccccuauugcaauuacucuaaauauugguaccuuaaccacaccgucacagggaagaccucccugccucgcuguuggcucgugagcaauggaucuuaccugaacgaaacacacuucagcgacgauaucgaacagcaggcugacaauaugauuaccgagcugcuccaaaaagaguauauggauagacagggcaagacgccgcuggggcuuguggaccuguuugucuucuccacaucuuuuuaccucaucagcauuuuccugcaccugaucaaaauucccacccaucggcacaucaccggaaagccuugccccaaaccucaucgccuuaaccacaugggcauuuguuccugcggccucuauaagcaccccgggguuccggugaaguggaaaagaugaggacuagucccuguucccagagcccacuuuuuuuucuuuuuuugaaauaaaauagccugucuuucagaucucaaaggcucuuuucagagccaccaaaaaaaaaaaaaaaaaaaaaaaaaaaaaaaaaaaaaaaaaaaaaaaaaaaaaaaaaaaaaaaaaaaaaaaaaaaaaaaaaaaaaaaaaaaaaaaaaaaaa

SEQ ID NO: 23726 - RNA, 1764 nt, Artificial Sequence
  mRNA product Design a-2 (hSL-A100) comprising derived and/or modified sequence from LASV(ISTH2010-NIG-2012;Clade II)__AIT17482__GPCmut2 (opt5)
aggagaguccgcucagccagguugcagaagcggcuuagcguguguccuaaucuucucucugcguguagguaggccugugccgcaaacaagcuuaccaugggccagaucauuaccuucuuucaagaggugccccacgucaucgaagagguuaugaacauugugcugaucgcccucagccugcuugcuauucugaaggggaucuacaauguggccacaugcggacucuucggccuggucuccuuucuucugcucugugggagaucuugcagcacgaccuauaaaggaguguacgaacugcagacacuggagcucgacauggcgucccugaacauguguaugccucuuucuugcaccaagaauaacagccaucacuauaucaugguuggcaaugaaacagggcuggagcucacccugacaaacaccuccauuaucaaucauaaauucuguaaccuuucugaugcucacaagaaaaaucuguacgaccaugcccucaugagcauuaucuccacguuucaccugagcauuccgaacuucaaucaguaugaggccaugucuugcgauuuuaacggaggcaagaucuccgugcaguacaaucugagccacgcuuaugccgucgacgcugccaaccauuguggcaccauugcgaauggggugcuccaaacauucaugcggauggccuggggaggcucuuacaucgcucuggauuccgggaagggaagcugggacugcaucaugaccucuuaccaguaucuuauuauccagaacauuacaugggaagaucacugucaguuuucccgccccagcccuaucggcuaccuggggcuccugucccaaagaacccgggacauuuauaucucucgcagacggcgcggaacguucacauggacccuuagcgauuccgagggcaacgaaacacccggcggguacugccugaccagauggaugcucaucgaggccgagcugaaauguuuuggaaauaccgcuguugccaagugcaacgaaaaacaugacgaggaguucugcgauaugcugcggcucuuugacuucuguaagcaggcgauucgcagacugaaaacgccugcccagaugagcauccagcuuauuaauaaggcugugaacgcccugaucaaugaucaacucauuaugaagaaccaucugcgggacaucaugggcauccccuauugcaauuacucuaaauauugguaccuuaaccacacagucaccgggaagacaucccugccucgcuguuggcucgugagcaauggaucuuaccugaacgaaacccacuucagcgacgauauugaacagcaggcugacaauaugaucacagagcugcuccaaaaagaguauauugauagacagggcaagaccccgcuggggcuuguggaccuguuugucuucuccacgucuuuuuaccucaucagcauuuuccugcaccugguuaaaauccccacacaucggcacguggugggaaagccuugccccaaaccucaucgccuuaaccacaugggcauuuguuccugcggccucuauaagcaccccggggucccggugaaguggaaaagaugaggacuagucccuguucccagagcccacuuuuuuuucuuuuuuugaaauaaaauagccugucuuucagaucucaaaggcucuuuucagagccaccaaaaaaaaaaaaaaaaaaaaaaaaaaaaaaaaaaaaaaaaaaaaaaaaaaaaaaaaaaaaaaaaaaaaaaaaaaaaaaaaaaaaaaaaaaaaaaaaaaaaa

SEQ ID NO: 23727 - RNA, 1764 nt, Artificial Sequence
  mRNA product Design a-2 (hSL-A100) comprising derived and/or modified sequence from LASV(Lassa virus/H.sapiens-wt/NGA/2015/ISTH_0543;Clade II)__AVO03639__GPCmut2 (opt5)
aggagaguccgcucagccagguugcagaagcggcuuagcguguguccuaaucuucucucugcguguagguaggccugugccgcaaacaagcuuaccaugggccagaucauuaccuucuuucaagaggugccccacgucaucgaagagguuaugaacauugugcugaucgcccucagccugcuugcuauucugaaggggaucuacaauguggccacaugcggacucuucggccuggucuccuuucuucugcucugugggagaucuugcagcacgaccuauaaaggaguguacgaacugcagacacuggagcucgacauggcgaaccugaauauguguaugccucuuuccugcaccaagaacaauucucaucacuauaucaugguuggcaacgaaacagggcuggagcucacccugacaaauaccagcauuaucaaccauaaauucuguaaucuuuccgaugcucacaagaaaaaccuguacgaccaugcccucaugucuauuaucagcacguuucaccuguccauuccgaauuucaaccaguaugaggccaugagcugcgauuuuaauggaggcaagaucucugugcaguacaaccugucccacaccuaugcugucgacgccgcuaaucauuguggcacaauugccaacggggugcuccaaaccuucaugcggauggcguggggaggcagcuacaucgcccuggauucugggaagggauccugggacugcaucaugacaagcuaccaguaucuuguuauucagaacaccacgugggaagaucacugucaguuuucucgccccuccccuaucggcuaccuggggcuccugagccaaagaacacgggacauuuauaucucccgcagacggcgcggaaccuucacauggacccuuucugauagcgagggcaaugaaacccccggcggguacugccugacaagauggaugcucauugaggcugagcugaaauguuuuggaaacacggccguggcuaagugcaaugaaaaacaugacgaggaguucugcgauaugcugcggcucuuugacuucuguaagcaggccauccgcagacugaaaaccccugcgcagauguccauccagcuuauuaacaaggccgucaaugcucugaucaacgaucaacucauuaugaagaaucaucugcgggacaucaugggcauucccuauugcaacuacagcaaauauugguaccuuaaucacacagugaccgggaagacaucucugccucgcuguuggcucguguccaacggaagcuaccugaaugaaacccacuucucugacgauaucgaacagcaggccgacaacaugaucacggagcugcuccaaaaagaguauauugauagacagggcaagacaccgcuggggcuugucgaccuguuuguuuucagcaccuccuuuuaccucaucucuauuuuccugcaccuggugaaaauccccacccaucggcacauuacaggaaagccuugccccaaaccucaucgccuuaaucacaugggcaucuguagcugcggccucuauaagcaccccggggugccggucaaguggaaaagaugaggacuagucccuguucccagagcccacuuuuuuuucuuuuuuugaaauaaaauagccugucuuucagaucucaaaggcucuuuucagagccaccaaaaaaaaaaaaaaaaaaaaaaaaaaaaaaaaaaaaaaaaaaaaaaaaaaaaaaaaaaaaaaaaaaaaaaaaaaaaaaaaaaaaaaaaaaaaaaaaaaaaa

SEQ ID NO: 23728 - RNA, 1764 nt, Artificial Sequence
  mRNA product Design a-2 (hSL-A100) comprising derived and/or modified sequence from LASV(Lassa virus/H.sapiens-wt/NGA/2016/ISTH_0009;Clade II)__AVO03571__GPCmut2 (opt5)
aggagaguccgcucagccagguugcagaagcggcuuagcguguguccuaaucuucucucugcguguagguaggccugugccgcaaacaagcuuaccaugggccagaucauuaccuucuuucaagaggugccccacgucaucgaagagguuaugaacauugugcugaucgcccucagccugcuugcuauucugaaggggaucuacaauguggccacaugcggacuccugggccuugucuccuuccugcuccugugugggagaucuugcagcacgaccuauaaaggaguguacgaacugcagacacucgagcuggacauggcgucccuuaacauguguaugccucugucuugcaccaagaauaacagccaucacuauaucaugguuggcaaugaaacagggcucgagcugacccuuacaaacaccuccauuaucaaucauaaauuuuguaaccugucugaugcucacaagaaaaaucucuacgaccaugcccugaugagcauuaucuccacguuccaccugagcauuccgaacuuuaaucaguaugaggccaugucuugcgauuucaacggaggccggaucuccgugcaguacaaucucagccacucuuaugcugucgacgccgcuaaccauuguggcaccauugccaauggggugcugcaaacauuuaugcgcauggcguggggaggcuccuacaucgcccuugauagcgggaagggaucuugggacugcaucaugaccuccuaccaguaucugauuauccagaacacaaccugggaagaucacugucaguucagcagacccuccccuauuggcuaccucgggcugcuuucucaacggacgcgcgacaucuauauuagcagacggcgcagaggaacauuuaccuggacacuguccgauagcgagggcaacgaaacccccggcggguacugccucacccgguggaugcugaucgaggcugagcugaaguguuucggaaauacagccguugcuaaaugcaacgaaaagcaugacgaggaauuuugcgauaugcuccgccuguucgacuuuuguaaacaggccaucagacggcuuaagacgccugcgcagaugucuauucagcugaucaauaaagccgugaacgcucucauuaaugaucaacugaucaugaagaaccaccuucgcgacauuaugggcauccccuauugcaauuacuccaaguauugguaccugaaccacaccgucacagggaaaaccagccucccuagauguuggcuggugucuaauggaagcuaccugaacgagacacauuucuccgacgauaucgaacagcaggccgacaauaugauuaccgagcuccugcaaaaggaguauaucgaucggcagggcaaaacgccgcuugggcugguggaccucuucgucuuuucuaccagcuucuaccugauuuccaucuuucugcaccuuguuaagauucccacacaucgccacaucaccggaaaaccuugccccaagccucauagacucaaccacaugggcauuuguagcugcggccuguauaaucaccccggggugccggugaaauggaagcggugaggacuagucccuguucccagagcccacuuuuuuuucuuuuuuugaaauaaaauagccugucuuucagaucucaaaggcucuuuucagagccaccaaaaaaaaaaaaaaaaaaaaaaaaaaaaaaaaaaaaaaaaaaaaaaaaaaaaaaaaaaaaaaaaaaaaaaaaaaaaaaaaaaaaaaaaaaaaaaaaaaaaa

SEQ ID NO: 23729 - RNA, 1764 nt, Artificial Sequence
  mRNA product Design a-2 (hSL-A100) comprising derived and/or modified sequence from LASV(Lassa virus/H.sapiens-wt/NGA/2016/ISTH_0017;Clade II)__AVO03567__GPCmut2 (opt5)
aggagaguccgcucagccagguugcagaagcggcuuagcguguguccuaaucuucucucugcguguagguaggccugugccgcaaacaagcuuaccaugggccagaucauuaccuucuuucaagaggugccccacgucaucgaagagguuaugaacauugugcugaucgcccucagccugcuugcuauucugaaggggaucuacaauguggccacaugcggacucuucggccuggucuccuuucuucugcucugugggagaucuugcagcacgaccuauaaaggaguguacgaacugcagacacuggagcucgacauggcgucccugaacauguguaugccucuuucuugcaccaagaauaacagccaucacuauaucaugguuggcaaugaaacagggcuggagcucacccugacaaacaccuccauuaucaaucauaaauucuguaaccuuucugaugcucacaagaaaaaucuguacgaccaugcccucaugagcauuaucuccacguuucaccugagcauuccgaacuucaaucaguaugaggccaugucuugcgauuuuaacggaggcaagaucuccgugcaguacaaucugagccacaccuaugcuauugacgccgcuaaccauuguggcacaaucgccaaugggguccuccaaaccuucaugcggauggcguggggaggcucuuacaucgcccuggauuccgggaagggaagcugggacugcauuaugacaucuuaccaguaucuuaucauucagaacaccacgugggaagaucacugucaguuuucccgccccagcccuaucggcuaccuggggcuccugucccaaagaacacgggacauuuauaucucucgcagacggcgcggaaccuucacauggacccuuagcgauuccgagggcaacgaaacccccggcggguacugccugacaagauggaugcucaucgaggcugagcugaaauguuuuggaaauacggccguggcuaagugcaacgaaaaacaugacgaggaguucugcgauaugcugcggcucuuugacuucuguaagcaggccauucgcagacugaaaaccccugcgcagaugagcauccagcuuauuaauaaggccguuaacgcucugaucaaugaucaacucauuaugaagaaccaucugcgggacaucaugggcauccccuauugcaauuacucuaaauauugguaccuuaaccacacagugaccgggaagacaucccugccucgcuguuggcucgucagcaauggaucuuaccugaacgaaacccacuucagcgacgauauugaacagcaggccgacaauaugaucacggagcugcuccaaaaagaguauauggauagacagggcaagacaccgcuggggcuuguggaccuguuuguguucuccaccucuuuuuaccucauuagcaucuuccugcaccugguccggauucccacccaucgccacguuaucggaaaaccuugccccaagccucauagacuuaaccacaugggcauuuguuccugcggccucuauaaacaccccggggugccggugaaguggaagcggugaggacuagucccuguucccagagcccacuuuuuuuucuuuuuuugaaauaaaauagccugucuuucagaucucaaaggcucuuuucagagccaccaaaaaaaaaaaaaaaaaaaaaaaaaaaaaaaaaaaaaaaaaaaaaaaaaaaaaaaaaaaaaaaaaaaaaaaaaaaaaaaaaaaaaaaaaaaaaaaaaaaaa

SEQ ID NO: 23730 - RNA, 1764 nt, Artificial Sequence
  mRNA product Design a-2 (hSL-A100) comprising derived and/or modified sequence from LASV(Lassa virus/H.sapiens-wt/NGA/2018/ISTH_0959;Clade II)__AVV65099__GPCmut2 (opt5)
aggagaguccgcucagccagguugcagaagcggcuuagcguguguccuaaucuucucucugcguguagguaggccugugccgcaaacaagcuuaccaugggccagaucauuaccuucuuucaagaggugccccacgucaucgaagagguuaugaacauugugcugaucgcccucagccugcuugcuauucugaaggggaucuacaauguggucacaugcggacucuucggccugguguccuuucuucugcucugugggagaucuugcagcacgaccuauaaaggaguuuacgaacugcagacacuggagcucgacauggccucccugaacauguguaugccucuuucuugcaccaagaauaacagccaucacuauaucauggugggcaaugaaacagggcuggagcucacccugacaaacaccuccauuaucaaucauaaauucuguaaccuuucugaugcgcacaagaaaaaucuguacgaccaugcucucaugagcauuaucuccacguuucaccugagcauuccgaacuucaaucaguaugaggccaugucuugcgauuuuaacggaggcaagaucuccguccaguacaaucugagccacgccuaugcuauugacgccgcuaaccauuguggcaccaucgccaauggggugcuccaaacauucaugcggauggcguggggaggcucuuacaucgcccuggauuccgggaagggaagcugggacugcauuaugaccucuuaccaguaucuuaucauucagaacacaaccugggaagaucacugucaguuuucccgccccagcccuaucggcuaccuggggcuccugucccaaagaacgcgggacauuuauaucucucgcagacggcgcggaacauucaccuggacacuuagcgauuccgagggcaacgaaacccccggcggguacugccugaccagauggaugcucaucgaggcugagcugaaauguuuuggaaauacagccguugcuaagugcaacgaaaaacaugacgaggaguucugcgauaugcugcggcucuuugacuucuguaagcaggccauucgcagacugaaaacgccugcgcagaugagcauccagcuuauuaauaaggccgugaacgcucugaucaaugaucaacucauuaugaagaaccaucugcgggacaucaugggcauccccuauugcaauuacucuaaauauugguaccuuaaccacaccgucacagggaagaccucccugccucgcuguuggcucgugagcaauggaucuuaccugaacgaaacacacuucagcgacgauauugaacagcaggccgacaauaugaucaccgagcugcuccaaaaagaguauauugauagacagggcaagacgccgcuggggcuuguggaccuguuugucuucuccacaucuuuuuaccucaucagcauuuuccugcaccugguuaaaauccccacccaucggcacgugauuggaaagccuugccccaaaccucaucgccuuaaccacaugggcaucuguuccugcggccucuauaagcaccccggggugccggucaaguggaaaagaugaggacuagucccuguucccagagcccacuuuuuuuucuuuuuuugaaauaaaauagccugucuuucagaucucaaaggcucuuuucagagccaccaaaaaaaaaaaaaaaaaaaaaaaaaaaaaaaaaaaaaaaaaaaaaaaaaaaaaaaaaaaaaaaaaaaaaaaaaaaaaaaaaaaaaaaaaaaaaaaaaaaaa

SEQ ID NO: 23731 - RNA, 1764 nt, Artificial Sequence
  mRNA product Design a-2 (hSL-A100) comprising derived and/or modified sequence from LASV(LASV003-NIG-2008;Clade II)__AIT17580__GPCmut2 (opt5)
aggagaguccgcucagccagguugcagaagcggcuuagcguguguccuaaucuucucucugcguguagguaggccugugccgcaaacaagcuuaccaugggccagaucauuaccuucuuucaagaggugccccacgucaucgaagagguuaugaacauugugcugaucgcccucagccugcuugcuauucugaaggggaucuacaauguggccacaugcggacucuucggccuggucuccuuucuucugcucugugggagaucuugcagcacgaccuauaaaggaguguacgaacugcagacacuggagcucgacauggcgucccugaacauguguaugccucuuucuugcaccaagaauaacagccaucacuauaucaugguuggcaaugaaacagggcuggagcucacccugacaaacaccuccauuaucaaucauaaauucuguaaccuuucugaugcucacaagaaaaaucuguacgaccaugcccucaugagcauuaucuccacguuucaccugagcauuccgaacuucaaucaguaugaggccaugucuugcgauuuuaacggaggcaagaucuccgugcaguacaaucugagccacaccuaugcugucgacgccgcuaaccauuguggcacaauugccaauggggugcuccaaaccuucaugcggauggcguggggaggcucuuacaucgcccuggauuccgggaagggaagcugggacugcaucaugacaucuuaccaguaucuuauuauccagaacaccacgugggaagaucacugucaguuuucccgccccagcccuauuggcuaccuggggcuccugucccaaagaacacgggacaucuauauuucucgcagacggcgcggaaccuucacauggacccuuagcgauuccgagagcaacgaaacccccggcggcuacugccugacaagauggaugcucaucgaggcugagcugaaauguuuugggaauacggccguugcuaagugcaacgaaaaacaugacgaggaguucugcgauaugcugcggcucuuugacuucuguaagcaggccauccgcagacugaaagcgccugcccagaugucuauucagcuuaucaauaaggcugugaacgcccugauuaaugaucaacucaucaugaagaaccaucugcgggacauuaugggaauccccuauugcaauuacuccaaauauugguaccuuaaccacaccgucacaggccgcaccagccugccuagauguuggcucgugucuaaugggagcuaccugaacgaaacacacuucuccgacgauaucgaacagcaggcugacaauaugauuaccgagcugcuccaaaaggaguauauggaucggcagggaaaaacgccgcugggccuuguggaccuguuugucuucucuaccagcuuuuaccucaucuccauuuuccugcaccugguuaagauccccacacaucgccacgugauugggaaaccuugccccaagccucauagacuuaaccacaugggaaucuguagcugcggccucuauaaacaccccggcgugccggucaaguggaagcggugaggacuagucccuguucccagagcccacuuuuuuuucuuuuuuugaaauaaaauagccugucuuucagaucucaaaggcucuuuucagagccaccaaaaaaaaaaaaaaaaaaaaaaaaaaaaaaaaaaaaaaaaaaaaaaaaaaaaaaaaaaaaaaaaaaaaaaaaaaaaaaaaaaaaaaaaaaaaaaaaaaaaa

SEQ ID NO: 23732 - RNA, 1764 nt, Artificial Sequence
  mRNA product Design a-2 (hSL-A100) comprising derived and/or modified sequence from LASV(LASV035-NIG-2009;Clade II)__AIT17588__GPCmut2 (opt5)
aggagaguccgcucagccagguugcagaagcggcuuagcguguguccuaaucuucucucugcguguagguaggccugugccgcaaacaagcuuaccaugggccagaucauuaccuucuuucaagaggugccccacgucaucgaagagguuaugaacauugugcugaucgcccucagccugcuugcuauucugaaggggaucuacaauguggccacaugcggacucuucggccuggucuccuuucuucugcucugugggagaucuugcagcacgaccuauaaaggaguguacgaacugcagacacuggagcucgacauggcgucccugaacauguguaugccucuuucuugcaccaagaauaacagccaucacuauaucaugguuggcaaugaaacagggcuggagcucacccugacaaacaccuccauuaucaaucauaaauucuguaaccuuucugaugcucacaagaaaaaucuguacgaccaugcccucaugagcauuaucuccacguuucaccugagcauuccgaacuucaaucaguaugaggccaugucuugcgauuuuaacggaggcaagaucuccgugcaguacaaucugagccacgcuuaugccgucgacgcugccaaccauuguggcaccauugcgaauggggugcuccaaacauucaugcggauggccuggggaggcucuuacaucgcucuggauuccgggaagggaagcugggacugcaucaugaccucuuaccaguaucuuauuauccagaacacaaccugggaagaucacugucaguuuucccgccccagcccuauuggcuaccuggggcuccugucccaaagaacgcgggacaucuauauuucucgcagacggcgcggaacauucaccuggacacuuagcgauuccgagggcaacgaaacccccggcggguacugccugaccagauggaugcucaucgaggccgagcugaaauguuuuggaaauacagcuguugccaagugcaacgaaaaacaugacgaggaguucugcgauaugcugcggcucuuugacuucuguaagcaggcgauccgcagacugaaagccccugcucagaugagcauucagcuuaucaauaaggccgugaacgcucugauuaaugaucaacucaucaugaagaaccaucugcgggacauuaugggcauccccuauugcaauuacucuaaauauugguaccuuaaccacacggucaccgggaagacaucccugccucgcuguuggcucgugagcaauggaucuuaccugaacgaaacccacuucagcgacgauaucgaacagcaggccgacaauaugauuacagagcugcuccaaaaagaguauaucgauagacagggcaagaccccgcuggggcuuguggaccuguuugucuucuccacgucuuuuuaccucauuagcaucuuccugcaccugguuaaaauucccacacaucggcacgugaucggaaagccuugccccaaaccucaucgccuuaaccacaugggcauuuguuccugcggccucuauaagcaccccggggugccggucaaguggaaaagaugaggacuagucccuguucccagagcccacuuuuuuuucuuuuuuugaaauaaaauagccugucuuucagaucucaaaggcucuuuucagagccaccaaaaaaaaaaaaaaaaaaaaaaaaaaaaaaaaaaaaaaaaaaaaaaaaaaaaaaaaaaaaaaaaaaaaaaaaaaaaaaaaaaaaaaaaaaaaaaaaaaaaa

SEQ ID NO: 23733 - RNA, 1764 nt, Artificial Sequence
  mRNA product Design a-2 (hSL-A100) comprising derived and/or modified sequence from LASV(LASV1000-NIG-2009;Clade II)__AIT17782__GPCmut2 (opt5)
aggagaguccgcucagccagguugcagaagcggcuuagcguguguccuaaucuucucucugcguguagguaggccugugccgcaaacaagcuuaccaugggccagaucauuaccuucuuucaagaggugccccacgucaucgaagagguuaugaacauugugcugaucgcccucagccugcuugcuauucugaaggggaucuacaauguggccacaugcggacucuucggccuggucuccuuucuucugcucugugggagaucuugcagcacgaccuauaaaggaguguacgaacugcagacacuggagcucgacauggcgucccugaacauguguaugccucuuucuugcaccaagaauaacagccaucacuauaucaugguuggcaaugaaacagggcuggagcucacccugacaaacaccuccauuaucaaucauaaauucuguaaccuuucugaugcucacaagaaaaaucuguacgaccaugcccucaugagcauuaucuccacguuucaccugagcauuccgaacuucaaucaguaugaggccaugucuugcgauuuuaacggaggcaagaucuccgugcaguacaaucugagccacaccuaugcugucgacgccgcuaaccauuguggcacaauugccaauggggugcuccaaaccuucaugcggauggcguggggaggcucuuacaucgcccuggauuccgggaagggaagcugggacugcaucaugacaucuuaccaguaucuuauuauccagaacaccacgugggaagaucacugucaguuuucccgccccagcccuauuggcuaccuggggcuccugucccaaagaacacgggacaucuauauuucucgcagacggcgcggaaccuucacauggacccuuagcgauuccgagggcaacgaaacccccggcggguacugccugacaagauggaugcucaucgaggcugagcugaaauguuuuggaaauacggccguugcuaagugcaacgaaaaacaugacgaggaguucugcgauaugcugcggcucuuugacuucuguaagcaggccaucaaacgccugaagaccccugcgcagaugagcauucagcuuaucaauaaggccgugaacgcucugauuaaugaucaacucaucaugaaaaaccaccugagagacauuaugggcauccccuauugcaauuacucuaaguauugguaccuuaaccacacagucaccgggaaaacaucccugccucgguguuggcucgugagcaauggaucuuaccugaacgaaacccauuucagcgacgauaucgaacagcaggccgacaauaugauuacggagcugcuccaaaaggaguauaucgaucgccagggcaaaacaccgcuggggcuuguggaccuguuugucuucuccaccucuuuuuaccucauuagcaucuuccugcaccugguuaagauucccacccauagacacguggugggaaaaccuugccccaagccucaucggcuuaaccacaugggcaucuguuccugcggccucuauaagcaccccggggucccggugaaauggaagcgcugaggacuagucccuguucccagagcccacuuuuuuuucuuuuuuugaaauaaaauagccugucuuucagaucucaaaggcucuuuucagagccaccaaaaaaaaaaaaaaaaaaaaaaaaaaaaaaaaaaaaaaaaaaaaaaaaaaaaaaaaaaaaaaaaaaaaaaaaaaaaaaaaaaaaaaaaaaaaaaaaaaaaa

SEQ ID NO: 23734 - RNA, 1764 nt, Artificial Sequence
  mRNA product Design a-2 (hSL-A100) comprising derived and/or modified sequence from LASV(LASV221-NIG-2010;Clade II)__AIT17624__GPCmut2 (opt5)
aggagaguccgcucagccagguugcagaagcggcuuagcguguguccuaaucuucucucugcguguagguaggccugugccgcaaacaagcuuaccaugggccagaucauuaccuucuuucaagaggugccccacgucaucgaagagguuaugaacauugugcugaucgcccucagccugcuugcuauucugaaggggaucuacaauguggccacaugcggacucuucggccuggucuccuuucuucugcucugugggagaucuugcagcacgaccuauaaaggaguguacgaacugcagacacuggagcucgacauggcgucccugaacauguguaugccucuuucuugcaccaagaauaacagccaucacuauaucaugguuggcaaugaaacagggcuggagcucacccugacaaacaccuccauuaucaaucauaaauucuguaaccuuucugaugcucacaagaaaaaucuguacgaccaugcccucaugagcauuaucuccacguuucaccugagcauuccgaacuucaaucaguaugaggccaugucuugcgauuuuaacggaggcaagaucuccgugcaguacaaucugagccacaccuaugcuauugacgccgcuaaccauuguggcacaaucgccaaugggguccuccaaaccuucaugcggauggcguggggaggcucuuacaucgcccuggauuccgggaagggaagcugggacugcauuaugacaucuuaccaguaucuuaucauucagaacaccacgugggaagaucacugucaguuuucccgccccagcccuaucggcuaccuggggcuccugucccaaagaacacgggacauuuauaucucucgcagacggcgcggaaccuucacauggacccuuagcgauuccgagggcaacgaaacccccggcggguacugccugacaagauggaugcucaucgaggcugagcugaaauguuuuggaaauacggccguggcuaagugcaacgaaaaacaugacgaggaguucugcgauaugcugcggcucuuugacuucuguaagcaggccauucgcagacugaaaaccccugcgcagaugagcauccagcuuauuaauaaggccguuaacgcucugaucaaugaucaacucauuaugaagaaccaucugcgggacaucaugggcauccccuauugcaauuacucuaaauauugguaccuuaaccacacagugaccgggaagacaucccugccucgcuguuggcucgucagcaauggaucuuaccugaacgaaacccacuucagcgacgauauugaacagcaggccgacaauaugaucacggagaugcugcaaaaagaguauauggauagacagggcaagacaccgcucgggcugguggaccuuuuuguguucuccaccucuuuuuaccugauuagcaucuuccuccaccuggucaaaauucccacccaucggcacguuaucggaaagccuugccccaaaccucaucgccugaaccacaugggcauuuguuccugcggccuuuauaagcaccccggggugccggugaaguggaaaagaugaggacuagucccuguucccagagcccacuuuuuuuucuuuuuuugaaauaaaauagccugucuuucagaucucaaaggcucuuuucagagccaccaaaaaaaaaaaaaaaaaaaaaaaaaaaaaaaaaaaaaaaaaaaaaaaaaaaaaaaaaaaaaaaaaaaaaaaaaaaaaaaaaaaaaaaaaaaaaaaaaaaaa

SEQ ID NO: 23735 - RNA, 1764 nt, Artificial Sequence
  mRNA product Design a-2 (hSL-A100) comprising derived and/or modified sequence from LASV(LASV237-NIG-2010;Clade II)__AIT17638__GPCmut2 (opt5)
aggagaguccgcucagccagguugcagaagcggcuuagcguguguccuaaucuucucucugcguguagguaggccugugccgcaaacaagcuuaccaugggccagaucauuaccuucuuucaagaggugccccacgucaucgaagagguuaugaacauugugcugaucgcccucagccugcuugcuauucugaaggggaucuacaauguggccacaugcggacucuucggccuggucuccuuucuucugcucugugggagaucuugcagcacgaccuauaaaggaguguacgaacugcagacacuggagcucgacauggcgucccugaacauguguaugccucuuucuugcaccaagaauaacagccaucacuauaucaugguuggcaaugaaacagggcuggagcucacccugacaaacaccuccauuaucaaucauaaauucuguaaccuuucugaugcucacaagaaagaccuguacgaucaugcccucaugagcauuaucuccacguuucaccugagcauuccgaauuucaaccaguaugaggccaugucuugcgacuuuaauggaggcaagaucuccgugcaguacaaccugagccacaccuaugcugucgaugccgcuaaucauuguggcacaauugccaacggggugcuccaaaccuucaugcggauggcguggggaggcucuuacaucgcccuggacuccgggaagggaagcugggauugcaucaugacaucuuaccaguaucuuauuauccagaauaccacgugggaagaccacugucaguuuucccgccccagcccuauuggcuaccuggggcuccugucccaaagaacacgggauaucuauauuucucgcagacggcgcggaaccuucacauggacccuuagcgacuccgagggcaacgaaacccccggcggguacugccugacaagauggaugcucaucgaggcugagcugaaauguuuuggaaacacggccguugcuaagugcaaugaaaaacaugaugaggaguucugcgacaugcugcggcucuuugauuucuguaagcaggccauccgcagacugaaaaccccugcgcagaugagcauucagcuuaucaacaaggccgugaaugcucugauuaacgaccaacucaucaugaagaaucaucugcgggacauuaugggcauccccuauugcaacuacucuaaauauugguaccuuaaucacacagucaccgggaagacaucccugccucgcuguuggcucgugagcaacggaucuuaccugaaugaaacccacuucagcgaugacaucgaacagcaggccgauaacaugauuacggagcugcuccaaaaagaguauauggacagacagggcaagacaccgcuggggcuuguggaucuguuugucuucuccaccucuuuuuaccucaucagcauuuuccugcaccugaucaaaauucccacccaucggcacaucacaggaaagccuugccccaaaccucaucgccuuaaucacaugggcauuuguuccugcggccucuauaagcaccccgggguuccggugaaguggaaaagaugaggacuagucccuguucccagagcccacuuuuuuuucuuuuuuugaaauaaaauagccugucuuucagaucucaaaggcucuuuucagagccaccaaaaaaaaaaaaaaaaaaaaaaaaaaaaaaaaaaaaaaaaaaaaaaaaaaaaaaaaaaaaaaaaaaaaaaaaaaaaaaaaaaaaaaaaaaaaaaaaaaaaa

SEQ ID NO: 23736 - RNA, 1764 nt, Artificial Sequence
  mRNA product Design a-2 (hSL-A100) comprising derived and/or modified sequence from LASV(LASV253-NIG-2011;Clade II)__AIT17670__GPCmut2 (opt5)
aggagaguccgcucagccagguugcagaagcggcuuagcguguguccuaaucuucucucugcguguagguaggccugugccgcaaacaagcuuaccaugggccagaucauuaccuucuuucaagaggugccccacgucaucgaagagguuaugaacauugugcugaucgcccucagccugcuugcuauucugaaggggaucuacaauguggccacaugcggacucuucggccuggucuccuuucuucugcucugugggagaucuugcagcacgaccuauaaaggaguguacgaacugcagacacuggagcucgacauggcgucccugaacauguguaugccucuuucuugcaccaagaauaacagccaucacuauaucaugguuggcaaugaaacagggcuggagcucacccugacaaacaccuccauuaucaaucauaaauucuguaaccuuucugaugcucacaagaaaaaucuguacgaccaugcccucaugagcauuaucuccacguuucaccugagcauuccgaacuucaaucaguaugaggccaugucuugcgauuuuaacggaggcaagaucuccgugcaguacaaucugagccacaccuaugcugucgacgccgcuaaccauuguggcacaauugccaauggggugcuccaaaccuucaugcggauggcguggggaggcucuuacaucgcccuggauuccgggaagggaagcugggacugcaucaugacaucuuaccaguaucuuauuauccagaacaccacgugggaagaucacugucaguuuucccgccccagcccuauuggcuaccuggggcuccugucccaaagaacacgggacaucuauauuucucgcagacggcgcggaaccuucacauggacccuuagcgauuccgagggcaacgaaacccccggcggguacugccugacaagauggaugcucaucgaggcugagcugaaauguuuuggaaauacggccguugcuaagugcaacgaaaaacaugacgaggaguucugcgauaugcugcggcucuuugacuucuguaagcaggccauccgcagacugaaagcgccugcccagaugagcauucagcuuaucaauaaggcugugaacgcccugauuaaugaucaacucaucaugaagaaccaucugcgggacauuaugggcauccccuauugcaauuacucuaaauauugguaccuuaaccacaccgucacagggcgcaccucccugccuagauguuggcucgugagcaauggaucuuaccugaacgaaacacacuucagcgacgauaucgaacagcaggcugacaauaugauuaccgagcugcuccaaaaggaguauaucgaucggcagggcaaaacgccgcuggggcuuguggaccuguuugucuucuccacaucuuuuuaccucauuagcaucuuccugcaccugguuaagauucccacccaucgccacaucauuggaaaaccuugccccaagccucauagacuuaaccacaugggcaucuguuccugcggccucuauaaacaccccggggugccggugaaguggaagcggugaggacuagucccuguucccagagcccacuuuuuuuucuuuuuuugaaauaaaauagccugucuuucagaucucaaaggcucuuuucagagccaccaaaaaaaaaaaaaaaaaaaaaaaaaaaaaaaaaaaaaaaaaaaaaaaaaaaaaaaaaaaaaaaaaaaaaaaaaaaaaaaaaaaaaaaaaaaaaaaaaaaaa

SEQ ID NO: 23737 - RNA, 1764 nt, Artificial Sequence
  mRNA product Design a-2 (hSL-A100) comprising derived and/or modified sequence from LASV(LASV254-NIG-2011;Clade II)__AIT17674__GPCmut2 (opt5)
aggagaguccgcucagccagguugcagaagcggcuuagcguguguccuaaucuucucucugcguguagguaggccugugccgcaaacaagcuuaccaugggccagaucauuaccuucuuucaagaggugccccacgucaucgaagagguuaugaacauugugcugaucgcccucagccugcuugcuauucugaaggggaucuacaauguggccacaugcggacucuucggccuggucuccuuucuucugcucugugggagaucuugcagcacgaccuauaaaggaguguacgaacugcagacacuggagcucgacaugaccaaccugaauauguguaugccucuuuccugcacaaagaacaauucucaucacuauaucaugguuggcaacgaaaccgggcuggagcucacacugaccaauacgagcauuaucaaccauaaauucuguaaucuuuccgaugcgcacaagaaaaaccuguacaaucaugcucucaugucuauuaucagcaccuuucaccuguccauuccgaacuucaaucaguaugaggccaugagcugcgacuuuaacggaggcaagaucucugugcaguacaaucugucccacagcuaugccgucgaugcugccaaccauuguggcacaauugcuaacggggugcuccaaaccuucaugcggauggccuggggaggcucuuacaucgcgcuggacuccgggaagggaaauugggauugcaucaugacaagcuaccaguaucuuauuauccagaacaccacgugggaagaccacugucaguuuucucgccccuccccuauuggcuaccuggggcuccugagccaaagaacacgggauaucuauauuucccgcagacggcgcggaaccuucacauggacccuuucugacagcgagggcaaugaaacccccggcggguacugccugacaagauggaugcucaucgaggccgagcugaaauguuuuggaaacacggcuguugccaagugcaaugaaaaacaugaugaggaguucugcgacaugcugcggcucuuugauuucuguaagcaggcuauccgcagacugaaaaccccugcccaggcgaacauucagcuuaucaauaaggccgugaacgcucugauuaaugaccaacucaucaugaagaaccaucugcgggauauuaugggcauccccuauugcaauuacuccaaauauugguaccuuaaccacacagucaccgggaagacaagccugccucgcuguuggcucgugucuaauggauccuaccugaacgaaacccacuucagcgacgacaucgaacagcaggccgauaauaugauuacggagcugcuccaaaaagaguauauggacagacagggcaagacaccgcuggggcuuguggaucuguuugucuucucuaccagcuuuuaccucaucuccauuuuccugcaccugguuaaaauccccacccaucggcacgugauuggaaagccuugccccaaaccucaucgccuuaaccacaugggcaucuguucuugcggccucuauaagcaccccggggugccggucaaguggaaaagaugaggacuagucccuguucccagagcccacuuuuuuuucuuuuuuugaaauaaaauagccugucuuucagaucucaaaggcucuuuucagagccaccaaaaaaaaaaaaaaaaaaaaaaaaaaaaaaaaaaaaaaaaaaaaaaaaaaaaaaaaaaaaaaaaaaaaaaaaaaaaaaaaaaaaaaaaaaaaaaaaaaaaa

SEQ ID NO: 23738 - RNA, 1764 nt, Artificial Sequence
  mRNA product Design a-2 (hSL-A100) comprising derived and/or modified sequence from LASV(Nig08-A19;Clade III)__ADU56618__GPCmut2 (opt5)
aggagaguccgcucagccagguugcagaagcggcuuagcguguguccuaaucuucucucugcguguagguaggccugugccgcaaacaagcuuaccaugggccagaucgugaccuucuuucaagaggucccccacguuauugaagaggugaugaacaucgugcugauugcccucagcauccuggcuauucuuaaggggcuguacaauaucgccacaugcggacucaucggccuggucacguuccuucugcucuccgggagaucuuguagcaugaccuauaaaggaguguacgaacugcagacacuggagcucaacaugaauacccugaacaugugcaugccucuuuccuguacaaagaauaacucucaucacuauauuaugguuggcaaugaaaccgggcuggagcucacacugaccaacacgagccuucugcaucacaaauuuugcaaucucuccgacgcgcauaagaaaaaccuguacgaucacacccugaugucuaucauuagcacauuccaccucuccaucccgaauuuuaaccaguaugaggcuaugagcugugacuucaauggaggcaagauuaccgugcaguacaaccugucucauuccuaugccaucgaugccgcuaaucacugcggcacagucgccaacggggugcuucaaaccuuuaugcggauggcuuggggaggcagcuacauugcccuggacucugggcgcggaaagugggauuguaucaugacguccuaccaguaucucaucauucagaacacaaccugggaagaccauugccaguucagcagacccucuccuaucggcuaccuggggcuucugucccaacggacacgcgauauuuauaucagcagacggcgcagaggaaccuuuaccuggacacucuccgacucugagggcaaugaaacgcccggcggguacugucugacccgguggaugcugauugaggcggagcucaaaugcuucggaaacacagccguugcuaaguguaaugaaaaacacgaugaggaauuuugcgacaugcugcgccuuuucgauuuuugcaagcaggccaucagacggcugaaagcuccugcccagaugagcauccagcucauuaacaaggcggugaaugcccugaucaacgaccaacuuauuaugaagaaucaucugcgcgauaucaugggcauucccuauuguaacuacuccaaauauugguaccucaaucacaccagcacagggagaaccucucugccucggugcuggcuggucuccaacggaagcuaccucaaugagacgcacuucucugacgacaucgaacagcaggcugauaacaugaucacagagaugcugcaaaaggaguaucuugaccgccagggcaaaaccccgcuggggcucguggaucuguucguguuuagcaccuccuucuaccugauuucuaucuuucuucaucucgucaagauucccacacacagacauaucguuggaaaaccuugucccaagccucaccggcugaaucacaugggcauuugcagcuguggccuguauaaacagcccggggugccggugagauggaagcgcugaggacuagucccuguucccagagcccacuuuuuuuucuuuuuuugaaauaaaauagccugucuuucagaucucaaaggcucuuuucagagccaccaaaaaaaaaaaaaaaaaaaaaaaaaaaaaaaaaaaaaaaaaaaaaaaaaaaaaaaaaaaaaaaaaaaaaaaaaaaaaaaaaaaaaaaaaaaaaaaaaaaaa

SEQ ID NO: 23739 - RNA, 1767 nt, Artificial Sequence
  mRNA product Design a-2 (hSL-A100) comprising derived and/or modified sequence from LASV(G1180-SLE-2010;Clade IV)__AIT17168__GPCmut2 (opt5)
aggagaguccgcucagccagguugcagaagcggcuuagcguguguccuaaucuucucucugcguguagguaggccugugccgcaaacaagcuuaccaugggccagaucgugaccuucuuucaagaggucccccacguuauugaagaggugaugaacaucgugcugauugcccucagcauccuggcuguccuuaaggggcuguacaauuucgccacaugcggacucgugggccugcuuacguuucugcuccugugugggagauccugcaccgcgucucgguauaaaggaguuuacgaacugcagacacucgagcugaacauggaaacccuuaauauguguaugccucugagcugcacaaagaacaauucccaucacuauauuauggugggcaacgagaccgggcucgagcugacacuuaccaauacgucuaucaucaaccauaaauucuguaaucugagcgacgcucacaagaaaaaccucuacgaucaugcccugauguccauuaucucuaccuuucaccugagcauuccgaauuucaaccaguaugaagccauguccugcgacuuuaauggaggcaagaucagcguccaguacaaccucucucacuccuaugcuggcgaugccgcuaaucauugugggacaguggccaacggaguucugcaaaccuucaugcgcauggcguggggcgggagcuacauugcccuugacucuggacacggcuccugggauugcaucaugacaagcuaccaguaucugauuauccagaacaccacgugggaggaccauugucaguuuucuagacccuccccuaucggguaccucggacugcuuagccaacggacacgcgauauuuauaucuccagacggcgcagaggcaccuucacauggacccugucugacagcgaaggcaaggauacccccgggggauacugccucacacgguggaugcugauugaggcugagcugaaauguuuuggcaauacggccguggcuaagugcaacgaaaaacacgacgaggaguucugcgauaugcuccgccuguuugacuucuguaagcaggccauccagagacuuaaagcgccugcccagauguccauucaacugaucaauaaggcugucaacgcccucaucaaugaucagcugauuaugaagaaccaccuucgggacaucauggggauucccuauugcaauuacagcaaauauugguaccugaaccauaccacaaccggaaagacaucucucccuaaauguuggcugguguccaauggcagcuaccugaacgaaacccacuucucugacgauaucgaacagcaagcugacaauaugauuacggagaugcuccagaaggaguauauggaacgccaggggaaaacaccgcugggacuuguggaucuguuugucuucagcaccuccuuuuaccucaucucuaucuuccugcaucugguuaagauucccacccacagacauaucgugggcaaaagcugcccuaagccccaccggcuuaaccacaugggcauuuguuccugcgggcucuauaagcagccuggagugcccgucaaauggaagcgcugaggacuagucccuguucccagagcccacuuuuuuuucuuuuuuugaaauaaaauagccugucuuucagaucucaaaggcucuuuucagagccaccaaaaaaaaaaaaaaaaaaaaaaaaaaaaaaaaaaaaaaaaaaaaaaaaaaaaaaaaaaaaaaaaaaaaaaaaaaaaaaaaaaaaaaaaaaaaaaaaaaaaa

SEQ ID NO: 23740 - RNA, 1767 nt, Artificial Sequence
  mRNA product Design a-2 (hSL-A100) comprising derived and/or modified sequence from LASV(G1442-SLE-2011;Clade IV)__AIT17180__GPCmut2 (opt5)
aggagaguccgcucagccagguugcagaagcggcuuagcguguguccuaaucuucucucugcguguagguaggccugugccgcaaacaagcuuaccaugggccagaucgugaccuucuuucaagaggucccccacguuauugaagaggugaugaacaucgugcugauugcccucagcauccuggcuguccuuaaggggcuguacaauguggccacaugcggacucauuggccugguuacguuccuucugcucugugggagauccugcaccacaacccuguauaaaggaguguacgaacugcagacacucgagcugaacauggaaacccuuaauauguguaugccucugucuugcacaaagaacaauagccaucacuauauccgggucggcaacgagaccgggcucgagcugacgcuuaccaauacauccaucauuaaccauaaauuuuguaaucugucugacgcgcacaagaaaaaccucuacgaucaugcucugaugagcaucauuuccaccuuccaccugucuaucccgaauuuuaaccaguaugaagccaugagcugcgacuucaauggaggcaagauuuccgugcaguacaaccucagccacucuuaugccggcgaugcugccaaucauugugggacaguugcuaacggagugcugcaaaccuuuaugcgcauggccuggggcggguccuacaucgcgcuugacagcggaagaggcaacugggauugcauuaugacgucuuaccaguaucugaucauccagaauacaaccugggacgaucacugucaguucucccggcccagcccuauuggguaccucggacugcuuucucaacgcacaagagacgucuauaucucccggcgcagacggggcaccuuuaccuggacacugagcgauuccgagggcaaggacacgcccgggggauacugccucacccgcuggaugcugauugaagccgagcugaaauguuucggcaacacagcuguggccaagugcaaugagaaacaugaugaagaguuuugcgacaugcucagacuguucgauuuuuguaagcaggcuauccagcggcuuaaagccccugcgcagaugucuauucaacugaucaacaaggccgugaaugcucucaucaacgaccagcugauuaugaagaaucaccuucgcgacaucauggggauucccuauugcaacuacagcaaauauugguaccugaauaacaccgccacaggaaagaccucccucccuaaauguuggcugaucagcaauggcucuuaccugaacgaaacgcacuucuccgaugacauugagcaggaagcugauaauaugaucacagagaugcuccaaaaggaguauauggaaagacaggggaaaaccccgcugggacuugucgaccuguucguuuuuagcaccucuuucuaccucaucagcauuuuucugcaucuggugaagauccccacacaccggcauauugugggcaaauccugcccuaagccccaccgccuuaaccauaugggcaucuguucuugcgggcucuauaagcagccuggaguccccgugagauggaaacggugaggacuagucccuguucccagagcccacuuuuuuuucuuuuuuugaaauaaaauagccugucuuucagaucucaaaggcucuuuucagagccaccaaaaaaaaaaaaaaaaaaaaaaaaaaaaaaaaaaaaaaaaaaaaaaaaaaaaaaaaaaaaaaaaaaaaaaaaaaaaaaaaaaaaaaaaaaaaaaaaaaaaa

SEQ ID NO: 23741 - RNA, 1767 nt, Artificial Sequence
  mRNA product Design a-2 (hSL-A100) comprising derived and/or modified sequence from LASV(G3010-SLE-2013;Clade IV)__AIT17344__GPCmut2 (opt5)
aggagaguccgcucagccagguugcagaagcggcuuagcguguguccuaaucuucucucugcguguagguaggccugugccgcaaacaagcuuaccaugggccagaucgugaccuucuuucaagaggucccccacguuauugaagaggugaugaacaucgugcugauugcccucagcauccuggcuguccuuaaggggcuguacaauuucgccacaugcggacucgugggccugguuacguuucuucugcucugugggagauccugcaccacaucucuguauaaaggaguguacgaacugcagacccucgagcugaacauggaaacacuuaauauguguaugccucugagcugcaccaagaacaauucccaucacuauauuauggucggcaacgagacagggcucgagcugacccuuacgaauaccucuaucaucaaccauaaauucuguaaucugagcgacgcgcacaagaaaaaccucuacaaucaugcucugauguccauuaucucuacauuucaccugagcauuccgaacuucaaucaguaugaagccauguccugcgauuuuaacggaggcaagaucagcgugcaguacaaucucucucacuccuaugccggcgacgcugccagccauugugggaccguugcuaacggagugcugcaaacauucaugcggauggccuggggcgggucuuacauugcgcuugauuccggauacggcaagugggacugcaucaugaccagcuaucaguaccugauuauccagaacacgacaugggaggaucacugucaguuuucucgccccuccccuaucggguaucucggacugcuuagccaaagaacccgggacauuuacaucucccgcagacggcgcggcacauucaccuggacccugucugauagcgaaggcaaagacacacccgggggauauugccucacgagauggaugcugauugaggccgagcugaaguguuuuggcaauaccgcugucgccaaaugcaacgaaaagcaugaugaggaguucugcgacaugcuccggcuguuugauuucuguaaacaggcuauccagcgccuuaagaccccugcccagauguccauucaacugaucaauaaggcggugaacgcccucaucaaugaccagcugauuaugaaaaaccaccuuagagauaucauggggauucccuacugcaauuauagcaaguacugguaccugaaccacacaacaaccggaaaaacgucucucccuaaguguuggcugguguccaauggcagcuaucugaacgaaacacauuucucugacgacaucgaacagcaagcugauaauaugauuaccgagaugcuccagaaagaguacauggaacggcaggggaagaccccgcugggacuugucgaccuguuuguuuucagcacauccuuuuaucucaucucuaucuuccugcaccuggugaaaauucccacccaucgccacaucgugggcaagagcugcccuaagccccauagacuuaaccacaugggcauuuguuccugcgggcucuacaaacagccuggaguccccgugcgguggaagcgcugaggacuagucccuguucccagagcccacuuuuuuuucuuuuuuugaaauaaaauagccugucuuucagaucucaaaggcucuuuucagagccaccaaaaaaaaaaaaaaaaaaaaaaaaaaaaaaaaaaaaaaaaaaaaaaaaaaaaaaaaaaaaaaaaaaaaaaaaaaaaaaaaaaaaaaaaaaaaaaaaaaaaa

SEQ ID NO: 23742 - RNA, 1767 nt, Artificial Sequence
  mRNA product Design a-2 (hSL-A100) comprising derived and/or modified sequence from LASV(G502-SLE-2009;Clade IV)__AIT17126__GPCmut2 (opt5)
aggagaguccgcucagccagguugcagaagcggcuuagcguguguccuaaucuucucucugcguguagguaggccugugccgcaaacaagcuuaccaugggccagaucgugaccuucuuucaagaggucccccacguuauugaagaggugaugaacaucgugcugauugcccucagcauccuggcuguccuuaaggggcuguacaauuucgccacaugcggacucgugggccugcuuacguuucugcuccugugugggagauccugcaccacaggacuguauaaaggcguuuacgaacuccagacccuggagcuuaacauggaaacacugaauauguguaugccucucucuugcaccaagaacaauagccaucacuauauuaugguggggaacgagacaggacuggagcuuacccugacgaauaccuccaucaucaaccauaaauucuguaaucucucugacgcgcacaagaaaaaccuguacgaucaugcucugaugagcauuaucuccacauuucaccucucuauuccgaauuucaaccaguaugaagccaugagcugcgacuuuaauggcggcaagaucuccguccaguacaaccugagccacucuuaugccggggaugcugccgaccauuguggaaccguggcuaauggcguucuucaaacauucaugcggauggccuggggaggguccuacauugcgcuggauagcggccgcgggagaugggacugcaucaugaccucuuaccaguaucucauuauccagaacacgacaugggaggaucacugucaguuuucccggcccagcccuaucggauaccugggccuucugucucaacgcaccagagacauuuauaucucccggcgcagacggggcacauucaccuggacccucagcgauuccgaagggaaggacacacccggaggcuacugccugacgcgcuggaugcugauugaggccgagcucaaauguuuugggaacaccgcuguggccaagugcaaugaaaaacaugaugaggaguucugcgacaugcugagacuuuuugauuucuguaagcaggcuauccagcggcugaaagccccugcgcagaugucuauucaacucaucaacaaggccgucaaugcucugaucaacgaccagcuugugaugaagaaucaucugcgcgacauuaugggaauccccuauugcaacuacagcagauauugguaccucaaucacacaaccacaggccggaccucccugccuaaauguuggcuggugagcaacgggucuuaccucaaugaaacgcacuucuccgaugacauugaacagcaagccgauaacaugaucacagagaugcugcagaaggaguauauggaacgccagggaaaaaccccgcuuggccuggucgaccucuuuguuuucagcaccucuuuuuaccugauuagcaucuuccugcaccuugugaagauccccacacauagacacauugugggcaaauccugcccuaagccccaucggcucaaucacauggggaucuguucuugcggacuguauaaacagccuggcguccccgugaaguggaagagaugaggacuagucccuguucccagagcccacuuuuuuuucuuuuuuugaaauaaaauagccugucuuucagaucucaaaggcucuuuucagagccaccaaaaaaaaaaaaaaaaaaaaaaaaaaaaaaaaaaaaaaaaaaaaaaaaaaaaaaaaaaaaaaaaaaaaaaaaaaaaaaaaaaaaaaaaaaaaaaaaaaaaa

SEQ ID NO: 23743 - RNA, 1767 nt, Artificial Sequence
  mRNA product Design a-2 (hSL-A100) comprising derived and/or modified sequence from LASV(G733-SLE-2010;Clade IV)__AIT17154__GPCmut2 (opt5)
aggagaguccgcucagccagguugcagaagcggcuuagcguguguccuaaucuucucucugcguguagguaggccugugccgcaaacaagcuuaccaugggccagaucgugaccuucuuucaagaggucccccacguuauugaagaggugaugaacaucgugcugauugcccucagcauccuggcuguccuuaaggggcuguacaauuucgccacaugcggaauugugggccucguuuccuuucugcuucugugugggagaucuugcacgaccagccucuauaaaggaguguacgaacugcagacacuggagcucaacauggaaacccugaauauguguaugccucuuuccugcacaaagaacaauucucaucacuauaucauggucggcaacgagaccgggcuggagcucacacugaccaauacgagcaucauuaaccauaaauucuguaaucuuuccgacgcgcacaagaaaaaccuguacgaucaugcucucaugucuaucauuagcaccuuucaccuguccaucccgaauuucaaccaguaugaagccaugagcugcgacuuuaauggaggcaagauuucugugcaguacaaccugucccacagcuaugccggcgaugcugccaaucauugugggacaaucgcuaacggaguucuccaaaccuucaugcggauggccuggggcgggucuuacauugcgcuggacuccggacgcgauagaugggacugcaucaugacaagcuaccaguaucuuaucauucagaacaccacgugggaggaucacugucaguuuucucggcccuccccuaucggcuaccuggggcuccugagccaacgcacaagagacauuuauaucucccggcgcagacggggaaccuucacauggacccuuucugauagcgaaggcaaggacacccccggcggguacugccugacacgcuggaugcucauugaggccgagcugaaauguuuuggaaauacggcuguggccaagugcaacgaaaaacaugaugaggaguucugcgacaugcugagacucuuugauuucuguaagcaggcuauccagcggcugaaagccccugcgcagauguccauccaacuuauuaauaaggccgucaacgcucugaucaaugaccagcucauuaugaagaaccaucugcgcgacaucaugggcauucccuauugcaauuacagcaaauauugguaccuuaaccacaccacaaccgggaagacaucucugccuaaauguuggcucguguccaauggaagcuaccugaacgaaacccacuucucugaugacaucgaacagcaagccgauaauaugaucacggagaugcugcagaaggaguauauggaaagacagggcaaaacaccgcucgggcugguggaccuuuuugucuucagcaccuccuuuuaccugauuucuaucuuccuccaccugguuaagauucccacccaucggcacguggugggaaaaagcugcccuaagccccaucgccugaaccacaugggcaucuguuccugcggccuuuaugggcagccuggaguccccgugaaguggaaaagaugaggacuagucccuguucccagagcccacuuuuuuuucuuuuuuugaaauaaaauagccugucuuucagaucucaaaggcucuuuucagagccaccaaaaaaaaaaaaaaaaaaaaaaaaaaaaaaaaaaaaaaaaaaaaaaaaaaaaaaaaaaaaaaaaaaaaaaaaaaaaaaaaaaaaaaaaaaaaaaaaaaaaa

SEQ ID NO: 23744 - RNA, 1767 nt, Artificial Sequence
  mRNA product Design a-2 (hSL-A100) comprising derived and/or modified sequence from MOPV/LASV reassortant(IGS-1;Clade IV)__AFY05576__GPCmut2 (opt5)
aggagaguccgcucagccagguugcagaagcggcuuagcguguguccuaaucuucucucugcguguagguaggccugugccgcaaacaagcuuaccaugggccagaucgugaccuucuuucaagaggucccccacguuauugaagaggugaugaacaucgugcugauugcccucagcguccuggcugugcuuaaggggcuguacaauuucgccacaugcggacucguuggccuggugacguuucuucugcucugugggagauccugcaccacaucucuguauaaaggagucuacgaacugcagacccucgagcugaacauggaaacacuuaauauguguaugccucugagcugcaccaagaacaauucccaucacuauaucauggugggcaacgagacagggcucgagcugacccuuacgaauaccucuauuaucaaccauaaauucuguaaucugagcgacgcgcacaagaaaaaccucuacgaucaugcucugauguccaucauuucuacauuucaccugagcaucccgaauuucaaccaguaugaagccauguccugcgacuuuaauggaggcaagauuagcguucaguacaaccucucucacuccuaugccggcgaugcugccaaucauugugggaccguggcuaacggaguccugcaaacauucaugcggauggccuggggcgggagcuacaucgcgcuugacucuggacgcggcaacugggauugcauuaugaccuccuaccaguaucugaucauucagaauacgacaugggaggaccacugucaguuuagcagacccucuccuaucggguaccucggacugcuuucccaacggacccgcgauaucuauauuagcagacggcgcagaggcacauucaccuggacccuguccgacucugaaggcgaggauacacccgggggauacugccucacgcgguggaugcugaucgaggccgaacugaaguguuuuggcaacaccgcuguggccaaaugcaaugagaagcaugacgaagaguucugcgauaugcuccgccuguuugacuucuguaaacaggcuauucagagacuuaaggccccugcgcagaugagcauccaacugauuaacaaagccgugaaugcucucaucaacgaucagcugaucaugaagaaucaccuucgggacauuauggggauccccuauugcaacuacuccaaguauugguaccugaaucacacaaccacaggacgcaccagccucccuaaauguuggcuggucucuaacggcuccuaccugaaugaaacgcauuucagcgacgauauugagcagcaagccgacaacaugaucacagagaugcuccagaaggaauauauggagagacaggggaaaaccccgcugggacuuguugaucuguuuguguucucuaccagcuuuuaccucauuuccaucuuccugcaccuggugaagauccccacacaucggcacauugucggcaaaucuugcccuaagccccaucgccuuaaucacaugggcaucuguagcugcgggcucuauaaacagccuggagugcccguuaaguggaagagaugaggacuagucccuguucccagagcccacuuuuuuuucuuuuuuugaaauaaaauagccugucuuucagaucucaaaggcucuuuucagagccaccaaaaaaaaaaaaaaaaaaaaaaaaaaaaaaaaaaaaaaaaaaaaaaaaaaaaaaaaaaaaaaaaaaaaaaaaaaaaaaaaaaaaaaaaaaaaaaaaaaaaa

SEQ ID NO: 23745 - RNA, 1767 nt, Artificial Sequence
  mRNA product Design a-2 (hSL-A100) comprising derived and/or modified sequence from LASV(LM765-SLE-2012;Clade IV)__AIT17814__GPCmut2 (opt5)
aggagaguccgcucagccagguugcagaagcggcuuagcguguguccuaaucuucucucugcguguagguaggccugugccgcaaacaagcuuaccaugggccagaucgugaccuucuuucaagaggucccccacguuauugaagaggugaugaacaucgugcugauugcccucagcauccuggcuguccuuaaggggcuguacaauuucgccacaugcggacucgugggccugguuacguuucuucugcucugugggagauccugcaccacaucucuguauaaaggaguguacgaacugcagacccucgagcugaacauggaaacacuuaauauguguaugccucugagcugcaccaagaacaauucccaucacuauauuauggucggcaacgagacagggcucgagcugacccuuacgaauaccucuaucaucgaccauaaauucuguaaccugagcgaugcgcaccggaagaaucucuacgaccaugcucugauguccauuaucucuacauuucaccugagcauuccgaacuucaaucaguaugaagccauguccugcgauuuuaacggaggcaaaaucagcgugcaguacaaucucucucacuccuaugccaaggacgcugccgaucauuguggcaccguugcuaacggggugcugcaaacauucaugcgcauggccuggggaggcagcuacauugcgcuugacucugggagaggacggugggauugcaucaugaccuccuaccaguaucugauuauccagaauacgacaugggaggaccacugucaguuuagccgccccucuccuaucggcuaccucgggcugcuuucccaaagaacccgggauauuuauaucagccgcagacggcgcggaacauucaccuggacccuguccgacucugaaggcaaggauacacccggcggguacugccucacgagauggaugcugauugaggccgagcugaaauguuuuggaaacaccgcugucgccaagugcaacgaaaaacaugacgaggaguucugcgauaugcuccggcuguuugacuucuguaagcaggcuauccagcgccuuaaagccccugcgcagaugagcauucaacugaucaauaaggccgugaacgcucucaucaaugaccagcugauuaugaagaaccaccuuagagauaucaugggcauucccuauugcaauuacuccaaauauugguaccugaaccacacaaccacagggaagaccagccucccuaaauguuggcuggugucuaauggauccuaccugaacgaaacgcauuucagcgacgauaucgaacagcaagccgacaauaugauuacagagaugcuccagaaggaguauauggaacggcagggcaaaaccccgcuggggcuugucgaucuguuuguuuucucuaccagcuuuuaccucaucuccaucuuccugcaccuggugaagauucccacacaucgccacaucgugggaaaaccuugccccaagccucauagacuuaaccacaugggcauuuguucuugcggccucuauaagcagcccggggucccggugaaauggaagcggugaggacuagucccuguucccagagcccacuuuuuuuucuuuuuuugaaauaaaauagccugucuuucagaucucaaaggcucuuuucagagccaccaaaaaaaaaaaaaaaaaaaaaaaaaaaaaaaaaaaaaaaaaaaaaaaaaaaaaaaaaaaaaaaaaaaaaaaaaaaaaaaaaaaaaaaaaaaaaaaaaaaaa

SEQ ID NO: 23746 - RNA, 1767 nt, Artificial Sequence
  mRNA product Design a-2 (hSL-A100) comprising derived and/or modified sequence from LASV(LM776-SLE-2012;Clade IV)__AIT17824__GPCmut2 (opt5)
aggagaguccgcucagccagguugcagaagcggcuuagcguguguccuaaucuucucucugcguguagguaggccugugccgcaaacaagcuuaccaugggccagaucgugaccuucuuucaagaggucccccacguuauugaagaggugaugaacaucgugcugauugcccucagcauccuggcuguccuuaaggggcuguacaauuucgccacaugcggacucgugggccugguuacguuucuucugcucugugggagauccugcaccacaucuguguauaaaggagucuacgaacugcagacccuggagcucaacauggaaacacugaauauguguaugccucuuagcugcaccaagaacaauucccaucacuauauuauggugggcaacgagacagggcuggagcucacccugacgaauaccucuaucaucaaccauaaauucuguaaucuuagcgacgcgcacaagaaaaaccuguacgaucaugcucucauguccauuaucucuacauuucaccugagcauuccgaauuucaaccaguaugaagccauguccugcgacuuuaauggaggcaagaucagcguucaguacaaccugucucacuccuaugccggcgaugcugccaaucauugugggaccguggcuaacggaguccuccaaacauucaugcggauggccuggggcgggagcuacauugcgcuggacucuggacacggcaagugggauugcaucaugaccuccuaccaguaucuuauuauccagaacacgacaugggaggaccauugucaguuuagccgccccucuccuaucggguaccugggacuccugucccaaagaacccgggauauuuauaucagccgcagacggcgcggcacauucaccuggacccuuuccgacucugaaggcaaagauacacccgggggauacugccugacgagauggaugcucauugaggccgagcugaaguguuuuggcaauaccgcuguggccaaaugcaacgaaaagcacgacgaggaguucugcgauaugcugcggcucuuugacuucuguaaacaggcuauccagcgccugaaggccccugcgcagaugagcauucaacuuaucaauaaggccgugaacgcucugaucaaugaucagcucauuaugaaaaaccaccugagagacaucauggggauucccuauugcaauuacuccaaguauugguaccuuaaccauacaaccacaggaaaaaccagccugccuaaguguuggcucgucucuaauggcuccuaccugaacgaaacgcacuucagcgacgauaucgaacagcaagccgacaauaugauuacagagaugcugcagaaagaguauauggaacggcaggggaagaccccgcucggacugguugaucuuuuuguguucucuaccagcuuuuaccugaucuccaucuuccuccaucuggugaaaauucccacacaccgccauaucgucggcaagucuugcccuaagccccacagacugaaccacaugggcauuuguagcugcgggcuuuauaaacagccuggagugcccguucgguggaagcgcugaggacuagucccuguucccagagcccacuuuuuuuucuuuuuuugaaauaaaauagccugucuuucagaucucaaaggcucuuuucagagccaccaaaaaaaaaaaaaaaaaaaaaaaaaaaaaaaaaaaaaaaaaaaaaaaaaaaaaaaaaaaaaaaaaaaaaaaaaaaaaaaaaaaaaaaaaaaaaaaaaaaaa

SEQ ID NO: 23747 - RNA, 1767 nt, Artificial Sequence
  mRNA product Design a-2 (hSL-A100) comprising derived and/or modified sequence from LASV(Mad39;Clade IV)__ANH09722__GPCmut2 (opt5)
aggagaguccgcucagccagguugcagaagcggcuuagcguguguccuaaucuucucucugcguguagguaggccugugccgcaaacaagcuuaccaugggccagaucgugaccuucuuucaagaggucccccacguuauugaagaggugaugaacaucgugcugauugcccucagcauccuggcuguccuuaaggggcuguacaauguggccacaugcggacucauuggccugguuacguuccuucugcucugugggagauccugcaccacaacccuguauaaaggaguguacgaacugcaggcgcucgagcugaacauggaaacacuuaauauguguaugccucugucuugcaccaagaacaauagccaucacuauauccgggucggcaacgagacagggcucgagcugacccuuacgaauaccucccugaucaaccauaaauuuuguaaucucucugacgcucacaagaaaaaccuguacgaucaugcccugaugagcauuaucuccacauuccaccucucuauuccgaauuuuaaccaguaugaagccaugagcugcgacuucaaugauggaaagaucuccgugcaguacaaccugagccacaccuaugcuggcgacacagccaaucauuguggcaccguugcuaacggggugcuucaaacguuuaugcgcauggccuggggaggcucuuacauugcgcuggauuccgggagaggaggcugggacugcaucaugacaagcuaccaguaucucauuauccagaacaccacaugggaggaucacugucaguucucucggcccuccccuaucggguaccugggacuucugagccaacgcaccagagacauuuauaucucucggcgcagacggggcaccuuuacauggacgcucuccgauagcgaaggcaaggacacccccgggggauacugccugacacgcuggaugcugauugaggccgagcucaaauguuucggcaauaccgcugucgccaagugcaacgaaaaacaugaugaggaauuuugcgacaugcugagacuuuucgauuuuuguaagcaggcuauccagcggcugaaagccccugcgcagauguccauucaacucaucaauaaggccgugaacgcucugaucaaugaccagcuuauuaugaagaaccaucugcgcgacaucauggggauucccuauugcaauuacucuaaauauugguaccucaaccacacagugaccggaaagacgagccugccuaaauguuggcuggucuccaauggcagcuaccucaacgagacacacuucucugaugacaucgaacagcaagccgauaauaugauuaccgagaugcugcagaaggaguauauggaaagacaggggaaaaccccgcuuggacugguugaccucuucguguuuuccaccagcuucuaccugaucucuaucuuucugcaccuugugaagauucccacacaucggcacgucgugggcaaaccuugccccaagccucaucgccucaaccacaugggcaucuguagcugcggguucuauaagcagcccggaguuccggugagauggaaacggugaggacuagucccuguucccagagcccacuuuuuuuucuuuuuuugaaauaaaauagccugucuuucagaucucaaaggcucuuuucagagccaccaaaaaaaaaaaaaaaaaaaaaaaaaaaaaaaaaaaaaaaaaaaaaaaaaaaaaaaaaaaaaaaaaaaaaaaaaaaaaaaaaaaaaaaaaaaaaaaaaaaaa

SEQ ID NO: 23748 - RNA, 1767 nt, Artificial Sequence
  mRNA product Design a-2 (hSL-A100) comprising derived and/or modified sequence from LASV(Z0947-SLE-2011;Clade IV)__AIT17840__GPCmut2 (opt5)
aggagaguccgcucagccagguugcagaagcggcuuagcguguguccuaaucuucucucugcguguagguaggccugugccgcaaacaagcuuaccaugggccagaucgugaccuucuuucaagaggucccccacguuauugaagaggugaugaacaucgugcugauugcccucagcauccuggcuguccuuaaggggcuguacaauuucgccacaugcggacucgugggccugguuacguuucuucugcucugugggagauccugcaccauuucucuguauaaaggaguguacgaacugcagacacucgagcugaacauggaaacccuuaauauguguaugccucugagcugcacaaagaacaauucccaucacuauaucauggucggcaacgagaccgggcucgagcugacacuuaccaauacgucuaucauuaaccauaaauucuguaaucugagcgacgcgcacaagaaaaaccucuacgaucaugcucugauguccaucauuucuaccuuucaccugagcaucccgaauuucaaccaguaugaagccauguccugcgacuuuaauggaggcaagauuagcgugcaguacaaccucucucacuccuaugccggcgaugcugccaaucauugugggacaguugcuaacggagugcugcaaaccuucaugcggauggccuggggcgggagcuacaucgcgcuugacucuggacgcgauagaugggacugcauuaugacauccuaccaguaucugaucauccagaacaccacgugggaggaucacugucaguuuagccggcccucuccuauuggcuaccucgggcugcuuucccaacgcacaagagacaucuauauuagccggcgcagacggggaaccuucacauggacccuguccgauucugaaggcaaggacacccccggcggguacugccucacacgcuggaugcugaucgaggccgagcugaaauguuuuggaaauacggcugucgccaagugcaacgaaaaacaugaugaggaguucugcgacaugcucagacuguuugauuucuguaagcaggcuauucagcggcuuaaagccccugcgcagaugagcauccaacugaucaauaaggccgugaacgcucucauuaaugaccagcugaucaugaagaaccaccuucgcgacauuaugggcauccccuauugcaauuacuccaaauauugguaccugaaccacaccacaaccgggaagacaagccucccuaaauguuggcuggugucuaauggauccuaccugaacgaaacccauuucagcgaugacauugaacagcaagccgauaauaugaucacggagaugcuccagaaggaguauauggaaagacagggcaaaacaccgcuggggcuugucgaccuguuuguuuucucuaccagcuuuuaccucaucuccauuuuccugcaccuggugaagauccccacccaucggcacauugugggaaaaccuugccccaagccucaucgccuuaaccacaugggcaucuguucuugcggccucuauaagcagcccggggucccggugaaauggaagagaugaggacuagucccuguucccagagcccacuuuuuuuucuuuuuuugaaauaaaauagccugucuuucagaucucaaaggcucuuuucagagccaccaaaaaaaaaaaaaaaaaaaaaaaaaaaaaaaaaaaaaaaaaaaaaaaaaaaaaaaaaaaaaaaaaaaaaaaaaaaaaaaaaaaaaaaaaaaaaaaaaaaaa

SEQ ID NO: 23749 - RNA, 1743 nt, Artificial Sequence
  mRNA product Design a-2 (A100) comprising derived and/or modified sequence from LASV(Josiah;Clade IV)__NP_694870__GPCmut2 (opt1)
aggagaguccgcucagccagguugcagaagcggcuuagcguguguccuaaucuucucucugcguguagguaggccugugccgcaaacaagcuuaccaugggccagaucgugaccuucuuccaggaggucccccacgugaucgaggaggugaugaacaucguccugaucgcccucagcgugcuggccgugcugaaggggcucuacaacuucgcgaccugcggccuggucgggcuggugacguuccuccugcugugcggccgcuccugcaccaccagccucuacaaggggguguacgagcugcagacccuggagcucaacauggagacgcugaacaugugcaugccgcuguccugcaccaagaacaacagccaccacuacaucauggucggcaacgagaccggccucgagcugacgcugaccaacaccuccaucaucaaccacaaguucugcaaccucagcgacgcccacaagaagaaccuguacgaccacgcccugauguccaucaucagcaccuuccaccucuccauccccaacuucaaccaguacgaggccaugagcugcgacuucaacgggggcaagaucuccgugcaguacaaccugagccacuccuacgccggggacgcggccaaccacugcggcacgguggccaacgggguccugcagaccuucaugcggauggccuggggcggcagcuacaucgcgcucgacuccgggcgcggcaacugggacugcaucaugaccagcuaccaguaccugaucauccagaacaccacgugggaggaccacugccaguucucccggcccagccccaucggguaccugggccuccugucccagcgcacccgggacaucuacaucagccgccggcgccggggcaccuucaccuggacgcugagcgacuccgaggggaaggacaccccgggcggguacugccugacccgcuggaugcucaucgaggccgagcugaagugcuucggcaacaccgccguggccaagugcaacgagaagcacgacgaggaguucugcgacaugcugcggcuguucgacuucugcaagcaggccauccagcgccugaaggcgcccgcccagaugagcauccagcugaucaacaaggccgugaacgcccucaucaacgaccagcugaucaugaagaaccaccuccgggacaucauggggauccccuacugcaacuacuccaaguacugguaccucaaccacacgaccaccggccgcaccagccugcccaagugcuggcuggucuccaacggcagcuaccucaacgagacgcacuucuccgacgacaucgagcagcaggccgacaacaugaucaccgagaugcugcagaaggaguacauggagcggcaggggaagacgccccugggccucguggaccuguucguguucagcaccuccuucuaccugaucagcaucuuccugcaccucgucaagaucccgacccaccgccacaucguggggaaguccugccccaagccccaccggcugaaccacaugggcaucugcagcugcgggcuguacaagcagcccggcgugccggucaaguggaagcgcugaggacuagucccuguucccagagcccacuuuuuuuucuuuuuuugaaauaaaauagccugucuuucagaucuaaaaaaaaaaaaaaaaaaaaaaaaaaaaaaaaaaaaaaaaaaaaaaaaaaaaaaaaaaaaaaaaaaaaaaaaaaaaaaaaaaaaaaaaaaaaaaaaaaaa

SEQ ID NO: 23750 - RNA, 1740 nt, Artificial Sequence
  mRNA product Design a-2 (A100) comprising derived and/or modified sequence from LASV(LP;Clade I)__AAF86701__GPCmut2 (opt1)
aggagaguccgcucagccagguugcagaagcggcuuagcguguguccuaaucuucucucugcguguagguaggccugugccgcaaacaagcuuaccaugggccagaucaucaccuucuuccaggaggugccccacgucaucgaggaggugaugaacaucgugcugaucgcccucagccugcuggccauccucaaggggcuguacaacaucgcgaccugcggcaucaucgggcuggucgccuuccucuuccugugcggcaaguccugcagccugacgcucaagggcggguacgagcugcagacccuggagcucaacauggagacccugaacaugugcaugccgcuguccugcacgaagaacagcucccaccacuacauccgcgugggcaacgagaccgggcucgagcugacccugaccaacacgagcaucaucaaccacaaguucugcaaccucuccgacgcccacaagaagaaccuguacgaccacgcccugaugagcaucaucuccaccuuccaccucagcauccccaacuucaaccaguacgaggccauguccugcgacuucaacggcgggaagaucagcgugcaguacaaccugucccacagcuacgcgggcgacgccgccgagcacugcgggaccgucgccaacggcgugcugcagaccuucaugcggauggcguggggcgggcgcuacaucgcccucgacuccggcaaggggaacugggacugcaucaugacgagcuaccaguaccugaucauccagaacaccaccugggaggaccacugccaguucucccggcccagccccaucggcuaccugggccuccugucccagcgcacccgggacaucuacaucagccgccggcgccgggggacguucaccuggacccugagcgacuccgagggcaacgagacccccgggggcuacugccugacgcgcuggaugcucaucgaggccgagcugaagugcuucgggaacaccgccguggccaagugcaacgagaagcacgacgaggaguucugcgacaugcugcggcuguucgacuucugcaagcaggcgauccgccggcugaaggcccccgcccagaugagcauccagcugaucaacaaggccgucaacgcccucaucaacgaccagcugaucaugaagaaccaccuccgcgacaucaugggcauccccuacugcaacuacuccaaguacugguaccucaaccacaccagcuccggccggaccagccugcccaagugcuggcugaucuccaacgggagcuaccucaacgagacgcaguucuccgacgacaucgagcagcaggcggacaacaugaucaccgagaugcugcagaaggaguacaucgagcgccagggcaagaccccgcuggggcucguggacaucuucaucuucagcaccuccuucuaccugaucagcaucuuccugcaccugaucaagaucccgacgcaccggcacaucgugggcaagcccugccccaagccccaccgccucaaccacaugggggucugcuccugcggccuguacaagcacccgggcgugcccaccaaguggaagcggugaggacuagucccuguucccagagcccacuuuuuuuucuuuuuuugaaauaaaauagccugucuuucagaucuaaaaaaaaaaaaaaaaaaaaaaaaaaaaaaaaaaaaaaaaaaaaaaaaaaaaaaaaaaaaaaaaaaaaaaaaaaaaaaaaaaaaaaaaaaaaaaaaaaaa

SEQ ID NO: 23751 - RNA, 1740 nt, Artificial Sequence
  mRNA product Design a-2 (A100) comprising derived and/or modified sequence from LASV(803213;Clade II)__AAF86703__GPCmut2 (opt1)
aggagaguccgcucagccagguugcagaagcggcuuagcguguguccuaaucuucucucugcguguagguaggccugugccgcaaacaagcuuaccaugggccagaucaucaccuucuuccaggaggugccccacgucaucgaggaggugaugaacaucgugcugaucgcccucagccugcuggccauccucaaggggaucuacaacgucgcgaccugcggccuguucgggcugaucuccuuccuccugcugugcggccgcagcugcuccgugacguacaaggggguguacgagcuccagacccuggagcugaacauggccaaccucaacaugugcaugccgcugagcugcaccaagaacaacucccaccacuacaucauggucggcaacgagacgggccuggagcucacccugaccaacaccagcaucaucaaccacaaguucugcaaccuguccgacgcccacaagaagaaccucuacgaccacgcccugaugagcaucaucuccacguuccaccugagcauccccaacuucaaccaguacgaggccauguccugcgacuucaacgggggcaagaucagcgugcaguacaaccucucccacagcuucgcgguggacgccgccaaccacugcgggaccaucgccaacggcguccugcagaccuucaugcggauggcguggggcggguccuacaucgcccuggacagcggcaaggggaacugggacugcaucaugaccuccuaccaguaccucaucauccagaacacgaccugggaggaccacugccaguucagccgccccucccccaucggcuaccuggggcugcucagccagcggacccgcgacaucuacaucagccggcgccgccggggcaccuucacguggacccucuccgacagcgagggcaacgaggcccccgggggcuacugccugacccgguggaugcugaucgaggccgagcucaagugcuucgggaacaccgccguggcgaagugcaacgagaagcacgacgaggaguucugcgacaugcugcgccuguucgacuucugcaagcaggccaucaagcggcucaagacgcccgcccagauguccauccagcugaucaacaaggccgugaacgcccugaucaacgaccagcucaucaugaagaaccaccuccgcgacaucaugggcauccccuacugcaacuacagccgguacugguaccugaaccacaccgucaccgggaagaccucccugccccgcugcuggcuggugagcaacggcuccuaccugaacgagacgcacuucagcgacgacaucgagcagcaggcggacaacaugaucaccgagaugcuccagaaggaguacauggaccggcagggcaagaccccgcuggggcugguggaccucuucgucuucuccaccagcuucuaccugaucuccaucuuccugcaccuggugaagaucccgacgcaccgccacaucgugggcaagcccugccccaagccccaccggcucaaccacauggggaucugcagcugcggccuguacaagcacccggggguccccgugaaguggaagcgcugaggacuagucccuguucccagagcccacuuuuuuuucuuuuuuugaaauaaaauagccugucuuucagaucuaaaaaaaaaaaaaaaaaaaaaaaaaaaaaaaaaaaaaaaaaaaaaaaaaaaaaaaaaaaaaaaaaaaaaaaaaaaaaaaaaaaaaaaaaaaaaaaaaaaa

SEQ ID NO: 23752 - RNA, 1740 nt, Artificial Sequence
  mRNA product Design a-2 (A100) comprising derived and/or modified sequence from LASV(GA391;Clade III)__CAA36645__GPCmut2 (opt1)
aggagaguccgcucagccagguugcagaagcggcuuagcguguguccuaaucuucucucugcguguagguaggccugugccgcaaacaagcuuaccaugggccagaucgugaccuucuuccaggaggucccccacgugaucgaggaggugaugaacaucguccugaucgcccucagcauccuggccauccugaaggggcucuacaacguggcgaccugcggccugaucgggcuggugacguuccuccugcuguccggccgcagcugcucccucaucuacaaggggaccuacgagcugcagacccuggagcucaacauggagacccugaacaugugcaugccgcugagcugcaccaagaacaacucccaccacuacauccgggucggcaacgagaccggccucgagcugacccugacgaacaccagcauccucaaccacaaguucugcaaccuguccgacgcccacaagcgcaaccuguacgaccacagccucauguccaucaucagcaccuuccaccuguccauccccaacuucaaccaguacgaggccaugagcugcgacuucaacgggggcaagaucaccgugcaguacaaccugucccacagcuucgccguggacgccgcggggcacugcggcacgcucgccaacgggguccugcagaccuucaugcggauggccuggggcggcuccuacaucgcccuggacagcgggcgcggcaacugggacugcaucaugaccuccuaccaguaccucaucauccagaacaccacgugggacgaccacugccaguucagccggcccucccccaucggguaccugggccugcucagccagcgcacccgggacaucuacaucagccgccggcgccggggcaccuucaccuggacgcucuccgacagcgaggggaacgagaccccgggcggguacugccugacccgcuggaugcugaucgaggcggagcucaagugcuucggcaacaccgccguggccaagugcaacgagaagcacgacgaggaguucugcgacaugcugcggcuguucgacuucugcaagcaggccauccgccggcucaagacgcccgcccagauguccauccagcugaucaacaaggcggugaacgcccugaucaacgaccagcucaucaugaagaaccaccuccgcgacaucauggggauccccuacugcaacuacagccgguacugguaccugaaccacaccuccaccggcaagaccagccugccccgcugcuggcugaucuccaacggcagcuaccugaacgagacgaaguucuccgacgacaucgagcagcaggccgacaacaugaucaccgagaugcuccagaaggaguacaucgaccggcaggggaagacgccccugggccuggucgaccuguucguguucagcaccuccuucuaccucaucagcaucuuccugcaccuggugaagaucccgacccaccgccacaucgucgggaagcccugccccaagccccaccggcucaaccacaugggcaucugcuccugcgggcuguacaagcagccgggcgugcccgugcgcuggaagcggugaggacuagucccuguucccagagcccacuuuuuuuucuuuuuuugaaauaaaauagccugucuuucagaucuaaaaaaaaaaaaaaaaaaaaaaaaaaaaaaaaaaaaaaaaaaaaaaaaaaaaaaaaaaaaaaaaaaaaaaaaaaaaaaaaaaaaaaaaaaaaaaaaaaaa

SEQ ID NO: 23753 - RNA, 1743 nt, Artificial Sequence
  mRNA product Design a-2 (A100) comprising derived and/or modified sequence from LASV(AV;Clade V)__CCA30314__GPCmut2 (opt1)
aggagaguccgcucagccagguugcagaagcggcuuagcguguguccuaaucuucucucugcguguagguaggccugugccgcaaacaagcuuaccaugggccagaucgugaccuucuuccaggaggucccccacgugaucgaggaggugaugaacaucguccugaucgcccucagcauccuggccgugcugaaggggcucuacaacaucgcgaccugcggccugaucgggcugaucacguuccuccugcugugcggccgcuccugcagcuccaaccucuacaaggggguguacgagcugcagagccuggaccucaacauggagacccugaacaugugcaugccgcuguccugcaccaagaacaacagccaccacuacauccgggucggcaacgacacgggccucgagcugacccugaccaacaccuccauccucaaccacaaguucugcaaccugagcgacgcccacaagaaggaccuguacgaccacgcccucauguccaucaucagcacguuccaccuguccauccccaacuucaaccaguacgaggccaugagcugcgacuucaacgggggcaagaucuccgugcaguacaaccugagccacuccuacgccaucgacgcggccaaccacugcgggaccguggccaacggcauccuccagaccuucaugcgcauggccuggggcgggagcuacaucgcgcuggacuccggccgggggaacugggacugcaucaugaccagcuaccaguaccugaucauccagaacacgaccugggagaaccacugccaguucucccgccccagccccaucggcuaccucgggcugcugagccagcggacccgcgacaucuacaucucccggcgccgccggggcaccuucacguggacccugagcgacuccgagggcaacgccacccccgggggcuacugccucacccgguggaugcugaucgaggccgagcugaagugcuucgggaacacggccgucgccaagugcaacgagaagcacgacgaggaguucugcgacaugcuccgccuguucgacuucugcaagcaggcgaucagccggcugaagucccccgcccagaugagcauccagcucaucaacaaggccgugaacgcccugaucaacgaccagcugaucaugaagaaccaccuccgcgacaucaugggcauccccuacugcaacuacuccaaguacugguaccugaaccacaccaucaccgggaagaccagccugcccaagugcuggcucguguccaacggcagcuaccugaacgagacgcacuucuccgacgacaucgagcagcaggccgacaacaugaucaccgagaugcugcagaaggaguacauggagcggcagggcaagaccccgcucgggcuggucgaccuguucguguucagcaccuccuucuaccugaucagcaucuuccuccgccuggugaagaucccgacgcaccggcacaucgucggcaagcccugccccaagccccaccgccugaaccacauggggaucugcuccugcggccucuacaagcagccgggggugcccgugcgguggaagcgcugaggacuagucccuguucccagagcccacuuuuuuuucuuuuuuugaaauaaaauagccugucuuucagaucuaaaaaaaaaaaaaaaaaaaaaaaaaaaaaaaaaaaaaaaaaaaaaaaaaaaaaaaaaaaaaaaaaaaaaaaaaaaaaaaaaaaaaaaaaaaaaaaaaaaa

SEQ ID NO: 23754 - RNA, 1740 nt, Artificial Sequence
  mRNA product Design a-2 (A100) comprising derived and/or modified sequence from LASV(Togo/2016/7082;Clade VI)__AMR44577__GPCmut2 (opt1)
aggagaguccgcucagccagguugcagaagcggcuuagcguguguccuaaucuucucucugcguguagguaggccugugccgcaaacaagcuuaccaugggccagaucaucaccuucuuccaggaggugccccacgucaucgaggaggugaugaacaucgugcugaucgcccucagccugcuggccauccucaagggggucuacaacguggcgaccugcggcaucaucgggcuggugacguuccuguuccucugcggccgcuccugcagccugaucuacaagggguccuacgagcugcagacccucgagcugaacauggagacccugaacaugugcaugccgcucagcugcacgaagaacuccagccaccacuacauccgggucggcaacgagaccggccuggagcugacccucaccaacacguccaucaucaaccacaaguucugcaaccugagcgacgcccacaagcgcaaccuguacgaccacgcccucauguccauccugagcaccuuccaccuguccauccccaacuucaaccaguacgaggccaugagcugcgacuucaacgggggcaagaucuccgugcaguacaaccucagccacgccuacgcgguggacgccgccgagcacugcgggaccgucgccaacggcgugcugcagaccuucaugcggauggcguggggcggguccuacaucgcccuggacagcggccgcgggaacugggacugcaucaugacguccuaccaguaccucaucauccagaacaccaccugggaggaccacugccaguucagccggcccucccccaucggcuaccuggggcugcucagccagcgcacccgggacaucuacaucagccgccggcgccggggcacguucaccuggacccucuccgacagcgagggcaacgagacccccgggggcuacugccugacgcgcuggaugcugaucgaggccgagcucaagugcuucgggaacaccgccguggccaagugcaacgagaagcacgacgaggaguucugcgacaugcugcggcuguucgacuucugcaagcaggcgauccagcgccucaagucccccgcccagaugagcauccagcugaucaacaaggccgucaacgcccugaucaacgaccagcucaucaugaagaaccaccuccgggacaugaugggcauccccuacugcaacuacuccaaguacugguaccugaaccacaccagcuccgggcgcaccagccugcccaagugcuggcugguguccaacggcagcuaccugaacgagacgcacuucuccgacgacaucgagcagcaggccgacaacaugaucaccgagaugcuccagaaggaguacaucgaccggcagggcaagaccccgcuggggcugguggaccucuucgucuucagcaccuccuucuaccugaucagcaucuuccugcaccugaucaagaucccgacgcaccgccacaucgugggcaagcccugccccaagccccaccggcucaaccacauggggaucugcuccugcggccuguacaagcagccgggggugcccacccgcuggaagcggugaggacuagucccuguucccagagcccacuuuuuuuucuuuuuuugaaauaaaauagccugucuuucagaucuaaaaaaaaaaaaaaaaaaaaaaaaaaaaaaaaaaaaaaaaaaaaaaaaaaaaaaaaaaaaaaaaaaaaaaaaaaaaaaaaaaaaaaaaaaaaaaaaaaaa

SEQ ID NO: 23755 - RNA, 1740 nt, Artificial Sequence
  mRNA product Design a-2 (A100) comprising derived and/or modified sequence from LASV(KAK-428;Clade n.d. (VII))__ANH09740__GPCmut2 (opt1)
aggagaguccgcucagccagguugcagaagcggcuuagcguguguccuaaucuucucucugcguguagguaggccugugccgcaaacaagcuuaccaugggccagaucgugaccuucuuccaggaggucccccacgugaucgaggaggugaugaacaucguccugaucgcccucagccugcuggccauccucaaggggcuguacaacuucgcgaccugcggcgugaucgggcugaucacguuccuccugcugugcggccgcuccugcagcgccaccuacaaggggcaguacgagcuccagacccuggagcugaacauggagucccucaacaugugcaugccgcugagcugcacgaagaacaacucccaccacuacauccgggccggcaacaacaccggccuggagcucacccugaccaacacgagcaucaucucccacaaguucugcaaccugagcgacgcccacaagaagaaccucuacgaccacacccugauguccaucaucaccaccuuccaccugagcauccccaacuucaaccaguacgaggccauguccugcgacuucaacgggggcaagaucagcauccaguacaaccucucccacagcuacgcgggggacgccgcccagcacugcggcacgguggccaacgggguccugcagaccuucaugcgcauggcguggggcggcuccuaccuggcccucgacagcgggcggcgcggcugggacugcaucaucuccagcuaccaguaccugaucauccagaacaccaccugggacgaccacugccaguucucccggcccagccccaucggguaccugggcuucgugagccagaagacgcgcgacaucuacaucucccggcgccgccggggcaccuucaccuggacccugagcgacuccgaggggcacgacaugccgggcggguacugccucacgcgguggaugcugaucgaggccgaccugaagugcuucggcaacaccgccguggccaagugcaacgagaagcacgacgaggaguucugcgacauguggcgccucuucgacuucugcaagcaggcgauccagcggcugaaggcccccgcccagaugaacauccagcugaucaacaaggccgucaacgcccucaucaacgaccagcugaugaugaagaaccaccuccgcgacaucauggggauccccuacugcaacuacagcaaguucugguaccugaacaacaccaccacgggccggaccucccugccccgcugcuggcugaucagcaacggcuccuaccucaacgagacccacuucagcgacgacaucgagcagcaggcggacaacaugaucaccgagaugcugcagaaggaguacauggaccggcaggggaagacgccccugggccucguggaccuguucguguucuccaccagcuucuaccugaucaccaucuuccuccaccuggucaagaucccgacccaccgccacaucguggggaagcccugccccaagccccaccggcugaaccacaugggcaucugcuccugcgggcuguacaagcagccgggcgugcccguccgcuggaagcggugaggacuagucccuguucccagagcccacuuuuuuuucuuuuuuugaaauaaaauagccugucuuucagaucuaaaaaaaaaaaaaaaaaaaaaaaaaaaaaaaaaaaaaaaaaaaaaaaaaaaaaaaaaaaaaaaaaaaaaaaaaaaaaaaaaaaaaaaaaaaaaaaaaaaa

SEQ ID NO: 23756 - RNA, 1740 nt, Artificial Sequence; identical to SEQ ID NO: 23750
  mRNA product Design a-2 (A100) comprising derived and/or modified sequence from LASV(Pinneo-NIG-1969;Clade I)__AIT17836__GPCmut2 (opt1)

SEQ ID NO: 23757 - RNA, 1740 nt, Artificial Sequence
  mRNA product Design a-2 (A100) comprising derived and/or modified sequence from LASV(ISTH0009-NIG-2011;Clade II)__AIT17404__GPCmut2 (opt1)
aggagaguccgcucagccagguugcagaagcggcuuagcguguguccuaaucuucucucugcguguagguaggccugugccgcaaacaagcuuaccaugggccagaucaucaccuucuuccaggaggugccccacgucaucgaggaggugaugaacaucgugcugaucgcccucagccugcuggccauccucaaggggaucuacaacgucgcgaccugcggccuguucgggcugguguccuuccuccugcugugcggccgcagcugcuccacgaccuacaaggggguguacgagcuccagacccuggagcuggacauggccagccucaacaugugcaugccgcuguccugcacgaagaacaacagccaccacuacaucauggucggcaacgagaccggccuggagcucacccugaccaacacguccaucaucaaccacaaguucugcaaccugagcgacgcccacaagaagaaccucuacgaccacgcccugauguccaucaucagcaccuuccaccuguccauccccaacuucaaccaguacgaggccaugagcugcgacuucaacgggggcaagaucuccgugcaguacaaccucagccacgcguacgccguggacgccgccaaccacugcgggaccaucgcgaacggcguccugcagaccuucaugcggauggccuggggcggguccuacaucgcccuggacagcggcaagggguccugggacugcaucaugacgagcuaccaguaccucaucauccagaacaccaccugggaggaccacugccaguucucccgccccagccccaucggcuaccuggggcugcucagccagcggacccgcgacaucuacaucucccggcgccgccggggcacguucaccuggacccucagcgacuccgagggcaacgagacccccgggggcuacugccugacgcgguggaugcugaucgaggccgagcucaagugcuucgggaacaccgccguggcgaagugcaacgagaagcacgacgaggaguucugcgacaugcugcgccuguucgacuucugcaagcaggccauccggcgccucaagacccccgcccagaugagcauccagcugaucaacaaggccgugaacgcccugaucaacgaccagcucaucaugaagaaccaccuccgggacaucaugggcaucccguacugcaacuacuccaaguacugguaccugaaccacaccgucacggggaagaccagccugccccgcugcuggcugguguccaacggcagcuaccugaacgagacccacuucuccgacgacaucgagcagcaggcggacaacaugaucaccgagcuccugcagaaggaguacauggaccggcagggcaagacgccccuggggcucguggaccuguucgucuucagcaccuccuucuaccugaucagcaucuuccugcaccucaucaagaucccgacccaccgccacaucaccggcaagcccugccccaagccccaccggcugaaccacauggggaucugcuccugcggccuguacaagcacccgggggugcccgugaaguggaagcgcugaggacuagucccuguucccagagcccacuuuuuuuucuuuuuuugaaauaaaauagccugucuuucagaucuaaaaaaaaaaaaaaaaaaaaaaaaaaaaaaaaaaaaaaaaaaaaaaaaaaaaaaaaaaaaaaaaaaaaaaaaaaaaaaaaaaaaaaaaaaaaaaaaaaaa

SEQ ID NO: 23758 - RNA, 1740 nt, Artificial Sequence
  mRNA product Design a-2 (A100) comprising derived and/or modified sequence from LASV(ISTH2010-NIG-2012;Clade II)__AIT17482__GPCmut2 (opt1)
aggagaguccgcucagccagguugcagaagcggcuuagcguguguccuaaucuucucucugcguguagguaggccugugccgcaaacaagcuuaccaugggccagaucaucaccuucuuccaggaggugccccacgucaucgaggaggugaugaacaucgugcugaucgcccucagccugcuggccauccucaaggggaucuacaacgucgcgaccugcggccuguucgggcugguguccuuccuccugcugugcggccgcagcugcuccacgaccuacaaggggguguacgagcuccagacccuggagcuggacauggccagccucaacaugugcaugccgcuguccugcacgaagaacaacagccaccacuacaucauggucggcaacgagaccggccuggagcucacccugaccaacacguccaucaucaaccacaaguucugcaaccugagcgacgcccacaagaagaaccucuacgaccacgcccugauguccaucaucagcaccuuccaccuguccauccccaacuucaaccaguacgaggccaugagcugcgacuucaacgggggcaagaucuccgugcaguacaaccucagccacgcguacgccguggacgccgccaaccacugcgggaccaucgcgaacggcguccugcagaccuucaugcggauggccuggggcggguccuacaucgcccuggacagcggcaagggguccugggacugcaucaugacgagcuaccaguaccucaucauccagaacaucaccugggaggaccacugccaguucucccgccccagccccaucggcuaccuggggcugcucagccagcggacccgcgacaucuacaucucccggcgccgccggggcaccuucacguggacccucagcgacuccgagggcaacgagacccccgggggcuacugccugacccgguggaugcugaucgaggccgagcucaagugcuucgggaacacggccguggcgaagugcaacgagaagcacgacgaggaguucugcgacaugcugcgccuguucgacuucugcaagcaggccauccggcgccucaagacccccgcccagaugagcauccagcugaucaacaaggccgugaacgcccugaucaacgaccagcucaucaugaagaaccaccuccgggacaucaugggcauccccuacugcaacuacuccaaguacugguaccugaaccacaccgucaccgggaagacgagccugccccgcugcuggcugguguccaacggcagcuaccugaacgagacccacuucuccgacgacaucgagcagcaggcggacaacaugaucaccgagcuccugcagaaggaguacaucgaccggcagggcaagaccccgcuggggcucguggaccuguucgucuucagcacguccuucuaccugaucagcaucuuccugcaccucgugaagaucccgacccaccgccacguggucggcaagcccugccccaagccccaccggcugaaccacauggggaucugcuccugcggccuguacaagcacccgggggugcccgugaaguggaagcgcugaggacuagucccuguucccagagcccacuuuuuuuucuuuuuuugaaauaaaauagccugucuuucagaucuaaaaaaaaaaaaaaaaaaaaaaaaaaaaaaaaaaaaaaaaaaaaaaaaaaaaaaaaaaaaaaaaaaaaaaaaaaaaaaaaaaaaaaaaaaaaaaaaaaaa

SEQ ID NO: 23759 - RNA, 1740 nt, Artificial Sequence
  mRNA product Design a-2 (A100) comprising derived and/or modified sequence from LASV(Lassa virus/H.sapiens-wt/NGA/2015/ISTH_0543;Clade II)__AVO03639__GPCmut2 (opt1)
aggagaguccgcucagccagguugcagaagcggcuuagcguguguccuaaucuucucucugcguguagguaggccugugccgcaaacaagcuuaccaugggccagaucaucaccuucuuccaggaggugccccacgucaucgaggaggugaugaacaucgugcugaucgcccucagccugcuggccauccucaaggggaucuacaacgucgcgaccugcggccuguucgggcugguguccuuccuccugcugugcggccgcagcugcuccacgaccuacaaggggguguacgagcuccagacccuggagcuggacauggccaaccucaacaugugcaugccgcugagcugcacgaagaacaacucccaccacuacaucauggucggcaacgagaccggccuggagcucacccugaccaacacgagcaucaucaaccacaaguucugcaaccuguccgacgcccacaagaagaaccucuacgaccacgcccugaugagcaucaucuccaccuuccaccugagcauccccaacuucaaccaguacgaggccauguccugcgacuucaacgggggcaagaucagcgugcaguacaaccucucccacaccuacgcgguggacgccgccaaccacugcgggaccaucgccaacggcguccugcagacguucaugcggauggcguggggcgggagcuacaucgcccuggacuccggcaaggggagcugggacugcaucaugaccuccuaccaguaccucgugauccagaacaccaccugggaggaccacugccaguucagccgccccucccccaucggcuaccuggggcugcucagccagcggacgcgcgacaucuacaucagccggcgccgccggggcaccuucaccuggacccucuccgacagcgagggcaacgagacgcccgggggcuacugccugacccgguggaugcugaucgaggccgagcucaagugcuucgggaacaccgccguggccaagugcaacgagaagcacgacgaggaguucugcgacaugcugcgccuguucgacuucugcaagcaggcgauccggcgccucaagacccccgcccagauguccauccagcugaucaacaaggccgucaacgcccugaucaacgaccagcucaucaugaagaaccaccuccgggacaucaugggcauccccuacugcaacuacagcaaguacugguaccugaaccacacggugaccgggaagaccucccugccccgcugcuggcuggugagcaacggcuccuaccugaacgagacccacuucagcgacgacaucgagcagcaggccgacaacaugaucacggagcuccugcagaaggaguacaucgaccggcagggcaagaccccgcuggggcucgucgaccuguucguguucuccaccagcuucuaccugaucuccaucuuccugcaccucgugaagaucccgacccaccgccacaucacgggcaagcccugccccaagccccaccggcugaaccacauggggaucugcagcugcggccuguacaagcacccggggguccccgugaaguggaagcgcugaggacuagucccuguucccagagcccacuuuuuuuucuuuuuuugaaauaaaauagccugucuuucagaucuaaaaaaaaaaaaaaaaaaaaaaaaaaaaaaaaaaaaaaaaaaaaaaaaaaaaaaaaaaaaaaaaaaaaaaaaaaaaaaaaaaaaaaaaaaaaaaaaaaaa

SEQ ID NO: 23760 - RNA, 1740 nt, Artificial Sequence
  mRNA product Design a-2 (A100) comprising derived and/or modified sequence from LASV(Lassa virus/H.sapiens-wt/NGA/2016/ISTH_0009;Clade II)__AVO03571__GPCmut2 (opt1)
aggagaguccgcucagccagguugcagaagcggcuuagcguguguccuaaucuucucucugcguguagguaggccugugccgcaaacaagcuuaccaugggccagaucaucaccuucuuccaggaggugccccacgucaucgaggaggugaugaacaucgugcugaucgcccucagccugcuggccauccucaaggggaucuacaacgucgcgaccugcggccugcuggggcucguguccuuccugcugcucugcggccgcagcugcuccacgaccuacaaggggguguacgagcugcagacccuggagcucgacauggccagccugaacaugugcaugccgcuguccugcacgaagaacaacagccaccacuacaucauggucggcaacgagaccggccucgagcugacccugaccaacacguccaucaucaaccacaaguucugcaaccucagcgacgcccacaagaagaaccuguacgaccacgcccugauguccaucaucagcaccuuccaccucuccauccccaacuucaaccaguacgaggccaugagcugcgacuucaacgggggccggaucuccgugcaguacaaccugagccacuccuacgcgguggacgccgccaaccacugcgggaccaucgccaacggcguccugcagaccuucaugcgcauggcguggggcgggagcuacaucgcccucgacuccggcaaggggagcugggacugcaucaugacguccuaccaguaccugaucauccagaacaccaccugggaggaccacugccaguucagccggcccagccccaucggcuaccuggggcuccugucccagcgcacccgggacaucuacaucagccgccggcgccggggcacguucaccuggacccuguccgacagcgagggcaacgagacccccgggggcuacugccugacgcgcuggaugcucaucgaggccgagcugaagugcuucgggaacaccgccguggccaagugcaacgagaagcacgacgaggaguucugcgacaugcugcggcuguucgacuucugcaagcaggcgauccgccggcugaagacccccgcccagauguccauccagcugaucaacaaggccgugaacgcccucaucaacgaccagcugaucaugaagaaccaccuccgcgacaucaugggcaucccguacugcaacuacagcaaguacugguaccucaaccacaccgucacggggaagaccucccugccccggugcuggcuggugagcaacggcuccuaccucaacgagacccacuucagcgacgacaucgagcagcaggccgacaacaugaucaccgagcugcugcagaaggaguacaucgaccgccagggcaagacgccccucgggcugguggaccuguucgucuucuccaccagcuucuaccugaucuccaucuuccuccaccuggugaagaucccgacccaccggcacaucaccggcaagcccugccccaagccccaccgccugaaccacauggggaucugcagcugcggccucuacaaccacccgggggugcccgucaaguggaagcggugaggacuagucccuguucccagagcccacuuuuuuuucuuuuuuugaaauaaaauagccugucuuucagaucuaaaaaaaaaaaaaaaaaaaaaaaaaaaaaaaaaaaaaaaaaaaaaaaaaaaaaaaaaaaaaaaaaaaaaaaaaaaaaaaaaaaaaaaaaaaaaaaaaaaa

SEQ ID NO: 23761 - RNA, 1740 nt, Artificial Sequence
  mRNA product Design a-2 (A100) comprising derived and/or modified sequence from LASV(Lassa virus/H.sapiens-wt/NGA/2016/ISTH_0017;Clade II)__AVO03567__GPCmut2 (opt1)
aggagaguccgcucagccagguugcagaagcggcuuagcguguguccuaaucuucucucugcguguagguaggccugugccgcaaacaagcuuaccaugggccagaucaucaccuucuuccaggaggugccccacgucaucgaggaggugaugaacaucgugcugaucgcccucagccugcuggccauccucaaggggaucuacaacgucgcgaccugcggccuguucgggcugguguccuuccuccugcugugcggccgcagcugcuccacgaccuacaaggggguguacgagcuccagacccuggagcuggacauggccagccucaacaugugcaugccgcuguccugcacgaagaacaacagccaccacuacaucauggucggcaacgagaccggccuggagcucacccugaccaacacguccaucaucaaccacaaguucugcaaccugagcgacgcccacaagaagaaccucuacgaccacgcccugauguccaucaucagcaccuuccaccuguccauccccaacuucaaccaguacgaggccaugagcugcgacuucaacgggggcaagaucuccgugcaguacaaccucagccacaccuacgcgaucgacgccgccaaccacugcgggaccaucgccaacggcgugcugcagacguucaugcggauggcguggggcggguccuacaucgcccuggacagcggcaagggguccugggacugcaucaugaccagcuaccaguaccucaucauccagaacaccaccugggaggaccacugccaguucucccgccccagccccaucggcuaccuggggcugcucagccagcggacgcgcgacaucuacaucucccggcgccgccggggcaccuucaccuggacccucagcgacuccgagggcaacgagacgcccgggggcuacugccugacccgguggaugcugaucgaggccgagcucaagugcuucgggaacaccgccgucgccaagugcaacgagaagcacgacgaggaguucugcgacaugcugcgccuguucgacuucugcaagcaggcgauccggcgccucaagacccccgcccagaugagcauccagcugaucaacaaggccgugaacgcccugaucaacgaccagcucaucaugaagaaccaccuccgggacaucaugggcauccccuacugcaacuacuccaaguacugguaccugaaccacacggugaccgggaagaccagccugccccgcugcuggcuggucuccaacggcagcuaccugaacgagacccacuucuccgacgacaucgagcagcaggccgacaacaugaucacggagcuccugcagaaggaguacauggaccggcagggcaagaccccgcuggggcucguggaccuguucguguucagcaccuccuucuaccugaucagcaucuuccugcaccucguccgcaucccgacccaccggcacgugaucggcaagcccugccccaagccccaccgccugaaccacauggggaucugcuccugcggccuguacaagcacccgggggugcccgucaaguggaagcggugaggacuagucccuguucccagagcccacuuuuuuuucuuuuuuugaaauaaaauagccugucuuucagaucuaaaaaaaaaaaaaaaaaaaaaaaaaaaaaaaaaaaaaaaaaaaaaaaaaaaaaaaaaaaaaaaaaaaaaaaaaaaaaaaaaaaaaaaaaaaaaaaaaaaa

SEQ ID NO: 23762 - RNA, 1740 nt, Artificial Sequence
  mRNA product Design a-2 (A100) comprising derived and/or modified sequence from LASV(Lassa virus/H.sapiens-wt/NGA/2018/ISTH_0959;Clade II)__AVV65099__GPCmut2 (opt1)
aggagaguccgcucagccagguugcagaagcggcuuagcguguguccuaaucuucucucugcguguagguaggccugugccgcaaacaagcuuaccaugggccagaucaucaccuucuuccaggaggugccccacgucaucgaggaggugaugaacaucgugcugaucgcccucagccugcuggccauccucaaggggaucuacaacgucgugaccugcggccuguucgggcugguguccuuccuccugcugugcggccgcagcugcuccacgaccuacaagggggucuacgagcuccagacccuggagcuggacauggcgagccucaacaugugcaugccgcuguccugcacgaagaacaacagccaccacuacaucauggugggcaacgagaccggccuggagcucacccugaccaacacguccaucaucaaccacaaguucugcaaccugagcgacgcccacaagaagaaccucuacgaccacgcccugauguccaucaucagcaccuuccaccuguccauccccaacuucaaccaguacgaggccaugagcugcgacuucaacgggggcaagaucuccgugcaguacaaccucagccacgccuacgcgaucgacgccgccaaccacugcgggaccaucgccaacggcguccugcagaccuucaugcggauggcguggggcggguccuacaucgcccuggacagcggcaagggguccugggacugcaucaugacgagcuaccaguaccucaucauccagaacaccaccugggaggaccacugccaguucucccgccccagccccaucggcuaccuggggcugcucagccagcggacccgcgacaucuacaucucccggcgccgccggggcacguucaccuggacccucagcgacuccgagggcaacgagacccccgggggcuacugccugacgcgguggaugcugaucgaggccgagcucaagugcuucgggaacaccgccguggccaagugcaacgagaagcacgacgaggaguucugcgacaugcugcgccuguucgacuucugcaagcaggcgauccggcgccucaagacccccgcccagaugagcauccagcugaucaacaaggccgugaacgcccugaucaacgaccagcucaucaugaagaaccaccuccgggacaucaugggcaucccguacugcaacuacuccaaguacugguaccugaaccacaccgucacggggaagaccagccugccccgcugcuggcugguguccaacggcagcuaccugaacgagacccacuucuccgacgacaucgagcagcaggccgacaacaugaucaccgagcuccugcagaaggaguacaucgaccggcagggcaagacgccccuggggcucguggaccuguucgucuucagcaccuccuucuaccugaucagcaucuuccugcaccucgugaagaucccgacccaccgccacgugaucggcaagcccugccccaagccccaccggcugaaccacauggggaucugcuccugcggccuguacaagcacccggggguccccgugaaguggaagcgcugaggacuagucccuguucccagagcccacuuuuuuuucuuuuuuugaaauaaaauagccugucuuucagaucuaaaaaaaaaaaaaaaaaaaaaaaaaaaaaaaaaaaaaaaaaaaaaaaaaaaaaaaaaaaaaaaaaaaaaaaaaaaaaaaaaaaaaaaaaaaaaaaaaaaa

SEQ ID NO: 23763 - RNA, 1740 nt, Artificial Sequence
  mRNA product Design a-2 (A100) comprising derived and/or modified sequence from LASV(LASV003-NIG-2008;Clade II)__AIT17580__GPCmut2 (opt1)
aggagaguccgcucagccagguugcagaagcggcuuagcguguguccuaaucuucucucugcguguagguaggccugugccgcaaacaagcuuaccaugggccagaucaucaccuucuuccaggaggugccccacgucaucgaggaggugaugaacaucgugcugaucgcccucagccugcuggccauccucaaggggaucuacaacgucgcgaccugcggccuguucgggcugguguccuuccuccugcugugcggccgcagcugcuccacgaccuacaaggggguguacgagcuccagacccuggagcuggacauggccagccucaacaugugcaugccgcuguccugcacgaagaacaacagccaccacuacaucauggucggcaacgagaccggccuggagcucacccugaccaacacguccaucaucaaccacaaguucugcaaccugagcgacgcccacaagaagaaccucuacgaccacgcccugauguccaucaucagcaccuuccaccuguccauccccaacuucaaccaguacgaggccaugagcugcgacuucaacgggggcaagaucuccgugcaguacaaccucagccacaccuacgcgguggacgccgccaaccacugcgggaccaucgccaacggcguccugcagacguucaugcggauggcguggggcggguccuacaucgcccuggacagcggcaagggguccugggacugcaucaugaccagcuaccaguaccucaucauccagaacaccaccugggaggaccacugccaguucucccgccccagccccaucggcuaccuggggcugcucagccagcggacgcgcgacaucuacaucucccggcgccgccggggcaccuucaccuggacccucagcgacuccgagagcaacgagacgccgggcggguacugccugacccgguggaugcugaucgaggccgagcucaagugcuucggcaacaccgccguggccaagugcaacgagaagcacgacgaggaguucugcgacaugcugcgccuguucgacuucugcaagcaggcgauccggcgccucaaggcccccgcccagauguccauccagcugaucaacaaggccgugaacgcccugaucaacgaccagcucaucaugaagaaccaccuccgggacaucauggggauccccuacugcaacuacagcaaguacugguaccugaaccacaccgucacgggccgcaccucccugccccggugcuggcuggugagcaacggguccuaccugaacgagacccacuucagcgacgacaucgagcagcaggcggacaacaugaucaccgagcuccugcagaaggaguacauggaccgccagggcaagacgccccugggccucguggaccuguucgucuucuccaccagcuucuaccugaucuccaucuuccugcaccucgugaagaucccgacccaccggcacgugaucgggaagcccugccccaagccccaccgccugaaccacaugggcaucugcagcugcgggcuguacaagcacccgggcguccccgugaaguggaagcggugaggacuagucccuguucccagagcccacuuuuuuuucuuuuuuugaaauaaaauagccugucuuucagaucuaaaaaaaaaaaaaaaaaaaaaaaaaaaaaaaaaaaaaaaaaaaaaaaaaaaaaaaaaaaaaaaaaaaaaaaaaaaaaaaaaaaaaaaaaaaaaaaaaaaa

SEQ ID NO: 23764 - RNA, 1740 nt, Artificial Sequence
  mRNA product Design a-2 (A100) comprising derived and/or modified sequence from LASV(LASV035-NIG-2009;Clade II)__AIT17588__GPCmut2 (opt1)
aggagaguccgcucagccagguugcagaagcggcuuagcguguguccuaaucuucucucugcguguagguaggccugugccgcaaacaagcuuaccaugggccagaucaucaccuucuuccaggaggugccccacgucaucgaggaggugaugaacaucgugcugaucgcccucagccugcuggccauccucaaggggaucuacaacgucgcgaccugcggccuguucgggcugguguccuuccuccugcugugcggccgcagcugcuccacgaccuacaaggggguguacgagcuccagacccuggagcuggacauggccagccucaacaugugcaugccgcuguccugcacgaagaacaacagccaccacuacaucauggucggcaacgagaccggccuggagcucacccugaccaacacguccaucaucaaccacaaguucugcaaccugagcgacgcccacaagaagaaccucuacgaccacgcccugauguccaucaucagcaccuuccaccuguccauccccaacuucaaccaguacgaggccaugagcugcgacuucaacgggggcaagaucuccgugcaguacaaccucagccacgcguacgccguggacgccgccaaccacugcgggaccaucgcgaacggcguccugcagaccuucaugcggauggccuggggcggguccuacaucgcccuggacagcggcaagggguccugggacugcaucaugacgagcuaccaguaccucaucauccagaacaccaccugggaggaccacugccaguucucccgccccagccccaucggcuaccuggggcugcucagccagcggacccgcgacaucuacaucucccggcgccgccggggcacguucaccuggacccucagcgacuccgagggcaacgagacccccgggggcuacugccugacgcgguggaugcugaucgaggccgagcucaagugcuucgggaacaccgccguggcgaagugcaacgagaagcacgacgaggaguucugcgacaugcugcgccuguucgacuucugcaagcaggccauccggcgccucaaggcccccgcccagaugagcauccagcugaucaacaaggccgugaacgcgcugaucaacgaccagcucaucaugaagaaccaccuccgggacaucaugggcauccccuacugcaacuacuccaaguacugguaccugaaccacaccgucaccgggaagacgagccugccccgcugcuggcugguguccaacggcagcuaccugaacgagacccacuucuccgacgacaucgagcagcaggccgacaacaugaucaccgagcuccugcagaaggaguacaucgaccggcagggcaagaccccgcuggggcucguggaccuguucgucuucagcacguccuucuaccugaucagcaucuuccugcaccucgugaagaucccgacccaccgccacgugaucggcaagcccugccccaagccccaccggcugaaccacauggggaucugcuccugcggccuguacaagcacccggggguccccgugaaguggaagcgcugaggacuagucccuguucccagagcccacuuuuuuuucuuuuuuugaaauaaaauagccugucuuucagaucuaaaaaaaaaaaaaaaaaaaaaaaaaaaaaaaaaaaaaaaaaaaaaaaaaaaaaaaaaaaaaaaaaaaaaaaaaaaaaaaaaaaaaaaaaaaaaaaaaaaa

SEQ ID NO: 23765 - RNA, 1740 nt, Artificial Sequence
  mRNA product Design a-2 (A100) comprising derived and/or modified sequence from LASV(LASV1000-NIG-2009;Clade II)__AIT17782__GPCmut2 (opt1)
aggagaguccgcucagccagguugcagaagcggcuuagcguguguccuaaucuucucucugcguguagguaggccugugccgcaaacaagcuuaccaugggccagaucaucaccuucuuccaggaggugccccacgucaucgaggaggugaugaacaucgugcugaucgcccucagccugcuggccauccucaaggggaucuacaacgucgcgaccugcggccuguucgggcugguguccuuccuccugcugugcggccgcagcugcuccacgaccuacaaggggguguacgagcuccagacccuggagcuggacauggccagccucaacaugugcaugccgcuguccugcacgaagaacaacagccaccacuacaucauggucggcaacgagaccggccuggagcucacccugaccaacacguccaucaucaaccacaaguucugcaaccugagcgacgcccacaagaagaaccucuacgaccacgcccugauguccaucaucagcaccuuccaccuguccauccccaacuucaaccaguacgaggccaugagcugcgacuucaacgggggcaagaucuccgugcaguacaaccucagccacaccuacgcgguggacgccgccaaccacugcgggaccaucgccaacggcguccugcagacguucaugcggauggcguggggcggguccuacaucgcccuggacagcggcaagggguccugggacugcaucaugaccagcuaccaguaccucaucauccagaacaccaccugggaggaccacugccaguucucccgccccagccccaucggcuaccuggggcugcucagccagcggacgcgcgacaucuacaucucccggcgccgccggggcaccuucaccuggacccucagcgacuccgagggcaacgagacgcccgggggcuacugccugacccgguggaugcugaucgaggccgagcucaagugcuucgggaacaccgccguggccaagugcaacgagaagcacgacgaggaguucugcgacaugcugcgccuguucgacuucugcaagcaggcgaucaagcggcucaagacccccgcccagaugagcauccagcugaucaacaaggccgugaacgcccugaucaacgaccagcucaucaugaagaaccaccuccgcgacaucaugggcauccccuacugcaacuacuccaaguacugguaccugaaccacacggucaccgggaagaccagccugccccggugcuggcugguguccaacggcagcuaccugaacgagacccacuucuccgacgacaucgagcagcaggccgacaacaugaucacggagcuccugcagaaggaguacaucgaccgccagggcaagaccccgcuggggcucguggaccuguucgucuucagcaccuccuucuaccugaucagcaucuuccugcaccucgugaagaucccgacccaccggcacguggucggcaagcccugccccaagccccaccgccugaaccacauggggaucugcuccugcggccuguacaagcacccgggggugcccgugaaguggaagcggugaggacuagucccuguucccagagcccacuuuuuuuucuuuuuuugaaauaaaauagccugucuuucagaucuaaaaaaaaaaaaaaaaaaaaaaaaaaaaaaaaaaaaaaaaaaaaaaaaaaaaaaaaaaaaaaaaaaaaaaaaaaaaaaaaaaaaaaaaaaaaaaaaaaaa

SEQ ID NO: 23766 - RNA, 1740 nt, Artificial Sequence
  mRNA product Design a-2 (A100) comprising derived and/or modified sequence from LASV(LASV221-NIG-2010;Clade II)__AIT17624__GPCmut2 (opt1)
aggagaguccgcucagccagguugcagaagcggcuuagcguguguccuaaucuucucucugcguguagguaggccugugccgcaaacaagcuuaccaugggccagaucaucaccuucuuccaggaggugccccacgucaucgaggaggugaugaacaucgugcugaucgcccucagccugcuggccauccucaaggggaucuacaacgucgcgaccugcggccuguucgggcugguguccuuccuccugcugugcggccgcagcugcuccacgaccuacaaggggguguacgagcuccagacccuggagcuggacauggccagccucaacaugugcaugccgcuguccugcacgaagaacaacagccaccacuacaucauggucggcaacgagaccggccuggagcucacccugaccaacacguccaucaucaaccacaaguucugcaaccugagcgacgcccacaagaagaaccucuacgaccacgcccugauguccaucaucagcaccuuccaccuguccauccccaacuucaaccaguacgaggccaugagcugcgacuucaacgggggcaagaucuccgugcaguacaaccucagccacaccuacgcgaucgacgccgccaaccacugcgggaccaucgccaacggcgugcugcagacguucaugcggauggcguggggcggguccuacaucgcccuggacagcggcaagggguccugggacugcaucaugaccagcuaccaguaccucaucauccagaacaccaccugggaggaccacugccaguucucccgccccagccccaucggcuaccuggggcugcucagccagcggacgcgcgacaucuacaucucccggcgccgccggggcaccuucaccuggacccucagcgacuccgagggcaacgagacgcccgggggcuacugccugacccgguggaugcugaucgaggccgagcucaagugcuucgggaacaccgccgucgccaagugcaacgagaagcacgacgaggaguucugcgacaugcugcgccuguucgacuucugcaagcaggcgauccggcgccucaagacccccgcccagaugagcauccagcugaucaacaaggccgugaacgcccugaucaacgaccagcucaucaugaagaaccaccuccgggacaucaugggcauccccuacugcaacuacuccaaguacugguaccugaaccacacggugaccgggaagaccagccugccccgcugcuggcuggucuccaacggcagcuaccugaacgagacccacuucuccgacgacaucgagcagcaggccgacaacaugaucacggagaugcuccagaaggaguacauggaccggcagggcaagaccccgcuggggcugguggaccucuucguguucagcaccuccuucuaccugaucagcaucuuccugcaccuggucaagaucccgacccaccgccacgugaucggcaagcccugccccaagccccaccggcucaaccacauggggaucugcuccugcggccuguacaagcacccgggggugcccgucaaguggaagcgcugaggacuagucccuguucccagagcccacuuuuuuuucuuuuuuugaaauaaaauagccugucuuucagaucuaaaaaaaaaaaaaaaaaaaaaaaaaaaaaaaaaaaaaaaaaaaaaaaaaaaaaaaaaaaaaaaaaaaaaaaaaaaaaaaaaaaaaaaaaaaaaaaaaaaa

SEQ ID NO: 23767 - RNA, 1740 nt, Artificial Sequence
  mRNA product Design a-2 (A100) comprising derived and/or modified sequence from LASV(LASV237-NIG-2010;Clade II)__AIT17638__GPCmut2 (opt1)
aggagaguccgcucagccagguugcagaagcggcuuagcguguguccuaaucuucucucugcguguagguaggccugugccgcaaacaagcuuaccaugggccagaucaucaccuucuuccaggaggugccccacgucaucgaggaggugaugaacaucgugcugaucgcccucagccugcuggccauccucaaggggaucuacaacgucgcgaccugcggccuguucgggcugguguccuuccuccugcugugcggccgcagcugcuccacgaccuacaaggggguguacgagcuccagacccuggagcuggacauggccagccucaacaugugcaugccgcuguccugcacgaagaacaacagccaccacuacaucauggucggcaacgagaccggccuggagcucacccugaccaacacguccaucaucaaccacaaguucugcaaccugagcgacgcccacaagaaggaccucuacgaccacgcccugauguccaucaucagcaccuuccaccuguccauccccaacuucaaccaguacgaggccaugagcugcgacuucaacgggggcaagaucuccgugcaguacaaccucagccacaccuacgcgguggacgccgccaaccacugcgggaccaucgccaacggcguccugcagacguucaugcggauggcguggggcggguccuacaucgcccuggacagcggcaagggguccugggacugcaucaugaccagcuaccaguaccucaucauccagaacaccaccugggaggaccacugccaguucucccgccccagccccaucggcuaccuggggcugcucagccagcggacgcgcgacaucuacaucucccggcgccgccggggcaccuucaccuggacccucagcgacuccgagggcaacgagacgcccgggggcuacugccugacccgguggaugcugaucgaggccgagcucaagugcuucgggaacaccgccguggccaagugcaacgagaagcacgacgaggaguucugcgacaugcugcgccuguucgacuucugcaagcaggcgauccggcgccucaagacccccgcccagaugagcauccagcugaucaacaaggccgugaacgcccugaucaacgaccagcucaucaugaagaaccaccuccgggacaucaugggcauccccuacugcaacuacuccaaguacugguaccugaaccacacggucaccgggaagaccagccugccccgcugcuggcugguguccaacggcagcuaccugaacgagacccacuucuccgacgacaucgagcagcaggccgacaacaugaucacggagcuccugcagaaggaguacauggaccggcagggcaagaccccgcuggggcucguggaccuguucgucuucagcaccuccuucuaccugaucagcaucuuccugcaccucaucaagaucccgacccaccgccacaucacgggcaagcccugccccaagccccaccggcugaaccacauggggaucugcuccugcggccuguacaagcacccgggggugcccgugaaguggaagcgcugaggacuagucccuguucccagagcccacuuuuuuuucuuuuuuugaaauaaaauagccugucuuucagaucuaaaaaaaaaaaaaaaaaaaaaaaaaaaaaaaaaaaaaaaaaaaaaaaaaaaaaaaaaaaaaaaaaaaaaaaaaaaaaaaaaaaaaaaaaaaaaaaaaaaa

SEQ ID NO: 23768 - RNA, 1740 nt, Artificial Sequence
  mRNA product Design a-2 (A100) comprising derived and/or modified sequence from LASV(LASV253-NIG-2011;Clade II)__AIT17670__GPCmut2 (opt1)
aggagaguccgcucagccagguugcagaagcggcuuagcguguguccuaaucuucucucugcguguagguaggccugugccgcaaacaagcuuaccaugggccagaucaucaccuucuuccaggaggugccccacgucaucgaggaggugaugaacaucgugcugaucgcccucagccugcuggccauccucaaggggaucuacaacgucgcgaccugcggccuguucgggcugguguccuuccuccugcugugcggccgcagcugcuccacgaccuacaaggggguguacgagcuccagacccuggagcuggacauggccagccucaacaugugcaugccgcuguccugcacgaagaacaacagccaccacuacaucauggucggcaacgagaccggccuggagcucacccugaccaacacguccaucaucaaccacaaguucugcaaccugagcgacgcccacaagaagaaccucuacgaccacgcccugauguccaucaucagcaccuuccaccuguccauccccaacuucaaccaguacgaggccaugagcugcgacuucaacgggggcaagaucuccgugcaguacaaccucagccacaccuacgcgguggacgccgccaaccacugcgggaccaucgccaacggcguccugcagacguucaugcggauggcguggggcggguccuacaucgcccuggacagcggcaagggguccugggacugcaucaugaccagcuaccaguaccucaucauccagaacaccaccugggaggaccacugccaguucucccgccccagccccaucggcuaccuggggcugcucagccagcggacgcgcgacaucuacaucucccggcgccgccggggcaccuucaccuggacccucagcgacuccgagggcaacgagacgcccgggggcuacugccugacccgguggaugcugaucgaggccgagcucaagugcuucgggaacaccgccguggccaagugcaacgagaagcacgacgaggaguucugcgacaugcugcgccuguucgacuucugcaagcaggcgauccggcgccucaaggcccccgcccagaugagcauccagcugaucaacaaggccgugaacgcccugaucaacgaccagcucaucaugaagaaccaccuccgggacaucaugggcaucccguacugcaacuacuccaaguacugguaccugaaccacaccgucacggggcgcaccagccugccccggugcuggcugguguccaacggcagcuaccugaacgagacccacuucuccgacgacaucgagcagcaggcggacaacaugaucaccgagcuccugcagaaggaguacaucgaccgccagggcaagacgccccuggggcucguggaccuguucgucuucagcaccuccuucuaccugaucagcaucuuccugcaccucgugaagaucccgacccaccggcacaucaucggcaagcccugccccaagccccaccgccugaaccacauggggaucugcuccugcggccuguacaagcacccgggggugcccgucaaguggaagcggugaggacuagucccuguucccagagcccacuuuuuuuucuuuuuuugaaauaaaauagccugucuuucagaucuaaaaaaaaaaaaaaaaaaaaaaaaaaaaaaaaaaaaaaaaaaaaaaaaaaaaaaaaaaaaaaaaaaaaaaaaaaaaaaaaaaaaaaaaaaaaaaaaaaaa

SEQ ID NO: 23769 - RNA, 1740 nt, Artificial Sequence
  mRNA product Design a-2 (A100) comprising derived and/or modified sequence from LASV(LASV254-NIG-2011;Clade II)__AIT17674__GPCmut2 (opt1)
aggagaguccgcucagccagguugcagaagcggcuuagcguguguccuaaucuucucucugcguguagguaggccugugccgcaaacaagcuuaccaugggccagaucaucaccuucuuccaggaggugccccacgucaucgaggaggugaugaacaucgugcugaucgcccucagccugcuggccauccucaaggggaucuacaacgucgcgaccugcggccuguucgggcugguguccuuccuccugcugugcggccgcagcugcuccacgaccuacaaggggguguacgagcuccagacccuggagcuggacaugaccaaccucaacaugugcaugccgcugagcugcaccaagaacaacucccaccacuacaucauggucggcaacgagaccggccuggagcucacccugacgaacaccagcaucaucaaccacaaguucugcaaccuguccgacgcccacaagaagaaccucuacaaccacgcccugaugagcaucaucuccaccuuccaccugagcauccccaacuucaaccaguacgaggccauguccugcgacuucaacgggggcaagaucagcgugcaguacaaccucucccacagcuacgccguggacgcggccaaccacugcgggaccaucgccaacggcguccugcagacguucaugcggauggccuggggcggguccuacaucgcgcuggacagcggcaaggggaacugggacugcaucaugaccuccuaccaguaccucaucauccagaacaccaccugggaggaccacugccaguucagccgccccucccccaucggcuaccuggggcugcucagccagcggacgcgcgacaucuacaucagccggcgccgccggggcaccuucaccuggacccucuccgacagcgagggcaacgagacgcccgggggcuacugccugacccgguggaugcugaucgaggccgagcucaagugcuucgggaacaccgccguggccaagugcaacgagaagcacgacgaggaguucugcgacaugcugcgccuguucgacuucugcaagcaggccauccggcgccucaagacccccgcgcaggccaacauccagcugaucaacaaggccgugaacgcccugaucaacgaccagcucaucaugaagaaccaccuccgggacaucaugggcauccccuacugcaacuacuccaaguacugguaccugaaccacacggucaccgggaagaccagccugccccgcugcuggcugguguccaacggcagcuaccugaacgagacccacuucuccgacgacaucgagcagcaggccgacaacaugaucacggagcuccugcagaaggaguacauggaccggcagggcaagaccccgcuggggcucguggaccuguucgucuucagcaccuccuucuaccugaucagcaucuuccugcaccucgugaagaucccgacccaccgccacgugaucggcaagcccugccccaagccccaccggcugaaccacauggggaucugcuccugcggccuguacaagcacccggggguccccgugaaguggaagcgcugaggacuagucccuguucccagagcccacuuuuuuuucuuuuuuugaaauaaaauagccugucuuucagaucuaaaaaaaaaaaaaaaaaaaaaaaaaaaaaaaaaaaaaaaaaaaaaaaaaaaaaaaaaaaaaaaaaaaaaaaaaaaaaaaaaaaaaaaaaaaaaaaaaaaa

SEQ ID NO: 23770 - RNA, 1740 nt, Artificial Sequence
  mRNA product Design a-2 (A100) comprising derived and/or modified sequence from LASV(Nig08-A19;Clade III)__ADU56618__GPCmut2 (opt1)
aggagaguccgcucagccagguugcagaagcggcuuagcguguguccuaaucuucucucugcguguagguaggccugugccgcaaacaagcuuaccaugggccagaucgugaccuucuuccaggaggucccccacgugaucgaggaggugaugaacaucguccugaucgcccucagcauccuggccauccugaaggggcucuacaacaucgcgaccugcggccugaucgggcuggugacguuccuccugcuguccggccgcagcugcuccaugaccuacaaggggguguacgagcuccagacccuggagcugaacaugaacacccucaacaugugcaugccgcugagcugcaccaagaacaacucccaccacuacaucauggucggcaacgagaccggccuggagcucacccugacgaacaccagccugcuccaccacaaguucugcaaccuguccgacgcccacaagaagaaccuguacgaccacacccucaugagcaucaucuccaccuuccaccugagcauccccaacuucaaccaguacgaggccauguccugcgacuucaacgggggcaagaucacggugcaguacaaccugagccacuccuacgccaucgacgccgcgaaccacugcgggaccguggccaacggcguccuccagaccuucaugcggauggccuggggcgggagcuacaucgcccuggacuccggccgcgggaagugggacugcaucaugaccagcuaccaguaccugaucauccagaacacgaccugggaggaccacugccaguucucccggcccagccccaucggcuaccucgggcugcugucccagcgcacccgggacaucuacaucagccgccggcgccggggcaccuucacguggacccugagcgacuccgagggcaacgagacccccgggggcuacugccucacccgcuggaugcugaucgaggcggagcugaagugcuucgggaacacggccguggccaagugcaacgagaagcacgacgaggaguucugcgacaugcuccggcuguucgacuucugcaagcaggccauccgccggcugaaggcccccgcgcagaugagcauccagcucaucaacaaggccgugaacgcccugaucaacgaccagcugaucaugaagaaccaccuccgcgacaucaugggcauccccuacugcaacuacuccaaguacugguaccugaaccacaccagcaccgggcggaccucccugccccgcugcuggcucgucagcaacggcuccuaccugaacgagacgcacuucagcgacgacaucgagcagcaggccgacaacaugaucaccgagaugcugcagaaggaguaccucgaccggcagggcaagaccccgcuggggcugguggaccuguucguguucuccaccagcuucuaccucaucuccaucuuccugcaccuggucaagaucccgacgcaccgccacaucgugggcaagcccugccccaagccccaccggcucaaccacauggggaucugcagcugcggccuguacaagcagccgggggugcccguccgcuggaagcggugaggacuagucccuguucccagagcccacuuuuuuuucuuuuuuugaaauaaaauagccugucuuucagaucuaaaaaaaaaaaaaaaaaaaaaaaaaaaaaaaaaaaaaaaaaaaaaaaaaaaaaaaaaaaaaaaaaaaaaaaaaaaaaaaaaaaaaaaaaaaaaaaaaaaa

SEQ ID NO: 23771 - RNA, 1743 nt, Artificial Sequence
  mRNA product Design a-2 (A100) comprising derived and/or modified sequence from LASV(G1180-SLE-2010;Clade IV)__AIT17168__GPCmut2 (opt1)
aggagaguccgcucagccagguugcagaagcggcuuagcguguguccuaaucuucucucugcguguagguaggccugugccgcaaacaagcuuaccaugggccagaucgugaccuucuuccaggaggucccccacgugaucgaggaggugaugaacaucguccugaucgcccucagcauccuggccgugcugaaggggcucuacaacuucgcgaccugcggccugguggggcugcucaccuuccugcugcucugcggccgcuccugcaccgccagccgguacaagggggucuacgagcugcagacccuggagcucaacauggagacccugaacaugugcaugccgcuguccugcaccaagaacaacagccaccacuacaucauggugggcaacgagaccggccucgagcugacccugacgaacaccuccaucaucaaccacaaguucugcaaccucagcgacgcccacaagaagaaccuguacgaccacgcccugauguccaucaucagcaccuuccaccucuccauccccaacuucaaccaguacgaggccaugagcugcgacuucaacgggggcaagaucuccgugcaguacaaccugagccacuccuacgcgggggacgccgccaaccacugcggcaccgucgccaacggggugcugcagacguucaugcgcauggcguggggcggcagcuacaucgcccucgacuccgggcacggcagcugggacugcaucaugaccuccuaccaguaccugaucauccagaacaccaccugggaggaccacugccaguucagccggcccucccccaucggguaccugggccuccugagccagcgcacgcgggacaucuacaucagccgccggcgccggggcaccuucaccuggacccuguccgacagcgaggggaaggacacgccgggcggguacugccugacccgcuggaugcucaucgaggccgagcugaagugcuucggcaacaccgccguggccaagugcaacgagaagcacgacgaggaguucugcgacaugcugcggcuguucgacuucugcaagcaggcgauccagcgccugaaggcccccgcccagauguccauccagcugaucaacaaggccgucaacgcccucaucaacgaccagcugaucaugaagaaccaccuccgggacaucauggggauccccuacugcaacuacagcaaguacugguaccucaaccacaccacgaccggcaagaccucccugcccaagugcuggcuggugagcaacggcuccuaccucaacgagacccacuucagcgacgacaucgagcagcaggcggacaacaugaucacggagaugcugcagaaggaguacauggagcgccaggggaagacgccccugggccucguggaccuguucgucuucuccaccagcuucuaccugaucuccaucuuccugcaccucgugaagaucccgacccaccggcacaucgugggcaagagcugccccaagccccaccgccugaaccacauggggaucugcuccugcgggcuguacaagcagcccggcgucccggugaaguggaagcggugaggacuagucccuguucccagagcccacuuuuuuuucuuuuuuugaaauaaaauagccugucuuucagaucuaaaaaaaaaaaaaaaaaaaaaaaaaaaaaaaaaaaaaaaaaaaaaaaaaaaaaaaaaaaaaaaaaaaaaaaaaaaaaaaaaaaaaaaaaaaaaaaaaaaa

SEQ ID NO: 23772 - RNA, 1743 nt, Artificial Sequence
  mRNA product Design a-2 (A100) comprising derived and/or modified sequence from LASV(G1442-SLE-2011;Clade IV)__AIT17180__GPCmut2 (opt1)
aggagaguccgcucagccagguugcagaagcggcuuagcguguguccuaaucuucucucugcguguagguaggccugugccgcaaacaagcuuaccaugggccagaucgugaccuucuuccaggaggucccccacgugaucgaggaggugaugaacaucguccugaucgcccucagcauccuggccgugcugaaggggcucuacaacguggcgaccugcggccugaucgggcuggucacguuccuccugcugugcggccgcuccugcaccaccacccucuacaaggggguguacgagcugcagacgcuggagcucaacauggagacccugaacaugugcaugccgcugagcugcaccaagaacaacucccaccacuacauccgggugggcaacgagacgggccucgagcugacccugaccaacaccagcaucaucaaccacaaguucugcaaccucuccgacgcccacaagaagaaccuguacgaccacgcccugaugagcaucaucuccacguuccaccucagcauccccaacuucaaccaguacgaggccauguccugcgacuucaacgggggcaagaucagcguccaguacaaccugucccacagcuacgccggggacgcggccaaccacugcggcaccguggccaacggggugcugcagaccuucaugcgcauggccuggggcggcuccuacaucgcgcucgacagcgggcggggcaacugggacugcaucaugaccuccuaccaguaccugaucauccagaacacgaccugggacgaccacugccaguucagccgccccucccccaucggguaccugggccuccugagccagcggacccgcgacgucuacaucucccggcgccgccggggcaccuucacguggacccugagcgacagcgaggggaaggacaccccgggcggguacugccugacccgguggaugcucaucgaggccgagcugaagugcuucggcaacacggccguggccaagugcaacgagaagcacgacgaggaguucugcgacaugcugcgccucuucgacuucugcaagcaggccauccagcggcugaaggcgcccgcccagauguccauccagcugaucaacaaggccgugaacgcccucaucaacgaccagcugaucaugaagaaccaccuccgcgacaucauggggauccccuacugcaacuacagcaaguacugguaccugaacaacaccgccaccggcaagaccucccugcccaagugcuggcugaucagcaacggcuccuaccucaacgagacgcacuucagcgacgacaucgagcaggaggcggacaacaugaucaccgagaugcugcagaaggaguacauggagcggcaggggaagacgccccugggccucgucgaccuguucguguucuccaccagcuucuaccugaucuccaucuuccugcaccucgugaagaucccgacccaccgccacaucgucggcaagagcugccccaagccccaccggcugaaccacauggggaucugcuccugcgggcuguacaagcagcccggcgugccggugcgcuggaagcggugaggacuagucccuguucccagagcccacuuuuuuuucuuuuuuugaaauaaaauagccugucuuucagaucuaaaaaaaaaaaaaaaaaaaaaaaaaaaaaaaaaaaaaaaaaaaaaaaaaaaaaaaaaaaaaaaaaaaaaaaaaaaaaaaaaaaaaaaaaaaaaaaaaaaa

SEQ ID NO: 23773 - RNA, 1743 nt, Artificial Sequence
  mRNA product Design a-2 (A100) comprising derived and/or modified sequence from LASV(G3010-SLE-2013;Clade IV)__AIT17344__GPCmut2 (opt1)
aggagaguccgcucagccagguugcagaagcggcuuagcguguguccuaaucuucucucugcguguagguaggccugugccgcaaacaagcuuaccaugggccagaucgugaccuucuuccaggaggucccccacgugaucgaggaggugaugaacaucguccugaucgcccucagcauccuggccgugcugaaggggcucuacaacuucgcgaccugcggccugguggggcuggucacguuccuccugcugugcggccgcuccugcaccaccagccucuacaaggggguguacgagcugcagacccuggagcucaacauggagacgcugaacaugugcaugccgcuguccugcaccaagaacaacagccaccacuacaucauggugggcaacgagaccggccucgagcugacgcugaccaacaccuccaucaucaaccacaaguucugcaaccucagcgacgcccacaagaagaaccuguacaaccacgcccugauguccaucaucagcaccuuccaccucuccauccccaacuucaaccaguacgaggccaugagcugcgacuucaacgggggcaagaucuccguccaguacaaccugagccacuccuacgccggggacgcggccagccacugcggcacgguggccaacggggugcugcagaccuucaugcggauggccuggggcggcuccuacaucgcgcucgacagcggguacggcaagugggacugcaucaugaccuccuaccaguaccugaucauccagaacaccacgugggaggaccacugccaguucagccgccccucccccaucggguaccugggccuccugagccagcggacccgcgacaucuacaucagccggcgccgccggggcaccuucaccuggacgcuguccgacagcgaggggaaggacaccccgggcggguacugccugacccgguggaugcucaucgaggccgagcugaagugcuucggcaacaccgccgucgccaagugcaacgagaagcacgacgaggaguucugcgacaugcugcgccucuucgacuucugcaagcaggccauccagcggcugaagacgcccgcgcagauguccauccagcugaucaacaaggccgugaacgcccucaucaacgaccagcugaucaugaagaaccaccuccgcgacaucauggggauccccuacugcaacuacagcaaguacugguaccugaaccacaccaccaccggcaagacgucccugcccaagugcuggcuggugagcaacggcuccuaccucaacgagacccacuucagcgacgacaucgagcagcaggccgacaacaugaucaccgagaugcugcagaaggaguacauggagcggcaggggaagacgccccugggccucgucgaccuguucguguucuccaccagcuucuaccugaucuccaucuuccugcaccucgugaagaucccgacccaccgccacaucgucggcaagagcugccccaagccccaccggcugaaccacauggggaucugcuccugcgggcuguacaagcagcccggcgugccggugcgcuggaagcggugaggacuagucccuguucccagagcccacuuuuuuuucuuuuuuugaaauaaaauagccugucuuucagaucuaaaaaaaaaaaaaaaaaaaaaaaaaaaaaaaaaaaaaaaaaaaaaaaaaaaaaaaaaaaaaaaaaaaaaaaaaaaaaaaaaaaaaaaaaaaaaaaaaaaa

SEQ ID NO: 23774 - RNA, 1743 nt, Artificial Sequence
  mRNA product Design a-2 (A100) comprising derived and/or modified sequence from LASV(G502-SLE-2009;Clade IV)__AIT17126__GPCmut2 (opt1)
aggagaguccgcucagccagguugcagaagcggcuuagcguguguccuaaucuucucucugcguguagguaggccugugccgcaaacaagcuuaccaugggccagaucgugaccuucuuccaggaggucccccacgugaucgaggaggugaugaacaucguccugaucgcccucagcauccuggccgugcugaaggggcucuacaacuucgcgaccugcggccugguggggcugcucacguuccugcugcucugcggccgcuccugcaccaccgggcuguacaagggcgucuacgagcugcagacccucgagcugaacauggagacgcugaacaugugcaugccgcucagcugcaccaagaacaacucccaccacuacaucauggugggcaacgagaccgggcuggagcugacgcucaccaacaccagcaucaucaaccacaaguucugcaaccuguccgacgcccacaagaagaaccuguacgaccacgcccucaugagcaucaucuccaccuuccaccugagcauccccaacuucaaccaguacgaggccauguccugcgacuucaacggcgggaagaucagcgugcaguacaaccugucccacagcuacgccggcgacgcggccgaccacugcgggacggucgccaacggcgugcuccagaccuucaugcggauggccuggggcggguccuacaucgcgcuggacagcggccgcgggcggugggacugcaucaugaccuccuaccaguaccugaucauccagaacaccacgugggaggaccacugccaguucagccgccccucccccaucggcuaccucggccugcugagccagcggacccgcgacaucuacaucucccggcgccgccgggggaccuucaccuggacgcugagcgacagcgagggcaaggacacccccgggggcuacugccucacccgguggaugcugaucgaggccgagcugaagugcuucgggaacaccgccguggccaagugcaacgagaagcacgacgaggaguucugcgacaugcuccgccuguucgacuucugcaagcaggccauccagcggcugaaggcgcccgcccagauguccauccagcucaucaacaaggccgucaacgcccugaucaacgaccagcuggugaugaagaaccaccuccgcgacaucaugggcauccccuacugcaacuacagccgguacugguaccugaaccacacgaccaccggccgcaccucccugcccaagugcuggcucgugagcaacggguccuaccugaacgagacgcacuucagcgacgacaucgagcagcaggccgacaacaugaucaccgagaugcugcagaaggaguacauggagcggcagggcaagaccccgcucgggcuggucgaccuguucguguucuccaccagcuucuaccugaucuccaucuuccuccaccuggugaagaucccgacgcaccgccacaucgucggcaagagcugccccaagccccaccggcugaaccacauggggaucugcuccugcggccucuacaagcagcccggcgugccggugaaguggaagcgcugaggacuagucccuguucccagagcccacuuuuuuuucuuuuuuugaaauaaaauagccugucuuucagaucuaaaaaaaaaaaaaaaaaaaaaaaaaaaaaaaaaaaaaaaaaaaaaaaaaaaaaaaaaaaaaaaaaaaaaaaaaaaaaaaaaaaaaaaaaaaaaaaaaaaa

SEQ ID NO: 23775 - RNA, 1743 nt, Artificial Sequence
  mRNA product Design a-2 (A100) comprising derived and/or modified sequence from LASV(G733-SLE-2010;Clade IV)__AIT17154__GPCmut2 (opt1)
aggagaguccgcucagccagguugcagaagcggcuuagcguguguccuaaucuucucucugcguguagguaggccugugccgcaaacaagcuuaccaugggccagaucgugaccuucuuccaggaggucccccacgugaucgaggaggugaugaacaucguccugaucgcccucagcauccuggccgugcugaaggggcucuacaacuucgcgaccugcggcaucguggggcuggucuccuuccugcuccugugcggccgcagcugcacgaccucccuguacaaggggguguacgagcuccagacccuggagcugaacauggagacccucaacaugugcaugccgcugagcugcaccaagaacaacucccaccacuacaucauggugggcaacgagaccggccuggagcucacccugacgaacaccagcaucaucaaccacaaguucugcaaccuguccgacgcccacaagaagaaccucuacgaccacgcccugaugagcaucaucuccaccuuccaccugagcauccccaacuucaaccaguacgaggccauguccugcgacuucaacgggggcaagaucagcguccaguacaaccucucccacagcuacgccggggacgcggccaaccacugcggcaccaucgccaacggggugcugcagacguucaugcggauggccuggggcggcuccuacaucgcgcuggacagcgggcgcgaccggugggacugcaucaugaccuccuaccaguaccucaucauccagaacaccaccugggaggaccacugccaguucagccgccccucccccaucggcuaccuggggcugcucagccagcggacgcgcgacaucuacaucagccggcgccgccggggcaccuucaccuggacccucuccgacagcgagggcaaggacacgcccgggggcuacugccugacccgguggaugcugaucgaggccgagcucaagugcuucgggaacaccgccguggccaagugcaacgagaagcacgacgaggaguucugcgacaugcugcgccuguucgacuucugcaagcaggccauccagcggcucaaggcgcccgcccagauguccauccagcugaucaacaaggccgucaacgcccugaucaacgaccagcucaucaugaagaaccaccuccgcgacaucaugggcauccccuacugcaacuacagcaaguacugguaccugaaccacaccacgaccgggaagaccucccugcccaagugcuggcuggugagcaacggcuccuaccugaacgagacccacuucagcgacgacaucgagcagcaggccgacaacaugaucacggagaugcuccagaaggaguacauggagcggcagggcaagaccccgcuggggcugguggaccucuucgucuucuccaccagcuucuaccugaucuccaucuuccugcaccuggugaagaucccgacccaccgccacguggucggcaagagcugccccaagccccaccggcucaaccacauggggaucugcuccugcggccuguacgggcagcccggcgugccggugaaguggaagcgcugaggacuagucccuguucccagagcccacuuuuuuuucuuuuuuugaaauaaaauagccugucuuucagaucuaaaaaaaaaaaaaaaaaaaaaaaaaaaaaaaaaaaaaaaaaaaaaaaaaaaaaaaaaaaaaaaaaaaaaaaaaaaaaaaaaaaaaaaaaaaaaaaaaaaa

SEQ ID NO: 23776 - RNA, 1743 nt, Artificial Sequence
  mRNA product Design a-2 (A100) comprising derived and/or modified sequence from MOPV/LASV reassortant(IGS-1;Clade IV)__AFY05576__GPCmut2 (opt1)
aggagaguccgcucagccagguugcagaagcggcuuagcguguguccuaaucuucucucugcguguagguaggccugugccgcaaacaagcuuaccaugggccagaucgugaccuucuuccaggaggucccccacgugaucgaggaggugaugaacaucguccugaucgcccucagcgugcuggccgugcugaaggggcucuacaacuucgcgaccugcggccuggucgggcuggugacguuccuccugcugugcggccgcuccugcaccaccagccucuacaaggggguguacgagcugcagacccuggagcucaacauggagacgcugaacaugugcaugccgcuguccugcaccaagaacaacagccaccacuacaucauggucggcaacgagaccggccucgagcugacgcugaccaacaccuccaucaucaaccacaaguucugcaaccucagcgacgcccacaagaagaaccuguacgaccacgcccugauguccaucaucagcaccuuccaccucuccauccccaacuucaaccaguacgaggccaugagcugcgacuucaacgggggcaagaucuccgugcaguacaaccugagccacuccuacgccggggacgcggccaaccacugcggcacgguggccaacgggguccugcagaccuucaugcggauggccuggggcggcagcuacaucgcgcucgacuccgggcgcggcaacugggacugcaucaugaccagcuaccaguaccugaucauccagaacaccacgugggaggaccacugccaguucucccggcccagccccaucggguaccugggccuccugucccagcgcacccgggacaucuacaucagccgccggcgccggggcaccuucaccuggacgcugagcgacuccgagggggaggacaccccgggcggguacugccugacccgcuggaugcucaucgaggccgagcugaagugcuucggcaacaccgccguggccaagugcaacgagaagcacgacgaggaguucugcgacaugcugcggcuguucgacuucugcaagcaggccauccagcgccugaaggcgcccgcccagaugagcauccagcugaucaacaaggccgugaacgcccucaucaacgaccagcugaucaugaagaaccaccuccgggacaucauggggauccccuacugcaacuacuccaaguacugguaccucaaccacacgaccaccggccgcaccagccugcccaagugcuggcuggucuccaacggcagcuaccucaacgagacgcacuucuccgacgacaucgagcagcaggccgacaacaugaucaccgagaugcugcagaaggaguacauggagcggcaggggaagacgccccugggccucguggaccuguucguguucagcaccuccuucuaccugaucagcaucuuccugcaccucgucaagaucccgacccaccgccacaucguggggaaguccugccccaagccccaccggcugaaccacaugggcaucugcagcugcgggcuguacaagcagcccggcgugccggucaaguggaagcgcugaggacuagucccuguucccagagcccacuuuuuuuucuuuuuuugaaauaaaauagccugucuuucagaucuaaaaaaaaaaaaaaaaaaaaaaaaaaaaaaaaaaaaaaaaaaaaaaaaaaaaaaaaaaaaaaaaaaaaaaaaaaaaaaaaaaaaaaaaaaaaaaaaaaaa

SEQ ID NO: 23777 - RNA, 1743 nt, Artificial Sequence
  mRNA product Design a-2 (A100) comprising derived and/or modified sequence from LASV(LM765-SLE-2012;Clade IV)__AIT17814__GPCmut2 (opt1)
aggagaguccgcucagccagguugcagaagcggcuuagcguguguccuaaucuucucucugcguguagguaggccugugccgcaaacaagcuuaccaugggccagaucgugaccuucuuccaggaggucccccacgugaucgaggaggugaugaacaucguccugaucgcccucagcauccuggccgugcugaaggggcucuacaacuucgcgaccugcggccugguggggcuggucacguuccuccugcugugcggccgcuccugcaccaccagccucuacaaggggguguacgagcugcagacccuggagcucaacauggagacgcugaacaugugcaugccgcuguccugcaccaagaacaacagccaccacuacaucauggugggcaacgagaccggccucgagcugacgcugaccaacaccuccaucaucgaccacaaguucugcaaccucagcgacgcccaccggaagaaccuguacgaccacgcccugauguccaucaucagcaccuuccaccucuccauccccaacuucaaccaguacgaggccaugagcugcgacuucaacgggggcaagaucuccguccaguacaaccugagccacuccuacgccaaggacgcggccgaccacugcgggacgguggccaacggcgugcugcagaccuucaugcgcauggccuggggcgggagcuacaucgcgcucgacuccggccgggggcgcugggacugcaucaugaccagcuaccaguaccugaucauccagaacaccacgugggaggaccacugccaguucucccggcccagccccaucggcuaccuggggcuccugucccagcgcacccgggacaucuacaucagccgccggcgccggggcaccuucaccuggacgcugagcgacuccgagggcaaggacacccccgggggcuacugccugacccgcuggaugcucaucgaggccgagcugaagugcuucgggaacaccgccgucgccaagugcaacgagaagcacgacgaggaguucugcgacaugcugcggcuguucgacuucugcaagcaggccauccagcgccugaaggcgcccgcccagaugagcauccagcugaucaacaaggccgugaacgcccucaucaacgaccagcugaucaugaagaaccaccuccgggacaucaugggcauccccuacugcaacuacuccaaguacugguaccucaaccacacgaccaccgggaagaccagccugcccaagugcuggcugguguccaacggcagcuaccucaacgagacgcacuucuccgacgacaucgagcagcaggccgacaacaugaucaccgagaugcugcagaaggaguacauggagcgccagggcaagaccccgcuggggcucgucgaccuguucguguucagcaccuccuucuaccugaucagcaucuuccugcaccucgugaagaucccgacgcaccggcacaucgucggcaagcccugccccaagccccaccgccugaaccacauggggaucugcuccugcggccuguacaagcagccgggggugcccgugaaguggaagcggugaggacuagucccuguucccagagcccacuuuuuuuucuuuuuuugaaauaaaauagccugucuuucagaucuaaaaaaaaaaaaaaaaaaaaaaaaaaaaaaaaaaaaaaaaaaaaaaaaaaaaaaaaaaaaaaaaaaaaaaaaaaaaaaaaaaaaaaaaaaaaaaaaaaaa

SEQ ID NO: 23778 - RNA, 1743 nt, Artificial Sequence
  mRNA product Design a-2 (A100) comprising derived and/or modified sequence from LASV(LM776-SLE-2012;Clade IV)__AIT17824__GPCmut2 (opt1)
aggagaguccgcucagccagguugcagaagcggcuuagcguguguccuaaucuucucucugcguguagguaggccugugccgcaaacaagcuuaccaugggccagaucgugaccuucuuccaggaggucccccacgugaucgaggaggugaugaacaucguccugaucgcccucagcauccuggccgugcugaaggggcucuacaacuucgcgaccugcggccugguggggcuggucacguuccuccugcugugcggccgcuccugcaccaccagcguguacaaggggguguacgagcuccagacccuggagcugaacauggagacgcucaacaugugcaugccgcuguccugcaccaagaacaacagccaccacuacaucauggucggcaacgagaccggccuggagcucacgcugaccaacaccuccaucaucaaccacaaguucugcaaccugagcgacgcccacaagaagaaccucuacgaccacgcccugauguccaucaucagcaccuuccaccuguccauccccaacuucaaccaguacgaggccaugagcugcgacuucaacgggggcaagaucuccgugcaguacaaccucagccacuccuacgccggggacgcggccaaccacugcggcacgguggccaacgggguccugcagaccuucaugcggauggccuggggcggcagcuacaucgcgcuggacuccgggcacggcaagugggacugcaucaugaccagcuaccaguaccucaucauccagaacaccacgugggaggaccacugccaguucucccgccccagccccaucggguaccugggccugcucucccagcggacccgcgacaucuacaucagccggcgccgccggggcaccuucaccuggacgcucagcgacuccgaggggaaggacaccccgggcggguacugccugacccgguggaugcugaucgaggccgagcucaagugcuucggcaacaccgccguggccaagugcaacgagaagcacgacgaggaguucugcgacaugcugcgccuguucgacuucugcaagcaggccauccagcggcucaaggcgcccgcccagaugagcauccagcugaucaacaaggccgugaacgcccugaucaacgaccagcucaucaugaagaaccaccuccgcgacaucauggggauccccuacugcaacuacuccaaguacugguaccugaaccacacgaccaccggcaagaccagccugcccaagugcuggcuggucuccaacggcagcuaccugaacgagacgcacuucuccgacgacaucgagcagcaggccgacaacaugaucaccgagaugcuccagaaggaguacauggagcggcaggggaagacgccccugggccugguggaccucuucguguucagcaccuccuucuaccugaucagcaucuuccugcaccuggucaagaucccgacccaccgccacaucguggggaaguccugccccaagccccaccggcucaaccacaugggcaucugcagcugcgggcuguacaagcagcccggcgugccgguccgcuggaagcggugaggacuagucccuguucccagagcccacuuuuuuuucuuuuuuugaaauaaaauagccugucuuucagaucuaaaaaaaaaaaaaaaaaaaaaaaaaaaaaaaaaaaaaaaaaaaaaaaaaaaaaaaaaaaaaaaaaaaaaaaaaaaaaaaaaaaaaaaaaaaaaaaaaaaa

SEQ ID NO: 23779 - RNA, 1743 nt, Artificial Sequence
  mRNA product Design a-2 (A100) comprising derived and/or modified sequence from LASV(Mad39;Clade IV)__ANH09722__GPCmut2 (opt1)
aggagaguccgcucagccagguugcagaagcggcuuagcguguguccuaaucuucucucugcguguagguaggccugugccgcaaacaagcuuaccaugggccagaucgugaccuucuuccaggaggucccccacgugaucgaggaggugaugaacaucguccugaucgcccucagcauccuggccgugcugaaggggcucuacaacguggcgaccugcggccugaucgggcuggucacguuccuccugcugugcggccgcuccugcaccaccacccucuacaaggggguguacgagcugcaggcccuggagcucaacauggagacgcugaacaugugcaugccgcugagcugcaccaagaacaacucccaccacuacauccgggugggcaacgagaccggccucgagcugacgcugaccaacaccagccucaucaaccacaaguucugcaaccuguccgacgcccacaagaagaaccuguacgaccacgcccucaugagcaucaucuccaccuuccaccugagcauccccaacuucaaccaguacgaggccauguccugcgacuucaacgacgggaagaucagcguccaguacaaccugucccacacguacgcgggcgacaccgccaaccacugcgggaccguggccaacggcgugcuccagaccuucaugcgcauggccuggggcgggagcuacaucgcgcuggacuccggccgcgggggcugggacugcaucaugacgagcuaccaguaccugaucauccagaacaccaccugggaggaccacugccaguucucccggcccagccccaucggguaccucggccugcugucccagcggacccgcgacaucuacaucagccggcgccgccggggcacguucaccuggacccuguccgacagcgaggggaaggacaccccgggcggguacugccucacgcgguggaugcugaucgaggccgagcugaagugcuucggcaacaccgccgucgccaagugcaacgagaagcacgacgaggaguucugcgacaugcuccgccuguucgacuucugcaagcaggccauccagcggcugaaggcgcccgcccagaugagcauccagcucaucaacaaggccgugaacgcccugaucaacgaccagcugaucaugaagaaccaccuccgcgacaucauggggauccccuacugcaacuacuccaaguacugguaccugaaccacaccgugaccggcaagacgagccugcccaagugcuggcucgucuccaacggcagcuaccugaacgagacccacuucuccgacgacaucgagcagcaggccgacaacaugaucaccgagaugcugcagaaggaguacauggagcggcaggggaagacgccccucggccugguggaccuguucguguucagcaccuccuucuaccugaucagcaucuuccuccaccuggucaagaucccgacccaccgccacgugguggggaagcccugccccaagccccaccggcugaaccacaugggcaucugcuccugcggguucuacaagcagccgggcguccccgugcgcuggaagcggugaggacuagucccuguucccagagcccacuuuuuuuucuuuuuuugaaauaaaauagccugucuuucagaucuaaaaaaaaaaaaaaaaaaaaaaaaaaaaaaaaaaaaaaaaaaaaaaaaaaaaaaaaaaaaaaaaaaaaaaaaaaaaaaaaaaaaaaaaaaaaaaaaaaaa

SEQ ID NO: 23780 - RNA, 1743 nt, Artificial Sequence
  mRNA product Design a-2 (A100) comprising derived and/or modified sequence from LASV(Z0947-SLE-2011;Clade IV)__AIT17840__GPCmut2 (opt1)
aggagaguccgcucagccagguugcagaagcggcuuagcguguguccuaaucuucucucugcguguagguaggccugugccgcaaacaagcuuaccaugggccagaucgugaccuucuuccaggaggucccccacgugaucgaggaggugaugaacaucguccugaucgcccucagcauccuggccgugcugaaggggcucuacaacuucgcgaccugcggccugguggggcuggucacguuccuccugcugugcggccgcuccugcaccaucagccucuacaaggggguguacgagcugcagacccuggagcucaacauggagacccugaacaugugcaugccgcuguccugcaccaagaacaacagccaccacuacaucauggugggcaacgagaccggccucgagcugacccugacgaacaccuccaucaucaaccacaaguucugcaaccucagcgacgcccacaagaagaaccuguacgaccacgcccugauguccaucaucagcaccuuccaccucuccauccccaacuucaaccaguacgaggccaugagcugcgacuucaacgggggcaagaucuccguccaguacaaccugagccacuccuacgccggggacgcggccaaccacugcggcaccguggccaacggggugcugcagacguucaugcggauggccuggggcggcagcuacaucgcgcucgacuccgggcgcgaccggugggacugcaucaugaccagcuaccaguaccugaucauccagaacaccaccugggaggaccacugccaguucucccgccccagccccaucggcuaccuggggcuccugucccagcggacgcgcgacaucuacaucagccggcgccgccggggcaccuucaccuggacccugagcgacuccgagggcaaggacacgcccgggggcuacugccugacccgguggaugcucaucgaggccgagcugaagugcuucgggaacaccgccgucgccaagugcaacgagaagcacgacgaggaguucugcgacaugcugcgccucuucgacuucugcaagcaggccauccagcggcugaaggcgcccgcccagaugagcauccagcugaucaacaaggccgugaacgcccucaucaacgaccagcugaucaugaagaaccaccuccgcgacaucaugggcauccccuacugcaacuacuccaaguacugguaccugaaccacaccacgaccgggaagaccagccugcccaagugcuggcugguguccaacggcagcuaccucaacgagacccacuucuccgacgacaucgagcagcaggccgacaacaugaucacggagaugcugcagaaggaguacauggagcggcagggcaagaccccgcuggggcucgucgaccuguucguguucagcaccuccuucuaccugaucagcaucuuccugcaccucgugaagaucccgacccaccgccacaucgucggcaagcccugccccaagccccaccggcugaaccacauggggaucugcuccugcggccuguacaagcagccgggggugcccgugaaguggaagcgcugaggacuagucccuguucccagagcccacuuuuuuuucuuuuuuugaaauaaaauagccugucuuucagaucuaaaaaaaaaaaaaaaaaaaaaaaaaaaaaaaaaaaaaaaaaaaaaaaaaaaaaaaaaaaaaaaaaaaaaaaaaaaaaaaaaaaaaaaaaaaaaaaaaaaa

SEQ ID NO: 23781 - RNA, 1743 nt, Artificial Sequence
  mRNA product Design a-2 (A100) comprising derived and/or modified sequence from LASV(Josiah;Clade IV)__NP_694870__GPCmut2 (opt1)
aggagaguccgcucagccagguugcagaagcggcuuagcguguguccuaaucuucucucugcguguagguaggccugugccgcaaacaagcuuaccaugggccagaucgugaccuucuuccaggaggucccccacgugaucgaggaggugaugaacaucguccugaucgcccucagcgugcuggccgugcugaaggggcucuacaacuucgcgaccugcggccuggucgggcuggugacguuccuccugcugugcggccgcuccugcaccaccagccucuacaaggggguguacgagcugcagacccuggagcucaacauggagacgcugaacaugugcaugccgcuguccugcaccaagaacaacagccaccacuacaucauggucggcaacgagaccggccucgagcugacccugacgaacaccuccaucaucaaccacaaguucugcaaccucagcgacgcccacaagaagaaccuguacgaccacgcccugauguccaucaucagcaccuuccaccucuccauccccaacuucaaccaguacgaggccaugagcugcgacuucaacgggggcaagaucuccgugcaguacaaccugagccacuccuacgccggggacgcggccaaccacugcggcaccguggccaacgggguccugcagacguucaugcggauggccuggggcggcagcuacaucgcgcucgacuccgggcgcggcaacugggacugcaucaugaccagcuaccaguaccugaucauccagaacaccaccugggaggaccacugccaguucucccggcccagccccaucggguaccugggccuccugucccagcgcacgcgggacaucuacaucagccgccggcgccggggcaccuucaccuggacccugagcgacuccgaggggaaggacacgccgggcggguacugccucacccgcuggaugcugaucgaggccgagcugaagugcuucggcaacaccgccguggccaagugcaacgagaagcacgacgaggaguucugcgacaugcuccggcuguucgacuucugcaagcaggccauccagcgccugaaggcgcccgcccagaugagcauccagcucaucaacaaggccgugaacgcccugaucaacgaccagcugaucaugaagaaccaccuccgggacaucauggggauccccuacugcaacuacuccaaguacugguaccugaaccacaccacgaccggccgcaccagccugcccaagugcuggcucgucuccaacggcagcuaccugaacgagacccacuucuccgacgacaucgagcagcaggccgacaacaugaucacggagaugcugcagaaggaguacauggagcggcaggggaagaccccgcucggccugguggaccuguucguguucagcaccuccuucuaccugaucagcaucuuccuccaccuggucaagauccccacccaccgccacaucguggggaaguccugccccaagccccaccggcugaaccacaugggcaucugcagcugcgggcucuacaagcagccgggcgugcccgucaaguggaagcgcugaggacuagucccuguucccagagcccacuuuuuuuucuuuuuuugaaauaaaauagccugucuuucagaucuaaaaaaaaaaaaaaaaaaaaaaaaaaaaaaaaaaaaaaaaaaaaaaaaaaaaaaaaaaaaaaaaaaaaaaaaaaaaaaaaaaaaaaaaaaaaaaaaaaaa

SEQ ID NO: 23782 - RNA, 1740 nt, Artificial Sequence
  mRNA product Design a-2 (A100) comprising derived and/or modified sequence from LASV(LP;Clade I)__AAF86701__GPCmut2 (opt1)
aggagaguccgcucagccagguugcagaagcggcuuagcguguguccuaaucuucucucugcguguagguaggccugugccgcaaacaagcuuaccaugggccagaucaucaccuucuuccaggaggugccccacgucaucgaggaggugaugaacaucgugcugaucgcccucagccugcuggccauccucaaggggcuguacaacaucgcgaccugcggcaucaucgggcuggucgccuuccucuuccugugcggcaaguccugcagccugacgcucaagggcggguacgagcugcagacccuggagcucaacauggagacccugaacaugugcaugccgcuguccugcaccaagaacagcucccaccacuacauccgcgugggcaacgagacggggcucgagcugacccugaccaacaccagcaucaucaaccacaaguucugcaaccucuccgacgcccacaagaagaaccuguacgaccacgcccugaugagcaucaucuccacguuccaccucagcauccccaacuucaaccaguacgaggccauguccugcgacuucaacggcgggaagaucagcgugcaguacaaccugucccacagcuacgcgggcgacgccgccgagcacugcgggaccgucgccaacggcgugcugcagaccuucaugcggauggcguggggcgggcgcuacaucgcccucgacuccggcaaggggaacugggacugcaucaugaccagcuaccaguaccugaucauccagaacacgaccugggaggaccacugccaguucucccggcccagccccaucggcuaccugggccuccugucccagcgcacccgggacaucuacaucagccgccggcgccgggggaccuucacguggacccugagcgacuccgagggcaacgagacccccgggggcuacugccucacccgcuggaugcugaucgaggccgagcugaagugcuucgggaacacggccguggccaagugcaacgagaagcacgacgaggaguucugcgacaugcuccggcuguucgacuucugcaagcaggcgauccgccggcugaaggccccggcccagaugagcauccagcucaucaacaaggccgucaacgcccugaucaacgaccagcugaucaugaagaaccaccuccgcgacaucaugggcauccccuacugcaacuacuccaaguacugguaccugaaccacaccagcuccggccggaccagccugcccaagugcuggcucaucuccaacgggagcuaccugaacgagacccaguucuccgacgacaucgagcagcaggcggacaacaugaucacggagaugcugcagaaggaguacaucgagcgccagggcaagaccccgcucgggcugguggacaucuucaucuucagcaccuccuucuaccugaucagcaucuuccugcaccucaucaagauccccacccaccggcacaucgugggcaagcccugccccaagccgcaccgccugaaccacaugggggucugcuccugcggccuguacaagcaccccggcgugcccacgaaguggaagcggugaggacuagucccuguucccagagcccacuuuuuuuucuuuuuuugaaauaaaauagccugucuuucagaucuaaaaaaaaaaaaaaaaaaaaaaaaaaaaaaaaaaaaaaaaaaaaaaaaaaaaaaaaaaaaaaaaaaaaaaaaaaaaaaaaaaaaaaaaaaaaaaaaaaaa

SEQ ID NO: 23783 - RNA, 1740 nt, Artificial Sequence
  mRNA product Design a-2 (A100) comprising derived and/or modified sequence from LASV(803213;Clade II)__AAF86703__GPCmut2 (opt1)
aggagaguccgcucagccagguugcagaagcggcuuagcguguguccuaaucuucucucugcguguagguaggccugugccgcaaacaagcuuaccaugggccagaucaucaccuucuuccaggaggugccccacgucaucgaggaggugaugaacaucgugcugaucgcccucagccugcuggccauccucaaggggaucuacaacgucgcgaccugcggccuguucgggcugaucuccuuccuccugcugugcggccgcagcugcuccgugacguacaaggggguguacgagcuccagacccuggagcugaacauggccaaccucaacaugugcaugccgcugagcugcaccaagaacaacucccaccacuacaucauggucggcaacgagaccggccuggagcucacgcugaccaacaccagcaucaucaaccacaaguucugcaaccuguccgacgcccacaagaagaaccucuacgaccacgcccugaugagcaucaucuccaccuuccaccugagcauccccaacuucaaccaguacgaggccauguccugcgacuucaacgggggcaagaucagcgugcaguacaaccucucccacagcuucgcgguggacgccgccaaccacugcgggacgaucgccaacggcguccugcagaccuucaugcggauggcguggggcggguccuacaucgcccuggacagcggcaaggggaacugggacugcaucaugaccuccuaccaguaccucaucauccagaacaccacgugggaggaccacugccaguucagccgccccucccccaucggcuaccuggggcugcucagccagcggacccgcgacaucuacaucagccggcgccggcgcggcaccuucaccuggacgcuguccgacagcgagggcaacgaggcccccgggggcuacugccugacccgguggaugcucaucgaggccgagcugaagugcuucgggaacaccgccguggcgaagugcaacgagaagcacgacgaggaguucugcgacaugcugcgccucuucgacuucugcaagcaggccaucaagcggcugaagaccccggcccagauguccauccagcugaucaacaaggccgugaacgcccucaucaacgaccagcugaucaugaagaaccaccuccgcgacaucaugggcauccccuacugcaacuacagccgguacugguaccugaaccacacggucaccgggaagaccucccugccccgcugcuggcuggugagcaacggcuccuaccucaacgagacccacuucagcgacgacaucgagcagcaggcggacaacaugaucacggagaugcugcagaaggaguacauggaccggcagggcaagaccccgcuggggcucguggaccuguucgucuucuccaccagcuucuaccugaucuccaucuuccugcaccucgugaagauccccacccaccgccacaucgugggcaagcccugccccaagccgcaccggcugaaccacauggggaucugcagcugcggccuguacaagcaccccgggguccccgugaaguggaagcgcugaggacuagucccuguucccagagcccacuuuuuuuucuuuuuuugaaauaaaauagccugucuuucagaucuaaaaaaaaaaaaaaaaaaaaaaaaaaaaaaaaaaaaaaaaaaaaaaaaaaaaaaaaaaaaaaaaaaaaaaaaaaaaaaaaaaaaaaaaaaaaaaaaaaaa

SEQ ID NO: 23784 - RNA, 1740 nt, Artificial Sequence
  mRNA product Design a-2 (A100) comprising derived and/or modified sequence from LASV(GA391;Clade III)__CAA36645__GPCmut2 (opt1)
aggagaguccgcucagccagguugcagaagcggcuuagcguguguccuaaucuucucucugcguguagguaggccugugccgcaaacaagcuuaccaugggccagaucgugaccuucuuccaggaggucccccacgugaucgaggaggugaugaacaucguccugaucgcccucagcauccuggccauccugaaggggcucuacaacguggcgaccugcggccugaucgggcuggugacguuccuccugcuguccggccgcagcugcucccucaucuacaaggggaccuacgagcugcagacccuggagcucaacauggagacccugaacaugugcaugccgcugagcugcacgaagaacaacucccaccacuacauccgggucggcaacgagaccggccucgagcugacccugaccaacacgagcauccucaaccacaaguucugcaaccuguccgacgcccacaagcgcaaccuguacgaccacagccucauguccaucaucagcaccuuccaccuguccauccccaacuucaaccaguacgaggccaugagcugcgacuucaacgggggcaagaucaccgugcaguacaaccugucccacagcuucgccguggacgccgcggggcacugcggcacccucgccaacgggguccugcagacguucaugcggauggccuggggcggcuccuacaucgcccuggacagcgggcgcggcaacugggacugcaucaugaccuccuaccaguaccucaucauccagaacaccaccugggacgaccacugccaguucagccggcccucccccaucggguaccugggccugcucagccagcgcacgcgggacaucuacaucagccgccggcgccggggcaccuucaccuggacccuguccgacagcgaggggaacgagacgccgggcggguacugccugacccgcuggaugcucaucgaggcggagcugaagugcuucggcaacaccgccguggccaagugcaacgagaagcacgacgaggaguucugcgacaugcugcggcuguucgacuucugcaagcaggccauccgccggcugaagacccccgcccagauguccauccagcugaucaacaaggcggugaacgcccucaucaacgaccagcugaucaugaagaaccaccuccgcgacaucauggggauccccuacugcaacuacagccgguacugguaccucaaccacacguccaccggcaagaccagccugccccgcugcuggcugaucuccaacggcagcuaccucaacgagaccaaguucuccgacgacaucgagcagcaggccgacaacaugaucacggagaugcugcagaaggaguacaucgaccggcaggggaagaccccgcugggccuggucgaccucuucguguucagcaccuccuucuaccugaucagcaucuuccugcaccucgugaagauccccacccaccgccacaucgucgggaagcccugccccaagccgcaccggcugaaccacaugggcaucugcuccugcgggcuguacaagcagcccggcgugcccgugcgcuggaagcgcugaggacuagucccuguucccagagcccacuuuuuuuucuuuuuuugaaauaaaauagccugucuuucagaucuaaaaaaaaaaaaaaaaaaaaaaaaaaaaaaaaaaaaaaaaaaaaaaaaaaaaaaaaaaaaaaaaaaaaaaaaaaaaaaaaaaaaaaaaaaaaaaaaaaaa

SEQ ID NO: 23785 - RNA, 1743 nt, Artificial Sequence
  mRNA product Design a-2 (A100) comprising derived and/or modified sequence from LASV(AV;Clade V)__CCA30314__GPCmut2 (opt1)
aggagaguccgcucagccagguugcagaagcggcuuagcguguguccuaaucuucucucugcguguagguaggccugugccgcaaacaagcuuaccaugggccagaucgugaccuucuuccaggaggucccccacgugaucgaggaggugaugaacaucguccugaucgcccucagcauccuggccgugcugaaggggcucuacaacaucgcgaccugcggccugaucgggcugaucacguuccuccugcugugcggccgcuccugcagcuccaaccucuacaaggggguguacgagcugcagagccuggaccucaacauggagacccugaacaugugcaugccgcuguccugcaccaagaacaacagccaccacuacauccgggucggcaacgacaccggccucgagcugacgcugaccaacaccuccauccucaaccacaaguucugcaaccugagcgacgcccacaagaaggaccuguacgaccacgcccucauguccaucaucagcaccuuccaccuguccauccccaacuucaaccaguacgaggccaugagcugcgacuucaacgggggcaagaucuccgugcaguacaaccugagccacuccuacgccaucgacgcggccaaccacugcgggacgguggccaacggcauccuccagaccuucaugcgcauggccuggggcgggagcuacaucgcgcuggacuccggccgggggaacugggacugcaucaugaccagcuaccaguaccugaucauccagaacaccacgugggagaaccacugccaguucucccgccccagccccaucggcuaccucgggcugcugagccagcggacccgcgacaucuacaucucccggcgccggcgcggcaccuucaccuggacgcucagcgacuccgagggcaacgccacccccgggggcuacugccugacccgguggaugcugaucgaggccgagcucaagugcuucgggaacaccgccgucgccaagugcaacgagaagcacgacgaggaguucugcgacaugcugcgccuguucgacuucugcaagcaggcgaucagccggcucaaguccccggcccagaugagcauccagcugaucaacaaggccgugaacgcccugaucaacgaccagcucaucaugaagaaccaccuccgcgacaucaugggcauccccuacugcaacuacuccaaguacugguaccugaaccacacgaucaccgggaagaccagccugcccaagugcuggcugguguccaacggcagcuaccugaacgagacccacuucuccgacgacaucgagcagcaggccgacaacaugaucacggagaugcuccagaaggaguacauggagcggcagggcaagaccccgcuggggcuggucgaccuguucguguucagcaccuccuucuaccucaucagcaucuuccugcgccuggugaagauccccacccaccggcacaucgucggcaagcccugccccaagccgcaccgccucaaccacauggggaucugcuccugcggccuguacaagcagcccggggugcccgugcgguggaagcgcugaggacuagucccuguucccagagcccacuuuuuuuucuuuuuuugaaauaaaauagccugucuuucagaucuaaaaaaaaaaaaaaaaaaaaaaaaaaaaaaaaaaaaaaaaaaaaaaaaaaaaaaaaaaaaaaaaaaaaaaaaaaaaaaaaaaaaaaaaaaaaaaaaaaaa

SEQ ID NO: 23786 - RNA, 1740 nt, Artificial Sequence
  mRNA product Design a-2 (A100) comprising derived and/or modified sequence from LASV(Togo/2016/7082;Clade VI)__AMR44577__GPCmut2 (opt1)
aggagaguccgcucagccagguugcagaagcggcuuagcguguguccuaaucuucucucugcguguagguaggccugugccgcaaacaagcuuaccaugggccagaucaucaccuucuuccaggaggugccccacgucaucgaggaggugaugaacaucgugcugaucgcccucagccugcuggccauccucaagggggucuacaacguggcgaccugcggcaucaucgggcuggugacguuccuguuccucugcggccgcuccugcagccugaucuacaagggguccuacgagcugcagacccucgagcugaacauggagacccugaacaugugcaugccgcucagcugcaccaagaacuccagccaccacuacauccgggucggcaacgagacgggccuggagcugacccucaccaacaccuccaucaucaaccacaaguucugcaaccugagcgacgcccacaagcgcaaccuguacgaccacgcccucauguccauccugagcacguuccaccuguccauccccaacuucaaccaguacgaggccaugagcugcgacuucaacgggggcaagaucuccgugcaguacaaccucagccacgccuacgcgguggacgccgccgagcacugcgggaccgucgccaacggcgugcugcagaccuucaugcggauggcguggggcggguccuacaucgcccuggacagcggccgcgggaacugggacugcaucaugaccuccuaccaguaccucaucauccagaacacgaccugggaggaccacugccaguucagccggcccucccccaucggcuaccuggggcugcucagccagcgcacccgggacaucuacaucagccgccggcgccggggcaccuucacguggacccuguccgacagcgagggcaacgagacccccgggggcuacugccugacccgcuggaugcucaucgaggccgagcugaagugcuucgggaacacggccguggccaagugcaacgagaagcacgacgaggaguucugcgacaugcugcggcuguucgacuucugcaagcaggcgauccagcgccugaaguccccggcccagaugagcauccagcugaucaacaaggccgucaacgcccucaucaacgaccagcugaucaugaagaaccaccuccgggacaugaugggcauccccuacugcaacuacuccaaguacugguaccucaaccacaccagcuccgggcgcaccagccugcccaagugcuggcugguguccaacggcagcuaccucaacgagacccacuucuccgacgacaucgagcagcaggccgacaacaugaucacggagaugcugcagaaggaguacaucgaccggcagggcaagaccccgcuggggcucguggaccuguucgucuucagcaccuccuucuaccugaucagcaucuuccugcaccucaucaagauccccacccaccgccacaucgugggcaagcccugccccaagccgcaccggcugaaccacauggggaucugcuccugcggccuguacaagcagcccggggugcccacgcgcuggaagcggugaggacuagucccuguucccagagcccacuuuuuuuucuuuuuuugaaauaaaauagccugucuuucagaucuaaaaaaaaaaaaaaaaaaaaaaaaaaaaaaaaaaaaaaaaaaaaaaaaaaaaaaaaaaaaaaaaaaaaaaaaaaaaaaaaaaaaaaaaaaaaaaaaaaaa

SEQ ID NO: 23787 - RNA, 1740 nt, Artificial Sequence
  mRNA product Design a-2 (A100) comprising derived and/or modified sequence from LASV(KAK-428;Clade n.d. (VII))__ANH09740__GPCmut2 (opt1)
aggagaguccgcucagccagguugcagaagcggcuuagcguguguccuaaucuucucucugcguguagguaggccugugccgcaaacaagcuuaccaugggccagaucgugaccuucuuccaggaggucccccacgugaucgaggaggugaugaacaucguccugaucgcccucagccugcuggccauccucaaggggcuguacaacuucgcgaccugcggcgugaucgggcugaucacguuccuccugcugugcggccgcuccugcagcgccaccuacaaggggcaguacgagcuccagacccuggagcugaacauggagucccucaacaugugcaugccgcugagcugcaccaagaacaacucccaccacuacauccgggccggcaacaacacgggccuggagcucacccugaccaacaccagcaucaucucccacaaguucugcaaccugagcgacgcccacaagaagaaccucuacgaccacacgcugauguccaucaucaccaccuuccaccugagcauccccaacuucaaccaguacgaggccauguccugcgacuucaacgggggcaagaucagcauccaguacaaccucucccacagcuacgcgggggacgccgcccagcacugcggcaccguggccaacgggguccugcagacguucaugcgcauggcguggggcggcuccuaccuggcccucgacagcgggcggcgcggcugggacugcaucaucuccagcuaccaguaccugaucauccagaacaccaccugggacgaccacugccaguucucccggcccagccccaucggguaccugggcuucgugagccagaagacccgcgacaucuacaucucccggcgccggcgcggcacguucaccuggacccucagcgacuccgaggggcacgacaugccgggcggguacugccugacccgguggaugcugaucgaggccgaccucaagugcuucggcaacacggccguggccaagugcaacgagaagcacgacgaggaguucugcgacauguggcgccuguucgacuucugcaagcaggcgauccagcggcugaaggcccccgcccagaugaacauccagcucaucaacaaggccgucaacgcccugaucaacgaccagcugaugaugaagaaccaccuccgcgacaucauggggauccccuacugcaacuacagcaaguucugguaccugaacaacaccaccaccggccggacgucccugccccgcugcuggcucaucagcaacggcuccuaccugaacgagacccacuucagcgacgacaucgagcagcaggcggacaacaugaucaccgagaugcugcagaaggaguacauggaccggcaggggaagaccccgcucggccugguggaccuguucguguucuccacgagcuucuaccucaucaccaucuuccugcaccuggucaagauccccacccaccgccacaucguggggaagcccugccccaagccgcaccggcugaaccacaugggcaucugcuccugcgggcucuacaagcagcccggcgugcccguccgcuggaagcggugaggacuagucccuguucccagagcccacuuuuuuuucuuuuuuugaaauaaaauagccugucuuucagaucuaaaaaaaaaaaaaaaaaaaaaaaaaaaaaaaaaaaaaaaaaaaaaaaaaaaaaaaaaaaaaaaaaaaaaaaaaaaaaaaaaaaaaaaaaaaaaaaaaaaa

SEQ ID NO: 23788 - RNA, 1740 nt, Artificial Sequence; identical to SEQ ID NO: 23782
  mRNA product Design a-2 (A100) comprising derived and/or modified sequence from LASV(Pinneo-NIG-1969;Clade I)__AIT17836__GPCmut2 (opt1)

SEQ ID NO: 23789 - RNA, 1740 nt, Artificial Sequence
  mRNA product Design a-2 (A100) comprising derived and/or modified sequence from LASV(ISTH0009-NIG-2011;Clade II)__AIT17404__GPCmut2 (opt1)
aggagaguccgcucagccagguugcagaagcggcuuagcguguguccuaaucuucucucugcguguagguaggccugugccgcaaacaagcuuaccaugggccagaucaucaccuucuuccaggaggugccccacgucaucgaggaggugaugaacaucgugcugaucgcccucagccugcuggccauccucaaggggaucuacaacgucgcgaccugcggccuguucgggcugguguccuuccuccugcugugcggccgcagcugcuccacgaccuacaaggggguguacgagcuccagacccuggagcuggacauggccagccucaacaugugcaugccgcuguccugcaccaagaacaacagccaccacuacaucauggucggcaacgagacgggccuggagcucacccugaccaacaccuccaucaucaaccacaaguucugcaaccugagcgacgcccacaagaagaaccucuacgaccacgcccugauguccaucaucagcacguuccaccuguccauccccaacuucaaccaguacgaggccaugagcugcgacuucaacgggggcaagaucuccgugcaguacaaccucagccacgcguacgccguggacgccgccaaccacugcgggaccaucgcgaacggcguccugcagaccuucaugcggauggccuggggcggguccuacaucgcccuggacagcggcaagggguccugggacugcaucaugaccagcuaccaguaccucaucauccagaacacgaccugggaggaccacugccaguucucccgccccagccccaucggcuaccuggggcugcucagccagcggacccgcgacaucuacaucucccggcgccggcgcggcaccuucacguggacccugagcgacuccgagggcaacgagacccccgggggcuacugccugacccgguggaugcucaucgaggccgagcugaagugcuucgggaacacggccguggcgaagugcaacgagaagcacgacgaggaguucugcgacaugcugcgccucuucgacuucugcaagcaggccauccggcgccugaagaccccggcccagaugagcauccagcugaucaacaaggccgugaacgcccucaucaacgaccagcugaucaugaagaaccaccuccgggacaucaugggcauccccuacugcaacuacuccaaguacugguaccugaaccacaccgucaccgggaagacgagccugccccgcugcuggcugguguccaacggcagcuaccucaacgagacccacuucuccgacgacaucgagcagcaggcggacaacaugaucaccgagcugcugcagaaggaguacauggaccggcagggcaagaccccgcucgggcugguggaccuguucgucuucagcacguccuucuaccugaucagcaucuuccuccaccugaucaagauccccacccaccgccacaucaccggcaagcccugccccaagccgcaccggcugaaccacauggggaucugcuccugcggccucuacaagcaccccggggugcccgugaaguggaagcgcugaggacuagucccuguucccagagcccacuuuuuuuucuuuuuuugaaauaaaauagccugucuuucagaucuaaaaaaaaaaaaaaaaaaaaaaaaaaaaaaaaaaaaaaaaaaaaaaaaaaaaaaaaaaaaaaaaaaaaaaaaaaaaaaaaaaaaaaaaaaaaaaaaaaaa

SEQ ID NO: 23790 - RNA, 1740 nt, Artificial Sequence
  mRNA product Design a-2 (A100) comprising derived and/or modified sequence from LASV(ISTH2010-NIG-2012;Clade II)__AIT17482__GPCmut2 (opt1)
aggagaguccgcucagccagguugcagaagcggcuuagcguguguccuaaucuucucucugcguguagguaggccugugccgcaaacaagcuuaccaugggccagaucaucaccuucuuccaggaggugccccacgucaucgaggaggugaugaacaucgugcugaucgcccucagccugcuggccauccucaaggggaucuacaacgucgcgaccugcggccuguucgggcugguguccuuccuccugcugugcggccgcagcugcuccacgaccuacaaggggguguacgagcuccagacccuggagcuggacauggccagccucaacaugugcaugccgcuguccugcaccaagaacaacagccaccacuacaucauggucggcaacgagacgggccuggagcucacccugaccaacaccuccaucaucaaccacaaguucugcaaccugagcgacgcccacaagaagaaccucuacgaccacgcccugauguccaucaucagcacguuccaccuguccauccccaacuucaaccaguacgaggccaugagcugcgacuucaacgggggcaagaucuccgugcaguacaaccucagccacgcguacgccguggacgccgccaaccacugcgggaccaucgcgaacggcguccugcagaccuucaugcggauggccuggggcggguccuacaucgcccuggacagcggcaagggguccugggacugcaucaugaccagcuaccaguaccucaucauccagaacaucacgugggaggaccacugccaguucucccgccccagccccaucggcuaccuggggcugcucagccagcggacccgcgacaucuacaucucccggcgccggcgcggcaccuucaccuggacgcugagcgacuccgagggcaacgagacccccgggggcuacugccugacccgguggaugcucaucgaggccgagcugaagugcuucgggaacaccgccguggcgaagugcaacgagaagcacgacgaggaguucugcgacaugcugcgccucuucgacuucugcaagcaggccauccggcgccugaagacgccggcccagaugagcauccagcugaucaacaaggccgugaacgcccucaucaacgaccagcugaucaugaagaaccaccuccgggacaucaugggcauccccuacugcaacuacuccaaguacugguaccugaaccacaccgucaccgggaagaccagccugccccgcugcuggcugguguccaacggcagcuaccucaacgagacgcacuucuccgacgacaucgagcagcaggcggacaacaugaucaccgagcugcugcagaaggaguacaucgaccggcagggcaagaccccgcucgggcugguggaccuguucgucuucagcaccuccuucuaccugaucagcaucuuccuccaccuggugaagauccccacgcaccgccacguggucggcaagcccugccccaagccgcaccggcugaaccacauggggaucugcuccugcggccucuacaagcaccccggggugcccgugaaguggaagcgcugaggacuagucccuguucccagagcccacuuuuuuuucuuuuuuugaaauaaaauagccugucuuucagaucuaaaaaaaaaaaaaaaaaaaaaaaaaaaaaaaaaaaaaaaaaaaaaaaaaaaaaaaaaaaaaaaaaaaaaaaaaaaaaaaaaaaaaaaaaaaaaaaaaaaa

SEQ ID NO: 23791 - RNA, 1740 nt, Artificial Sequence
  mRNA product Design a-2 (A100) comprising derived and/or modified sequence from LASV(Lassa virus/H.sapiens-wt/NGA/2015/ISTH_0543;Clade II)__AVO03639__GPCmut2 (opt1)
aggagaguccgcucagccagguugcagaagcggcuuagcguguguccuaaucuucucucugcguguagguaggccugugccgcaaacaagcuuaccaugggccagaucaucaccuucuuccaggaggugccccacgucaucgaggaggugaugaacaucgugcugaucgcccucagccugcuggccauccucaaggggaucuacaacgucgcgaccugcggccuguucgggcugguguccuuccuccugcugugcggccgcagcugcuccacgaccuacaaggggguguacgagcuccagacccuggagcuggacauggccaaccucaacaugugcaugccgcugagcugcaccaagaacaacucccaccacuacaucauggucggcaacgagacgggccuggagcucacccugaccaacaccagcaucaucaaccacaaguucugcaaccuguccgacgcccacaagaagaaccucuacgaccacgcccugaugagcaucaucuccacguuccaccugagcauccccaacuucaaccaguacgaggccauguccugcgacuucaacgggggcaagaucagcgugcaguacaaccucucccacaccuacgcgguggacgccgccaaccacugcgggaccaucgccaacggcguccugcagaccuucaugcggauggcguggggcgggagcuacaucgcccuggacuccggcaaggggagcugggacugcaucaugacguccuaccaguaccucgugauccagaacaccaccugggaggaccacugccaguucagccgccccucccccaucggcuaccuggggcugcucagccagcggacccgcgacaucuacaucagccggcgccggcgcggcacguucaccuggacccuguccgacagcgagggcaacgagacccccgggggcuacugccugacgcgguggaugcucaucgaggccgagcugaagugcuucgggaacaccgccguggccaagugcaacgagaagcacgacgaggaguucugcgacaugcugcgccucuucgacuucugcaagcaggcgauccggcgccugaagaccccggcccagauguccauccagcugaucaacaaggccgucaacgcccucaucaacgaccagcugaucaugaagaaccaccuccgggacaucaugggcauccccuacugcaacuacagcaaguacugguaccugaaccacaccgugacggggaagaccucccugccccgcugcuggcuggugagcaacggcuccuaccucaacgagacccacuucagcgacgacaucgagcagcaggccgacaacaugaucaccgagcugcugcagaaggaguacaucgaccggcagggcaagacgccgcucgggcuggucgaccuguucguguucuccaccagcuucuaccugaucuccaucuuccuccaccuggugaagauccccacccaccgccacaucaccggcaagcccugccccaagccgcaccggcugaaccacauggggaucugcagcugcggccucuacaagcaccccgggguccccgugaaguggaagcgcugaggacuagucccuguucccagagcccacuuuuuuuucuuuuuuugaaauaaaauagccugucuuucagaucuaaaaaaaaaaaaaaaaaaaaaaaaaaaaaaaaaaaaaaaaaaaaaaaaaaaaaaaaaaaaaaaaaaaaaaaaaaaaaaaaaaaaaaaaaaaaaaaaaaaa

SEQ ID NO: 23792 - RNA, 1740 nt, Artificial Sequence
  mRNA product Design a-2 (A100) comprising derived and/or modified sequence from LASV(Lassa virus/H.sapiens-wt/NGA/2016/ISTH_0009;Clade II)__AVO03571__GPCmut2 (opt1)
aggagaguccgcucagccagguugcagaagcggcuuagcguguguccuaaucuucucucugcguguagguaggccugugccgcaaacaagcuuaccaugggccagaucaucaccuucuuccaggaggugccccacgucaucgaggaggugaugaacaucgugcugaucgcccucagccugcuggccauccucaaggggaucuacaacgucgcgaccugcggccugcuggggcucguguccuuccugcugcucugcggccgcagcugcuccacgaccuacaaggggguguacgagcugcagacccuggagcucgacauggccagccugaacaugugcaugccgcuguccugcaccaagaacaacagccaccacuacaucauggucggcaacgagacgggccucgagcugacccugaccaacaccuccaucaucaaccacaaguucugcaaccucagcgacgcccacaagaagaaccuguacgaccacgcccugauguccaucaucagcacguuccaccucuccauccccaacuucaaccaguacgaggccaugagcugcgacuucaacgggggccggaucuccgugcaguacaaccugagccacuccuacgcgguggacgccgccaaccacugcgggaccaucgccaacggcguccugcagaccuucaugcgcauggcguggggcgggagcuacaucgcccucgacuccggcaaggggagcugggacugcaucaugaccuccuaccaguaccugaucauccagaacacgaccugggaggaccacugccaguucagccggcccagccccaucggcuaccuggggcuccugucccagcgcacccgggacaucuacaucagccgccggcgccggggcaccuucacguggacccuguccgacagcgagggcaacgagacccccgggggcuacugccucacccgcuggaugcugaucgaggccgagcugaagugcuucgggaacacggccguggccaagugcaacgagaagcacgacgaggaguucugcgacaugcuccggcuguucgacuucugcaagcaggcgauccgccggcugaagaccccggcccagauguccauccagcucaucaacaaggccgugaacgcccugaucaacgaccagcugaucaugaagaaccaccuccgcgacaucaugggcauccccuacugcaacuacagcaaguacugguaccugaaccacaccgucaccgggaagacgucccugccccggugcuggcucgugagcaacggcuccuaccugaacgagacccacuucagcgacgacaucgagcagcaggccgacaacaugaucaccgagcugcuccagaaggaguacaucgaccgccagggcaagaccccgcuggggcugguggaccuguucgucuucuccacgagcuucuaccucaucuccaucuuccugcaccuggugaagauccccacccaccggcacaucaccggcaagcccugccccaagccgcaccgccucaaccacauggggaucugcagcugcggccuguacaaccaccccggggugcccgucaaguggaagcggugaggacuagucccuguucccagagcccacuuuuuuuucuuuuuuugaaauaaaauagccugucuuucagaucuaaaaaaaaaaaaaaaaaaaaaaaaaaaaaaaaaaaaaaaaaaaaaaaaaaaaaaaaaaaaaaaaaaaaaaaaaaaaaaaaaaaaaaaaaaaaaaaaaaaa

SEQ ID NO: 23793 - RNA, 1740 nt, Artificial Sequence
  mRNA product Design a-2 (A100) comprising derived and/or modified sequence from LASV(Lassa virus/H.sapiens-wt/NGA/2016/ISTH_0017;Clade II)__AVO03567__GPCmut2 (opt1)
aggagaguccgcucagccagguugcagaagcggcuuagcguguguccuaaucuucucucugcguguagguaggccugugccgcaaacaagcuuaccaugggccagaucaucaccuucuuccaggaggugccccacgucaucgaggaggugaugaacaucgugcugaucgcccucagccugcuggccauccucaaggggaucuacaacgucgcgaccugcggccuguucgggcugguguccuuccuccugcugugcggccgcagcugcuccacgaccuacaaggggguguacgagcuccagacccuggagcuggacauggccagccucaacaugugcaugccgcuguccugcaccaagaacaacagccaccacuacaucauggucggcaacgagacgggccuggagcucacccugaccaacaccuccaucaucaaccacaaguucugcaaccugagcgacgcccacaagaagaaccucuacgaccacgcccugauguccaucaucagcacguuccaccuguccauccccaacuucaaccaguacgaggccaugagcugcgacuucaacgggggcaagaucuccgugcaguacaaccucagccacaccuacgcgaucgacgccgccaaccacugcgggaccaucgccaacggcgugcugcagaccuucaugcggauggcguggggcggguccuacaucgcccuggacagcggcaagggguccugggacugcaucaugacgagcuaccaguaccucaucauccagaacaccaccugggaggaccacugccaguucucccgccccagccccaucggcuaccuggggcugcucagccagcggacccgcgacaucuacaucucccggcgccggcgcggcacguucaccuggacccugagcgacuccgagggcaacgagacccccgggggcuacugccugacgcgguggaugcucaucgaggccgagcugaagugcuucgggaacaccgccgucgccaagugcaacgagaagcacgacgaggaguucugcgacaugcugcgccucuucgacuucugcaagcaggcgauccggcgccugaagaccccggcccagaugagcauccagcugaucaacaaggccgugaacgcccucaucaacgaccagcugaucaugaagaaccaccuccgggacaucaugggcauccccuacugcaacuacuccaaguacugguaccugaaccacaccgugacggggaagaccagccugccccgcugcuggcuggucuccaacggcagcuaccucaacgagacccacuucuccgacgacaucgagcagcaggccgacaacaugaucaccgagcugcugcagaaggaguacauggaccggcagggcaagacgccgcucgggcugguggaccuguucguguucagcaccuccuucuaccugaucagcaucuuccuccaccugguccgcauccccacccaccggcacgugaucggcaagcccugccccaagccgcaccgccugaaccacauggggaucugcuccugcggccucuacaagcaccccggggugcccgucaaguggaagcggugaggacuagucccuguucccagagcccacuuuuuuuucuuuuuuugaaauaaaauagccugucuuucagaucuaaaaaaaaaaaaaaaaaaaaaaaaaaaaaaaaaaaaaaaaaaaaaaaaaaaaaaaaaaaaaaaaaaaaaaaaaaaaaaaaaaaaaaaaaaaaaaaaaaaa

SEQ ID NO: 23794 - RNA, 1740 nt, Artificial Sequence
  mRNA product Design a-2 (A100) comprising derived and/or modified sequence from LASV(Lassa virus/H.sapiens-wt/NGA/2018/ISTH_0959;Clade II)__AVV65099__GPCmut2 (opt1)
aggagaguccgcucagccagguugcagaagcggcuuagcguguguccuaaucuucucucugcguguagguaggccugugccgcaaacaagcuuaccaugggccagaucaucaccuucuuccaggaggugccccacgucaucgaggaggugaugaacaucgugcugaucgcccucagccugcuggccauccucaaggggaucuacaacgucgugaccugcggccuguucgggcugguguccuuccuccugcugugcggccgcagcugcuccacgaccuacaagggggucuacgagcuccagacccuggagcuggacauggcgagccucaacaugugcaugccgcuguccugcaccaagaacaacagccaccacuacaucauggugggcaacgagacgggccuggagcucacccugaccaacaccuccaucaucaaccacaaguucugcaaccugagcgacgcccacaagaagaaccucuacgaccacgcccugauguccaucaucagcacguuccaccuguccauccccaacuucaaccaguacgaggccaugagcugcgacuucaacgggggcaagaucuccgugcaguacaaccucagccacgccuacgcgaucgacgccgccaaccacugcgggaccaucgccaacggcguccugcagaccuucaugcggauggcguggggcggguccuacaucgcccuggacagcggcaagggguccugggacugcaucaugaccagcuaccaguaccucaucauccagaacacgaccugggaggaccacugccaguucucccgccccagccccaucggcuaccuggggcugcucagccagcggacccgcgacaucuacaucucccggcgccggcgcggcaccuucacguggacccugagcgacuccgagggcaacgagacccccgggggcuacugccugacccgguggaugcucaucgaggccgagcugaagugcuucgggaacacggccguggccaagugcaacgagaagcacgacgaggaguucugcgacaugcugcgccucuucgacuucugcaagcaggcgauccggcgccugaagaccccggcccagaugagcauccagcugaucaacaaggccgugaacgcccucaucaacgaccagcugaucaugaagaaccaccuccgggacaucaugggcauccccuacugcaacuacuccaaguacugguaccugaaccacaccgucaccgggaagacgagccugccccgcugcuggcugguguccaacggcagcuaccucaacgagacccacuucuccgacgacaucgagcagcaggccgacaacaugaucaccgagcugcugcagaaggaguacaucgaccggcagggcaagaccccgcucgggcugguggaccuguucgucuucagcacguccuucuaccugaucagcaucuuccuccaccuggugaagauccccacccaccgccacgugaucggcaagcccugccccaagccgcaccggcugaaccacauggggaucugcuccugcggccucuacaagcaccccgggguccccgugaaguggaagcgcugaggacuagucccuguucccagagcccacuuuuuuuucuuuuuuugaaauaaaauagccugucuuucagaucuaaaaaaaaaaaaaaaaaaaaaaaaaaaaaaaaaaaaaaaaaaaaaaaaaaaaaaaaaaaaaaaaaaaaaaaaaaaaaaaaaaaaaaaaaaaaaaaaaaaa

SEQ ID NO: 23795 - RNA, 1740 nt, Artificial Sequence
  mRNA product Design a-2 (A100) comprising derived and/or modified sequence from LASV(LASV003-NIG-2008;Clade II)__AIT17580__GPCmut2 (opt1)
aggagaguccgcucagccagguugcagaagcggcuuagcguguguccuaaucuucucucugcguguagguaggccugugccgcaaacaagcuuaccaugggccagaucaucaccuucuuccaggaggugccccacgucaucgaggaggugaugaacaucgugcugaucgcccucagccugcuggccauccucaaggggaucuacaacgucgcgaccugcggccuguucgggcugguguccuuccuccugcugugcggccgcagcugcuccacgaccuacaaggggguguacgagcuccagacccuggagcuggacauggccagccucaacaugugcaugccgcuguccugcaccaagaacaacagccaccacuacaucauggucggcaacgagacgggccuggagcucacccugaccaacaccuccaucaucaaccacaaguucugcaaccugagcgacgcccacaagaagaaccucuacgaccacgcccugauguccaucaucagcacguuccaccuguccauccccaacuucaaccaguacgaggccaugagcugcgacuucaacgggggcaagaucuccgugcaguacaaccucagccacaccuacgcgguggacgccgccaaccacugcgggaccaucgccaacggcguccugcagaccuucaugcggauggcguggggcggguccuacaucgcccuggacagcggcaagggguccugggacugcaucaugacgagcuaccaguaccucaucauccagaacaccaccugggaggaccacugccaguucucccgccccagccccaucggcuaccuggggcugcucagccagcggacccgcgacaucuacaucucccggcgccggcgcggcacguucaccuggacccugagcgacuccgagagcaacgagaccccgggcggguacugccugacgcgguggaugcucaucgaggccgagcugaagugcuucggcaacaccgccguggccaagugcaacgagaagcacgacgaggaguucugcgacaugcugcgccucuucgacuucugcaagcaggcgauccggcgccugaaggcccccgcccagauguccauccagcugaucaacaaggccgugaacgcccucaucaacgaccagcugaucaugaagaaccaccuccgggacaucauggggauccccuacugcaacuacagcaaguacugguaccugaaccacaccgucaccggccgcacgucccugccccggugcuggcuggugagcaacggguccuaccucaacgagacccacuucagcgacgacaucgagcagcaggcggacaacaugaucaccgagcugcugcagaaggaguacauggaccgccagggcaagaccccgcucggccugguggaccuguucgucuucuccacgagcuucuaccugaucuccaucuuccuccaccuggugaagauccccacccaccggcacgugaucgggaagcccugccccaagccgcaccgccugaaccacaugggcaucugcagcugcgggcucuacaagcaccccggcguccccgugaaguggaagcggugaggacuagucccuguucccagagcccacuuuuuuuucuuuuuuugaaauaaaauagccugucuuucagaucuaaaaaaaaaaaaaaaaaaaaaaaaaaaaaaaaaaaaaaaaaaaaaaaaaaaaaaaaaaaaaaaaaaaaaaaaaaaaaaaaaaaaaaaaaaaaaaaaaaaa

SEQ ID NO: 23796 - RNA, 1740 nt, Artificial Sequence
  mRNA product Design a-2 (A100) comprising derived and/or modified sequence from LASV(LASV035-NIG-2009;Clade II)__AIT17588__GPCmut2 (opt1)
aggagaguccgcucagccagguugcagaagcggcuuagcguguguccuaaucuucucucugcguguagguaggccugugccgcaaacaagcuuaccaugggccagaucaucaccuucuuccaggaggugccccacgucaucgaggaggugaugaacaucgugcugaucgcccucagccugcuggccauccucaaggggaucuacaacgucgcgaccugcggccuguucgggcugguguccuuccuccugcugugcggccgcagcugcuccacgaccuacaaggggguguacgagcuccagacccuggagcuggacauggccagccucaacaugugcaugccgcuguccugcaccaagaacaacagccaccacuacaucauggucggcaacgagacgggccuggagcucacccugaccaacaccuccaucaucaaccacaaguucugcaaccugagcgacgcccacaagaagaaccucuacgaccacgcccugauguccaucaucagcacguuccaccuguccauccccaacuucaaccaguacgaggccaugagcugcgacuucaacgggggcaagaucuccgugcaguacaaccucagccacgcguacgccguggacgccgccaaccacugcgggaccaucgcgaacggcguccugcagaccuucaugcggauggccuggggcggguccuacaucgcccuggacagcggcaagggguccugggacugcaucaugaccagcuaccaguaccucaucauccagaacacgaccugggaggaccacugccaguucucccgccccagccccaucggcuaccuggggcugcucagccagcggacccgcgacaucuacaucucccggcgccggcgcggcaccuucacguggacccugagcgacuccgagggcaacgagacccccgggggcuacugccugacccgguggaugcucaucgaggccgagcugaagugcuucgggaacacggccguggcgaagugcaacgagaagcacgacgaggaguucugcgacaugcugcgccucuucgacuucugcaagcaggccauccggcgccugaaggccccggcccagaugagcauccagcugaucaacaaggccgugaacgcgcucaucaacgaccagcugaucaugaagaaccaccuccgggacaucaugggcauccccuacugcaacuacuccaaguacugguaccugaaccacaccgucaccgggaagaccagccugccccgcugcuggcugguguccaacggcagcuaccucaacgagacgcacuucuccgacgacaucgagcagcaggccgacaacaugaucaccgagcugcugcagaaggaguacaucgaccggcagggcaagaccccgcucgggcugguggaccuguucgucuucagcaccuccuucuaccugaucagcaucuuccuccaccuggugaagauccccacgcaccgccacgugaucggcaagcccugccccaagccgcaccggcugaaccacauggggaucugcuccugcggccucuacaagcaccccgggguccccgugaaguggaagcgcugaggacuagucccuguucccagagcccacuuuuuuuucuuuuuuugaaauaaaauagccugucuuucagaucuaaaaaaaaaaaaaaaaaaaaaaaaaaaaaaaaaaaaaaaaaaaaaaaaaaaaaaaaaaaaaaaaaaaaaaaaaaaaaaaaaaaaaaaaaaaaaaaaaaaa

SEQ ID NO: 23797 - RNA, 1740 nt, Artificial Sequence
  mRNA product Design a-2 (A100) comprising derived and/or modified sequence from LASV(LASV1000-NIG-2009;Clade II)__AIT17782__GPCmut2 (opt1)
aggagaguccgcucagccagguugcagaagcggcuuagcguguguccuaaucuucucucugcguguagguaggccugugccgcaaacaagcuuaccaugggccagaucaucaccuucuuccaggaggugccccacgucaucgaggaggugaugaacaucgugcugaucgcccucagccugcuggccauccucaaggggaucuacaacgucgcgaccugcggccuguucgggcugguguccuuccuccugcugugcggccgcagcugcuccacgaccuacaaggggguguacgagcuccagacccuggagcuggacauggccagccucaacaugugcaugccgcuguccugcaccaagaacaacagccaccacuacaucauggucggcaacgagacgggccuggagcucacccugaccaacaccuccaucaucaaccacaaguucugcaaccugagcgacgcccacaagaagaaccucuacgaccacgcccugauguccaucaucagcacguuccaccuguccauccccaacuucaaccaguacgaggccaugagcugcgacuucaacgggggcaagaucuccgugcaguacaaccucagccacaccuacgcgguggacgccgccaaccacugcgggaccaucgccaacggcguccugcagaccuucaugcggauggcguggggcggguccuacaucgcccuggacagcggcaagggguccugggacugcaucaugacgagcuaccaguaccucaucauccagaacaccaccugggaggaccacugccaguucucccgccccagccccaucggcuaccuggggcugcucagccagcggacccgcgacaucuacaucucccggcgccggcgcggcacguucaccuggacccugagcgacuccgagggcaacgagacccccgggggcuacugccugacgcgguggaugcucaucgaggccgagcugaagugcuucgggaacaccgccguggccaagugcaacgagaagcacgacgaggaguucugcgacaugcugcgccucuucgacuucugcaagcaggcgaucaagcggcugaagaccccggcccagaugagcauccagcugaucaacaaggccgugaacgcccucaucaacgaccagcugaucaugaagaaccaccuccgcgacaucaugggcauccccuacugcaacuacuccaaguacugguaccugaaccacaccgucacggggaagaccagccugccccggugcuggcugguguccaacggcagcuaccucaacgagacccacuucuccgacgacaucgagcagcaggccgacaacaugaucaccgagcugcugcagaaggaguacaucgaccgccagggcaagacgccgcucgggcugguggaccuguucgucuucagcaccuccuucuaccugaucagcaucuuccuccaccuggugaagauccccacccaccggcacguggucggcaagcccugccccaagccgcaccgccugaaccacauggggaucugcuccugcggccucuacaagcaccccggggugcccgugaaguggaagcggugaggacuagucccuguucccagagcccacuuuuuuuucuuuuuuugaaauaaaauagccugucuuucagaucuaaaaaaaaaaaaaaaaaaaaaaaaaaaaaaaaaaaaaaaaaaaaaaaaaaaaaaaaaaaaaaaaaaaaaaaaaaaaaaaaaaaaaaaaaaaaaaaaaaaa

SEQ ID NO: 23798 - RNA, 1740 nt, Artificial Sequence
  mRNA product Design a-2 (A100) comprising derived and/or modified sequence from LASV(LASV221-NIG-2010;Clade II)__AIT17624__GPCmut2 (opt1)
aggagaguccgcucagccagguugcagaagcggcuuagcguguguccuaaucuucucucugcguguagguaggccugugccgcaaacaagcuuaccaugggccagaucaucaccuucuuccaggaggugccccacgucaucgaggaggugaugaacaucgugcugaucgcccucagccugcuggccauccucaaggggaucuacaacgucgcgaccugcggccuguucgggcugguguccuuccuccugcugugcggccgcagcugcuccacgaccuacaaggggguguacgagcuccagacccuggagcuggacauggccagccucaacaugugcaugccgcuguccugcaccaagaacaacagccaccacuacaucauggucggcaacgagacgggccuggagcucacccugaccaacaccuccaucaucaaccacaaguucugcaaccugagcgacgcccacaagaagaaccucuacgaccacgcccugauguccaucaucagcacguuccaccuguccauccccaacuucaaccaguacgaggccaugagcugcgacuucaacgggggcaagaucuccgugcaguacaaccucagccacaccuacgcgaucgacgccgccaaccacugcgggaccaucgccaacggcgugcugcagaccuucaugcggauggcguggggcggguccuacaucgcccuggacagcggcaagggguccugggacugcaucaugacgagcuaccaguaccucaucauccagaacaccaccugggaggaccacugccaguucucccgccccagccccaucggcuaccuggggcugcucagccagcggacccgcgacaucuacaucucccggcgccggcgcggcacguucaccuggacccugagcgacuccgagggcaacgagacccccgggggcuacugccugacgcgguggaugcucaucgaggccgagcugaagugcuucgggaacaccgccgucgccaagugcaacgagaagcacgacgaggaguucugcgacaugcugcgccucuucgacuucugcaagcaggcgauccggcgccugaagaccccggcccagaugagcauccagcugaucaacaaggccgugaacgcccucaucaacgaccagcugaucaugaagaaccaccuccgggacaucaugggcauccccuacugcaacuacuccaaguacugguaccugaaccacaccgugacggggaagaccagccugccccgcugcuggcuggucuccaacggcagcuaccucaacgagacccacuucuccgacgacaucgagcagcaggccgacaacaugaucaccgagaugcugcagaaggaguacauggaccggcagggcaagacgccgcuggggcucguggaccuguucguguucagcaccuccuucuaccugaucagcaucuuccugcaccucgucaagauccccacccaccgccacgugaucggcaagcccugccccaagccgcaccggcugaaccacauggggaucugcuccugcggccuguacaagcaccccggggugcccgucaaguggaagcgcugaggacuagucccuguucccagagcccacuuuuuuuucuuuuuuugaaauaaaauagccugucuuucagaucuaaaaaaaaaaaaaaaaaaaaaaaaaaaaaaaaaaaaaaaaaaaaaaaaaaaaaaaaaaaaaaaaaaaaaaaaaaaaaaaaaaaaaaaaaaaaaaaaaaaa

SEQ ID NO: 23799 - RNA, 1740 nt, Artificial Sequence
  mRNA product Design a-2 (A100) comprising derived and/or modified sequence from LASV(LASV237-NIG-2010;Clade II)__AIT17638__GPCmut2 (opt1)
aggagaguccgcucagccagguugcagaagcggcuuagcguguguccuaaucuucucucugcguguagguaggccugugccgcaaacaagcuuaccaugggccagaucaucaccuucuuccaggaggugccccacgucaucgaggaggugaugaacaucgugcugaucgcccucagccugcuggccauccucaaggggaucuacaacgucgcgaccugcggccuguucgggcugguguccuuccuccugcugugcggccgcagcugcuccacgaccuacaaggggguguacgagcuccagacccuggagcuggacauggccagccucaacaugugcaugccgcuguccugcaccaagaacaacagccaccacuacaucauggucggcaacgagacgggccuggagcucacccugaccaacaccuccaucaucaaccacaaguucugcaaccugagcgacgcccacaagaaggaccucuacgaccacgcccugauguccaucaucagcacguuccaccuguccauccccaacuucaaccaguacgaggccaugagcugcgacuucaacgggggcaagaucuccgugcaguacaaccucagccacaccuacgcgguggacgccgccaaccacugcgggaccaucgccaacggcguccugcagaccuucaugcggauggcguggggcggguccuacaucgcccuggacagcggcaagggguccugggacugcaucaugacgagcuaccaguaccucaucauccagaacaccaccugggaggaccacugccaguucucccgccccagccccaucggcuaccuggggcugcucagccagcggacccgcgacaucuacaucucccggcgccggcgcggcacguucaccuggacccugagcgacuccgagggcaacgagacccccgggggcuacugccugacgcgguggaugcucaucgaggccgagcugaagugcuucgggaacaccgccguggccaagugcaacgagaagcacgacgaggaguucugcgacaugcugcgccucuucgacuucugcaagcaggcgauccggcgccugaagaccccggcccagaugagcauccagcugaucaacaaggccgugaacgcccucaucaacgaccagcugaucaugaagaaccaccuccgggacaucaugggcauccccuacugcaacuacuccaaguacugguaccugaaccacaccgucacggggaagaccagccugccccgcugcuggcugguguccaacggcagcuaccucaacgagacccacuucuccgacgacaucgagcagcaggccgacaacaugaucaccgagcugcugcagaaggaguacauggaccggcagggcaagacgccgcucgggcugguggaccuguucgucuucagcaccuccuucuaccugaucagcaucuuccuccaccugaucaagauccccacccaccgccacaucaccggcaagcccugccccaagccgcaccggcugaaccacauggggaucugcuccugcggccucuacaagcaccccggggugcccgugaaguggaagcgcugaggacuagucccuguucccagagcccacuuuuuuuucuuuuuuugaaauaaaauagccugucuuucagaucuaaaaaaaaaaaaaaaaaaaaaaaaaaaaaaaaaaaaaaaaaaaaaaaaaaaaaaaaaaaaaaaaaaaaaaaaaaaaaaaaaaaaaaaaaaaaaaaaaaaa

SEQ ID NO: 23800 - RNA, 1740 nt, Artificial Sequence
  mRNA product Design a-2 (A100) comprising derived and/or modified sequence from LASV(LASV253-NIG-2011;Clade II)__AIT17670__GPCmut2 (opt1)
aggagaguccgcucagccagguugcagaagcggcuuagcguguguccuaaucuucucucugcguguagguaggccugugccgcaaacaagcuuaccaugggccagaucaucaccuucuuccaggaggugccccacgucaucgaggaggugaugaacaucgugcugaucgcccucagccugcuggccauccucaaggggaucuacaacgucgcgaccugcggccuguucgggcugguguccuuccuccugcugugcggccgcagcugcuccacgaccuacaaggggguguacgagcuccagacccuggagcuggacauggccagccucaacaugugcaugccgcuguccugcaccaagaacaacagccaccacuacaucauggucggcaacgagacgggccuggagcucacccugaccaacaccuccaucaucaaccacaaguucugcaaccugagcgacgcccacaagaagaaccucuacgaccacgcccugauguccaucaucagcacguuccaccuguccauccccaacuucaaccaguacgaggccaugagcugcgacuucaacgggggcaagaucuccgugcaguacaaccucagccacaccuacgcgguggacgccgccaaccacugcgggaccaucgccaacggcguccugcagaccuucaugcggauggcguggggcggguccuacaucgcccuggacagcggcaagggguccugggacugcaucaugacgagcuaccaguaccucaucauccagaacaccaccugggaggaccacugccaguucucccgccccagccccaucggcuaccuggggcugcucagccagcggacccgcgacaucuacaucucccggcgccggcgcggcacguucaccuggacccugagcgacuccgagggcaacgagacccccgggggcuacugccugacgcgguggaugcucaucgaggccgagcugaagugcuucgggaacaccgccguggccaagugcaacgagaagcacgacgaggaguucugcgacaugcugcgccucuucgacuucugcaagcaggcgauccggcgccugaaggccccggcccagaugagcauccagcugaucaacaaggccgugaacgcccucaucaacgaccagcugaucaugaagaaccaccuccgggacaucaugggcauccccuacugcaacuacuccaaguacugguaccugaaccacaccgucaccgggcgcacgagccugccccggugcuggcugguguccaacggcagcuaccucaacgagacccacuucuccgacgacaucgagcagcaggcggacaacaugaucaccgagcugcugcagaaggaguacaucgaccgccagggcaagaccccgcucgggcugguggaccuguucgucuucagcacguccuucuaccugaucagcaucuuccuccaccuggugaagauccccacccaccggcacaucaucggcaagcccugccccaagccgcaccgccugaaccacauggggaucugcuccugcggccucuacaagcaccccggggugcccgucaaguggaagcggugaggacuagucccuguucccagagcccacuuuuuuuucuuuuuuugaaauaaaauagccugucuuucagaucuaaaaaaaaaaaaaaaaaaaaaaaaaaaaaaaaaaaaaaaaaaaaaaaaaaaaaaaaaaaaaaaaaaaaaaaaaaaaaaaaaaaaaaaaaaaaaaaaaaaa

SEQ ID NO: 23801 - RNA, 1740 nt, Artificial Sequence
  mRNA product Design a-2 (A100) comprising derived and/or modified sequence from LASV(LASV254-NIG-2011;Clade II)__AIT17674__GPCmut2 (opt1)
aggagaguccgcucagccagguugcagaagcggcuuagcguguguccuaaucuucucucugcguguagguaggccugugccgcaaacaagcuuaccaugggccagaucaucaccuucuuccaggaggugccccacgucaucgaggaggugaugaacaucgugcugaucgcccucagccugcuggccauccucaaggggaucuacaacgucgcgaccugcggccuguucgggcugguguccuuccuccugcugugcggccgcagcugcuccacgaccuacaaggggguguacgagcuccagacccuggagcuggacaugaccaaccucaacaugugcaugccgcugagcugcacgaagaacaacucccaccacuacaucauggucggcaacgagaccggccuggagcucacccugaccaacacgagcaucaucaaccacaaguucugcaaccuguccgacgcccacaagaagaaccucuacaaccacgcccugaugagcaucaucuccaccuuccaccugagcauccccaacuucaaccaguacgaggccauguccugcgacuucaacgggggcaagaucagcgugcaguacaaccucucccacagcuacgccguggacgcggccaaccacugcgggaccaucgccaacggcguccugcagaccuucaugcggauggccuggggcggguccuacaucgcgcuggacagcggcaaggggaacugggacugcaucaugacguccuaccaguaccucaucauccagaacaccaccugggaggaccacugccaguucagccgccccucccccaucggcuaccuggggcugcucagccagcggacccgcgacaucuacaucagccggcgccggcgcggcacguucaccuggacccuguccgacagcgagggcaacgagacccccgggggcuacugccugacgcgguggaugcucaucgaggccgagcugaagugcuucgggaacaccgccguggccaagugcaacgagaagcacgacgaggaguucugcgacaugcugcgccucuucgacuucugcaagcaggccauccggcgccugaagaccccggcgcaggccaacauccagcugaucaacaaggccgugaacgcccucaucaacgaccagcugaucaugaagaaccaccuccgggacaucaugggcauccccuacugcaacuacuccaaguacugguaccugaaccacaccgucacggggaagaccagccugccccgcugcuggcugguguccaacggcagcuaccucaacgagacccacuucuccgacgacaucgagcagcaggccgacaacaugaucaccgagcugcugcagaaggaguacauggaccggcagggcaagacgccgcucgggcugguggaccuguucgucuucagcaccuccuucuaccugaucagcaucuuccuccaccuggugaagauccccacccaccgccacgugaucggcaagcccugccccaagccgcaccggcugaaccacauggggaucugcuccugcggccucuacaagcaccccgggguccccgugaaguggaagcgcugaggacuagucccuguucccagagcccacuuuuuuuucuuuuuuugaaauaaaauagccugucuuucagaucuaaaaaaaaaaaaaaaaaaaaaaaaaaaaaaaaaaaaaaaaaaaaaaaaaaaaaaaaaaaaaaaaaaaaaaaaaaaaaaaaaaaaaaaaaaaaaaaaaaaa

SEQ ID NO: 23802 - RNA, 1740 nt, Artificial Sequence
  mRNA product Design a-2 (A100) comprising derived and/or modified sequence from LASV(Nig08-A19;Clade III)__ADU56618__GPCmut2 (opt1)
aggagaguccgcucagccagguugcagaagcggcuuagcguguguccuaaucuucucucugcguguagguaggccugugccgcaaacaagcuuaccaugggccagaucgugaccuucuuccaggaggucccccacgugaucgaggaggugaugaacaucguccugaucgcccucagcauccuggccauccugaaggggcucuacaacaucgcgaccugcggccugaucgggcuggugacguuccuccugcuguccggccgcagcugcuccaugaccuacaaggggguguacgagcuccagacccuggagcugaacaugaacacccucaacaugugcaugccgcugagcugcacgaagaacaacucccaccacuacaucauggucggcaacgagaccggccuggagcucacccugaccaacacgagccugcuccaccacaaguucugcaaccuguccgacgcccacaagaagaaccuguacgaccacacccucaugagcaucaucuccaccuuccaccugagcauccccaacuucaaccaguacgaggccauguccugcgacuucaacgggggcaagaucaccgugcaguacaaccugagccacuccuacgccaucgacgccgcgaaccacugcgggacgguggccaacggcguccuccagaccuucaugcggauggccuggggcgggagcuacaucgcccuggacuccggccgcgggaagugggacugcaucaugaccagcuaccaguaccugaucauccagaacaccacgugggaggaccacugccaguucucccggcccagccccaucggcuaccucgggcugcugucccagcgcacccgggacaucuacaucagccgccggcgccggggcaccuucaccuggacgcucagcgacuccgagggcaacgagacccccgggggcuacugccugacccgcuggaugcugaucgaggcggagcucaagugcuucgggaacaccgccguggccaagugcaacgagaagcacgacgaggaguucugcgacaugcugcggcuguucgacuucugcaagcaggccauccgccggcucaaggccccggcgcagaugagcauccagcugaucaacaaggccgugaacgcccugaucaacgaccagcucaucaugaagaaccaccuccgcgacaucaugggcauccccuacugcaacuacuccaaguacugguaccugaaccacacgagcaccgggcggaccucccugccccgcugcuggcuggucagcaacggcuccuaccugaacgagacccacuucagcgacgacaucgagcagcaggccgacaacaugaucacggagaugcuccagaaggaguaccuggaccggcagggcaagaccccgcuggggcugguggaccucuucguguucuccaccagcuucuaccugaucuccaucuuccugcaccucgucaagauccccacccaccgccacaucgugggcaagcccugccccaagccgcaccggcugaaccacauggggaucugcagcugcggccuguacaagcagcccggggugcccguccgcuggaagcggugaggacuagucccuguucccagagcccacuuuuuuuucuuuuuuugaaauaaaauagccugucuuucagaucuaaaaaaaaaaaaaaaaaaaaaaaaaaaaaaaaaaaaaaaaaaaaaaaaaaaaaaaaaaaaaaaaaaaaaaaaaaaaaaaaaaaaaaaaaaaaaaaaaaaa

SEQ ID NO: 23803 - RNA, 1743 nt, Artificial Sequence
  mRNA product Design a-2 (A100) comprising derived and/or modified sequence from LASV(G1180-SLE-2010;Clade IV)__AIT17168__GPCmut2 (opt1)
aggagaguccgcucagccagguugcagaagcggcuuagcguguguccuaaucuucucucugcguguagguaggccugugccgcaaacaagcuuaccaugggccagaucgugaccuucuuccaggaggucccccacgugaucgaggaggugaugaacaucguccugaucgcccucagcauccuggccgugcugaaggggcucuacaacuucgcgaccugcggccugguggggcugcucacguuccugcugcucugcggccgcuccugcaccgccagccgguacaagggggucuacgagcugcagacccuggagcucaacauggagacccugaacaugugcaugccgcuguccugcacgaagaacaacagccaccacuacaucauggugggcaacgagaccggccucgagcugacccugaccaacacguccaucaucaaccacaaguucugcaaccucagcgacgcccacaagaagaaccuguacgaccacgcccugauguccaucaucagcaccuuccaccucuccauccccaacuucaaccaguacgaggccaugagcugcgacuucaacgggggcaagaucuccgugcaguacaaccugagccacuccuacgcgggggacgccgccaaccacugcggcaccgucgccaacggggugcugcagaccuucaugcgcauggcguggggcggcagcuacaucgcccucgacuccgggcacggcagcugggacugcaucaugacguccuaccaguaccugaucauccagaacaccaccugggaggaccacugccaguucagccggcccucccccaucggguaccugggccuccugagccagcgcacccgggacaucuacaucagccgccggcgccggggcacguucaccuggacccuguccgacagcgaggggaaggacaccccgggcggguacugccucacgcgcuggaugcugaucgaggccgagcugaagugcuucggcaacaccgccguggccaagugcaacgagaagcacgacgaggaguucugcgacaugcuccggcuguucgacuucugcaagcaggcgauccagcgccugaaggcccccgcccagauguccauccagcucaucaacaaggccgucaacgcccugaucaacgaccagcugaucaugaagaaccaccuccgggacaucauggggauccccuacugcaacuacagcaaguacugguaccugaaccacaccaccacgggcaagaccucccugcccaagugcuggcucgugagcaacggcuccuaccugaacgagacccacuucagcgacgacaucgagcagcaggcggacaacaugaucaccgagaugcugcagaaggaguacauggagcgccaggggaagacgccgcucggccugguggaccuguucgucuucuccaccagcuucuaccugaucuccaucuuccuccaccuggugaagauccccacccaccggcacaucgugggcaagagcugccccaagccccaccgccugaaccacauggggaucugcuccugcgggcucuacaagcagccgggcguccccgugaaguggaagcggugaggacuagucccuguucccagagcccacuuuuuuuucuuuuuuugaaauaaaauagccugucuuucagaucuaaaaaaaaaaaaaaaaaaaaaaaaaaaaaaaaaaaaaaaaaaaaaaaaaaaaaaaaaaaaaaaaaaaaaaaaaaaaaaaaaaaaaaaaaaaaaaaaaaaa

SEQ ID NO: 23804 - RNA, 1743 nt, Artificial Sequence
  mRNA product Design a-2 (A100) comprising derived and/or modified sequence from LASV(G1442-SLE-2011;Clade IV)__AIT17180__GPCmut2 (opt1)
aggagaguccgcucagccagguugcagaagcggcuuagcguguguccuaaucuucucucugcguguagguaggccugugccgcaaacaagcuuaccaugggccagaucgugaccuucuuccaggaggucccccacgugaucgaggaggugaugaacaucguccugaucgcccucagcauccuggccgugcugaaggggcucuacaacguggcgaccugcggccugaucgggcuggucacguuccuccugcugugcggccgcuccugcaccaccacccucuacaaggggguguacgagcugcagacgcuggagcucaacauggagacccugaacaugugcaugccgcugagcugcaccaagaacaacucccaccacuacauccgggugggcaacgagaccggccucgagcugacgcugaccaacaccagcaucaucaaccacaaguucugcaaccucuccgacgcccacaagaagaaccuguacgaccacgcccugaugagcaucaucuccaccuuccaccucagcauccccaacuucaaccaguacgaggccauguccugcgacuucaacgggggcaagaucagcguccaguacaaccugucccacagcuacgccggggacgcggccaaccacugcggcacgguggccaacggggugcugcagaccuucaugcgcauggccuggggcggcuccuacaucgcgcucgacagcgggcggggcaacugggacugcaucaugaccuccuaccaguaccugaucauccagaacaccacgugggacgaccacugccaguucagccgccccucccccaucggguaccugggccuccugagccagcggacccgcgacgucuacaucucccggcgccggcgcggcaccuucaccuggacgcugagcgacagcgaggggaaggacaccccgggcggguacugccucacccgguggaugcugaucgaggccgagcugaagugcuucggcaacaccgccguggccaagugcaacgagaagcacgacgaggaguucugcgacaugcuccgccuguucgacuucugcaagcaggccauccagcggcugaaggcgcccgcccagauguccauccagcucaucaacaaggccgugaacgcccugaucaacgaccagcugaucaugaagaaccaccuccgcgacaucauggggauccccuacugcaacuacagcaaguacugguaccugaacaacacggccaccggcaagaccucccugcccaagugcuggcucaucagcaacggcuccuaccugaacgagacccacuucagcgacgacaucgagcaggaggcggacaacaugaucacggagaugcugcagaaggaguacauggagcggcaggggaagaccccgcucggccuggucgaccuguucguguucuccaccagcuucuaccugaucuccaucuuccuccaccuggugaagauccccacccaccgccacaucgucggcaagagcugccccaagccccaccggcugaaccacauggggaucugcuccugcgggcucuacaagcagccgggcgugcccgugcgcuggaagcggugaggacuagucccuguucccagagcccacuuuuuuuucuuuuuuugaaauaaaauagccugucuuucagaucuaaaaaaaaaaaaaaaaaaaaaaaaaaaaaaaaaaaaaaaaaaaaaaaaaaaaaaaaaaaaaaaaaaaaaaaaaaaaaaaaaaaaaaaaaaaaaaaaaaaa

SEQ ID NO: 23805 - RNA, 1743 nt, Artificial Sequence
  mRNA product Design a-2 (A100) comprising derived and/or modified sequence from LASV(G3010-SLE-2013;Clade IV)__AIT17344__GPCmut2 (opt1)
aggagaguccgcucagccagguugcagaagcggcuuagcguguguccuaaucuucucucugcguguagguaggccugugccgcaaacaagcuuaccaugggccagaucgugaccuucuuccaggaggucccccacgugaucgaggaggugaugaacaucguccugaucgcccucagcauccuggccgugcugaaggggcucuacaacuucgcgaccugcggccugguggggcuggucacguuccuccugcugugcggccgcuccugcaccaccagccucuacaaggggguguacgagcugcagacccuggagcucaacauggagacgcugaacaugugcaugccgcuguccugcaccaagaacaacagccaccacuacaucauggugggcaacgagaccggccucgagcugacccugacgaacaccuccaucaucaaccacaaguucugcaaccucagcgacgcccacaagaagaaccuguacaaccacgcccugauguccaucaucagcaccuuccaccucuccauccccaacuucaaccaguacgaggccaugagcugcgacuucaacgggggcaagaucuccguccaguacaaccugagccacuccuacgccggggacgcggccagccacugcggcaccguggccaacggggugcugcagacguucaugcggauggccuggggcggcuccuacaucgcgcucgacagcggguacggcaagugggacugcaucaugaccuccuaccaguaccugaucauccagaacaccaccugggaggaccacugccaguucagccgccccucccccaucggguaccugggccuccugagccagcggacgcgcgacaucuacaucagccggcgccggcgcggcaccuucaccuggacccuguccgacagcgaggggaaggacacgccgggcggguacugccucacccgguggaugcugaucgaggccgagcugaagugcuucggcaacaccgccgucgccaagugcaacgagaagcacgacgaggaguucugcgacaugcuccgccuguucgacuucugcaagcaggccauccagcggcugaagacccccgcgcagauguccauccagcucaucaacaaggccgugaacgcccugaucaacgaccagcugaucaugaagaaccaccuccgcgacaucauggggauccccuacugcaacuacagcaaguacugguaccugaaccacacgaccaccggcaagaccucccugcccaagugcuggcucgugagcaacggcuccuaccugaacgagacgcacuucagcgacgacaucgagcagcaggccgacaacaugaucaccgagaugcugcagaaggaguacauggagcggcaggggaagaccccgcucggccuggucgaccuguucguguucuccaccagcuucuaccugaucuccaucuuccuccaccuggugaagauccccacgcaccgccacaucgucggcaagagcugccccaagccccaccggcugaaccacauggggaucugcuccugcgggcucuacaagcagccgggcgugcccgugcgcuggaagcggugaggacuagucccuguucccagagcccacuuuuuuuucuuuuuuugaaauaaaauagccugucuuucagaucuaaaaaaaaaaaaaaaaaaaaaaaaaaaaaaaaaaaaaaaaaaaaaaaaaaaaaaaaaaaaaaaaaaaaaaaaaaaaaaaaaaaaaaaaaaaaaaaaaaaa

SEQ ID NO: 23806 - RNA, 1743 nt, Artificial Sequence
  mRNA product Design a-2 (A100) comprising derived and/or modified sequence from LASV(G502-SLE-2009;Clade IV)__AIT17126__GPCmut2 (opt1)
aggagaguccgcucagccagguugcagaagcggcuuagcguguguccuaaucuucucucugcguguagguaggccugugccgcaaacaagcuuaccaugggccagaucgugaccuucuuccaggaggucccccacgugaucgaggaggugaugaacaucguccugaucgcccucagcauccuggccgugcugaaggggcucuacaacuucgcgaccugcggccugguggggcugcucacguuccugcugcucugcggccgcuccugcaccaccgggcuguacaagggcgucuacgagcugcagacccucgagcugaacauggagacgcugaacaugugcaugccgcucagcugcaccaagaacaacucccaccacuacaucauggugggcaacgagaccgggcuggagcugacccucacgaacaccagcaucaucaaccacaaguucugcaaccuguccgacgcccacaagaagaaccuguacgaccacgcccucaugagcaucaucuccaccuuccaccugagcauccccaacuucaaccaguacgaggccauguccugcgacuucaacggcgggaagaucagcgugcaguacaaccugucccacagcuacgccggcgacgcggccgaccacugcgggaccgucgccaacggcgugcuccagacguucaugcggauggccuggggcggguccuacaucgcgcuggacagcggccgcgggcggugggacugcaucaugaccuccuaccaguaccugaucauccagaacaccaccugggaggaccacugccaguucagccgccccucccccaucggcuaccucggccugcugagccagcggacgcgcgacaucuacaucucccggcgccggcgcgggaccuucaccuggacccucagcgacagcgagggcaaggacacgcccgggggcuacugccugacccgguggaugcugaucgaggccgagcucaagugcuucgggaacaccgccguggccaagugcaacgagaagcacgacgaggaguucugcgacaugcugcgccuguucgacuucugcaagcaggccauccagcggcucaaggcgccggcccagauguccauccagcugaucaacaaggccgucaacgcccugaucaacgaccagcucgugaugaagaaccaccuccgcgacaucaugggcauccccuacugcaacuacagccgguacugguaccugaaccacaccacgaccggccgcaccucccugcccaagugcuggcuggugagcaacggguccuaccugaacgagacccacuucagcgacgacaucgagcagcaggccgacaacaugaucacggagaugcuccagaaggaguacauggagcggcagggcaagaccccgcuggggcuggucgaccuguucguguucuccaccagcuucuaccucaucuccaucuuccugcaccuggugaagauccccacccaccgccacaucgucggcaagagcugccccaagccccaccggcucaaccacauggggaucugcuccugcggccuguacaagcagccgggcgugcccgugaaguggaagcgcugaggacuagucccuguucccagagcccacuuuuuuuucuuuuuuugaaauaaaauagccugucuuucagaucuaaaaaaaaaaaaaaaaaaaaaaaaaaaaaaaaaaaaaaaaaaaaaaaaaaaaaaaaaaaaaaaaaaaaaaaaaaaaaaaaaaaaaaaaaaaaaaaaaaaa

SEQ ID NO: 23807 - RNA, 1743 nt, Artificial Sequence
  mRNA product Design a-2 (A100) comprising derived and/or modified sequence from LASV(G733-SLE-2010;Clade IV)__AIT17154__GPCmut2 (opt1)
aggagaguccgcucagccagguugcagaagcggcuuagcguguguccuaaucuucucucugcguguagguaggccugugccgcaaacaagcuuaccaugggccagaucgugaccuucuuccaggaggucccccacgugaucgaggaggugaugaacaucguccugaucgcccucagcauccuggccgugcugaaggggcucuacaacuucgcgaccugcggcaucguggggcuggucuccuuccugcuccugugcggccgcagcugcacgaccucccuguacaaggggguguacgagcuccagacccuggagcugaacauggagacccucaacaugugcaugccgcugagcugcacgaagaacaacucccaccacuacaucauggugggcaacgagaccggccuggagcucacccugaccaacacgagcaucaucaaccacaaguucugcaaccuguccgacgcccacaagaagaaccucuacgaccacgcccugaugagcaucaucuccaccuuccaccugagcauccccaacuucaaccaguacgaggccauguccugcgacuucaacgggggcaagaucagcguccaguacaaccucucccacagcuacgccggggacgcggccaaccacugcggcaccaucgccaacggggugcugcagaccuucaugcggauggccuggggcggcuccuacaucgcgcuggacagcgggcgcgaccggugggacugcaucaugacguccuaccaguaccucaucauccagaacaccaccugggaggaccacugccaguucagccgccccucccccaucggcuaccuggggcugcucagccagcggacccgcgacaucuacaucagccggcgccggcgcggcacguucaccuggacccuguccgacagcgagggcaaggacacccccgggggcuacugccugacgcgguggaugcucaucgaggccgagcugaagugcuucgggaacaccgccguggccaagugcaacgagaagcacgacgaggaguucugcgacaugcugcgccucuucgacuucugcaagcaggccauccagcggcugaaggcgccggcccagauguccauccagcugaucaacaaggccgucaacgcccucaucaacgaccagcugaucaugaagaaccaccuccgcgacaucaugggcauccccuacugcaacuacagcaaguacugguaccugaaccacaccaccacggggaagaccucccugcccaagugcuggcuggugagcaacggcuccuaccucaacgagacccacuucagcgacgacaucgagcagcaggccgacaacaugaucaccgagaugcugcagaaggaguacauggagcggcagggcaagacgccgcuggggcucguggaccuguucgucuucuccaccagcuucuaccugaucuccaucuuccugcaccucgugaagauccccacccaccgccacguggucggcaagagcugccccaagccccaccggcugaaccacauggggaucugcuccugcggccuguacgggcagccgggcgugcccgugaaguggaagcgcugaggacuagucccuguucccagagcccacuuuuuuuucuuuuuuugaaauaaaauagccugucuuucagaucuaaaaaaaaaaaaaaaaaaaaaaaaaaaaaaaaaaaaaaaaaaaaaaaaaaaaaaaaaaaaaaaaaaaaaaaaaaaaaaaaaaaaaaaaaaaaaaaaaaaa

SEQ ID NO: 23808 - RNA, 1743 nt, Artificial Sequence
  mRNA product Design a-2 (A100) comprising derived and/or modified sequence from MOPV/LASV reassortant(IGS-1;Clade IV)__AFY05576__GPCmut2 (opt1)
aggagaguccgcucagccagguugcagaagcggcuuagcguguguccuaaucuucucucugcguguagguaggccugugccgcaaacaagcuuaccaugggccagaucgugaccuucuuccaggaggucccccacgugaucgaggaggugaugaacaucguccugaucgcccucagcgugcuggccgugcugaaggggcucuacaacuucgcgaccugcggccuggucgggcuggugacguuccuccugcugugcggccgcuccugcaccaccagccucuacaaggggguguacgagcugcagacccuggagcucaacauggagacgcugaacaugugcaugccgcuguccugcaccaagaacaacagccaccacuacaucauggucggcaacgagaccggccucgagcugacccugacgaacaccuccaucaucaaccacaaguucugcaaccucagcgacgcccacaagaagaaccuguacgaccacgcccugauguccaucaucagcaccuuccaccucuccauccccaacuucaaccaguacgaggccaugagcugcgacuucaacgggggcaagaucuccgugcaguacaaccugagccacuccuacgccggggacgcggccaaccacugcggcaccguggccaacgggguccugcagacguucaugcggauggccuggggcggcagcuacaucgcgcucgacuccgggcgcggcaacugggacugcaucaugaccagcuaccaguaccugaucauccagaacaccaccugggaggaccacugccaguucucccggcccagccccaucggguaccugggccuccugucccagcgcacgcgggacaucuacaucagccgccggcgccggggcaccuucaccuggacccugagcgacuccgagggggaggacacgccgggcggguacugccucacccgcuggaugcugaucgaggccgagcugaagugcuucggcaacaccgccguggccaagugcaacgagaagcacgacgaggaguucugcgacaugcuccggcuguucgacuucugcaagcaggccauccagcgccugaaggcgcccgcccagaugagcauccagcucaucaacaaggccgugaacgcccugaucaacgaccagcugaucaugaagaaccaccuccgggacaucauggggauccccuacugcaacuacuccaaguacugguaccugaaccacaccacgaccggccgcaccagccugcccaagugcuggcucgucuccaacggcagcuaccugaacgagacccacuucuccgacgacaucgagcagcaggccgacaacaugaucacggagaugcugcagaaggaguacauggagcggcaggggaagaccccgcucggccugguggaccuguucguguucagcaccuccuucuaccugaucagcaucuuccuccaccuggucaagauccccacccaccgccacaucguggggaaguccugccccaagccccaccggcugaaccacaugggcaucugcagcugcgggcucuacaagcagccgggcgugcccgucaaguggaagcgcugaggacuagucccuguucccagagcccacuuuuuuuucuuuuuuugaaauaaaauagccugucuuucagaucuaaaaaaaaaaaaaaaaaaaaaaaaaaaaaaaaaaaaaaaaaaaaaaaaaaaaaaaaaaaaaaaaaaaaaaaaaaaaaaaaaaaaaaaaaaaaaaaaaaaa

SEQ ID NO: 23809 - RNA, 1743 nt, Artificial Sequence
  mRNA product Design a-2 (A100) comprising derived and/or modified sequence from LASV(LM765-SLE-2012;Clade IV)__AIT17814__GPCmut2 (opt1)
aggagaguccgcucagccagguugcagaagcggcuuagcguguguccuaaucuucucucugcguguagguaggccugugccgcaaacaagcuuaccaugggccagaucgugaccuucuuccaggaggucccccacgugaucgaggaggugaugaacaucguccugaucgcccucagcauccuggccgugcugaaggggcucuacaacuucgcgaccugcggccugguggggcuggucacguuccuccugcugugcggccgcuccugcaccaccagccucuacaaggggguguacgagcugcagacccuggagcucaacauggagacgcugaacaugugcaugccgcuguccugcaccaagaacaacagccaccacuacaucauggugggcaacgagaccggccucgagcugacccugacgaacaccuccaucaucgaccacaaguucugcaaccucagcgacgcccaccggaagaaccuguacgaccacgcccugauguccaucaucagcaccuuccaccucuccauccccaacuucaaccaguacgaggccaugagcugcgacuucaacgggggcaagaucuccguccaguacaaccugagccacuccuacgccaaggacgcggccgaccacugcgggaccguggccaacggcgugcugcagacguucaugcgcauggccuggggcgggagcuacaucgcgcucgacuccggccgggggcgcugggacugcaucaugaccagcuaccaguaccugaucauccagaacaccaccugggaggaccacugccaguucucccggcccagccccaucggcuaccuggggcuccugucccagcgcacgcgggacaucuacaucagccgccggcgccggggcaccuucaccuggacccugagcgacuccgagggcaaggacacgcccgggggcuacugccucacccgcuggaugcugaucgaggccgagcugaagugcuucgggaacaccgccgucgccaagugcaacgagaagcacgacgaggaguucugcgacaugcuccggcuguucgacuucugcaagcaggccauccagcgccugaaggcgccggcccagaugagcauccagcucaucaacaaggccgugaacgcccugaucaacgaccagcugaucaugaagaaccaccuccgggacaucaugggcauccccuacugcaacuacuccaaguacugguaccugaaccacaccacgaccgggaagaccagccugcccaagugcuggcucguguccaacggcagcuaccugaacgagacccacuucuccgacgacaucgagcagcaggccgacaacaugaucacggagaugcugcagaaggaguacauggagcgccagggcaagaccccgcucgggcuggucgaccuguucguguucagcaccuccuucuaccugaucagcaucuuccuccaccuggugaagauccccacccaccggcacaucgucggcaagcccugccccaagccgcaccgccugaaccacauggggaucugcuccugcggccucuacaagcagcccggggugcccgugaaguggaagcggugaggacuagucccuguucccagagcccacuuuuuuuucuuuuuuugaaauaaaauagccugucuuucagaucuaaaaaaaaaaaaaaaaaaaaaaaaaaaaaaaaaaaaaaaaaaaaaaaaaaaaaaaaaaaaaaaaaaaaaaaaaaaaaaaaaaaaaaaaaaaaaaaaaaaa

SEQ ID NO: 23810 - RNA, 1743 nt, Artificial Sequence
  mRNA product Design a-2 (A100) comprising derived and/or modified sequence from LASV(LM776-SLE-2012;Clade IV)__AIT17824__GPCmut2 (opt1)
aggagaguccgcucagccagguugcagaagcggcuuagcguguguccuaaucuucucucugcguguagguaggccugugccgcaaacaagcuuaccaugggccagaucgugaccuucuuccaggaggucccccacgugaucgaggaggugaugaacaucguccugaucgcccucagcauccuggccgugcugaaggggcucuacaacuucgcgaccugcggccugguggggcuggucacguuccuccugcugugcggccgcuccugcaccaccagcguguacaaggggguguacgagcuccagacccuggagcugaacauggagacgcucaacaugugcaugccgcuguccugcaccaagaacaacagccaccacuacaucauggucggcaacgagaccggccuggagcucacccugacgaacaccuccaucaucaaccacaaguucugcaaccugagcgacgcccacaagaagaaccucuacgaccacgcccugauguccaucaucagcaccuuccaccuguccauccccaacuucaaccaguacgaggccaugagcugcgacuucaacgggggcaagaucuccgugcaguacaaccucagccacuccuacgccggggacgcggccaaccacugcggcaccguggccaacgggguccugcagacguucaugcggauggccuggggcggcagcuacaucgcgcuggacuccgggcacggcaagugggacugcaucaugaccagcuaccaguaccucaucauccagaacaccaccugggaggaccacugccaguucucccgccccagccccaucggguaccugggccugcucucccagcggacgcgcgacaucuacaucagccggcgccggcgcggcaccuucaccuggacccugagcgacuccgaggggaaggacacgccgggcggguacugccugacccgguggaugcucaucgaggccgagcugaagugcuucggcaacaccgccguggccaagugcaacgagaagcacgacgaggaguucugcgacaugcugcgccucuucgacuucugcaagcaggccauccagcggcugaaggcgcccgcccagaugagcauccagcugaucaacaaggccgugaacgcccucaucaacgaccagcugaucaugaagaaccaccuccgcgacaucauggggauccccuacugcaacuacuccaaguacugguaccugaaccacaccacgaccggcaagaccagccugcccaagugcuggcuggucuccaacggcagcuaccucaacgagacccacuucuccgacgacaucgagcagcaggccgacaacaugaucacggagaugcugcagaaggaguacauggagcggcaggggaagaccccgcugggccucguggaccuguucguguucagcaccuccuucuaccugaucagcaucuuccugcaccucgucaagauccccacccaccgccacaucguggggaaguccugccccaagccccaccggcugaaccacaugggcaucugcagcugcgggcuguacaagcagccgggcgugcccguccgcuggaagcggugaggacuagucccuguucccagagcccacuuuuuuuucuuuuuuugaaauaaaauagccugucuuucagaucuaaaaaaaaaaaaaaaaaaaaaaaaaaaaaaaaaaaaaaaaaaaaaaaaaaaaaaaaaaaaaaaaaaaaaaaaaaaaaaaaaaaaaaaaaaaaaaaaaaaa

SEQ ID NO: 23811 - RNA, 1743 nt, Artificial Sequence
  mRNA product Design a-2 (A100) comprising derived and/or modified sequence from LASV(Mad39;Clade IV)__ANH09722__GPCmut2 (opt1)
aggagaguccgcucagccagguugcagaagcggcuuagcguguguccuaaucuucucucugcguguagguaggccugugccgcaaacaagcuuaccaugggccagaucgugaccuucuuccaggaggucccccacgugaucgaggaggugaugaacaucguccugaucgcccucagcauccuggccgugcugaaggggcucuacaacguggcgaccugcggccugaucgggcuggucacguuccuccugcugugcggccgcuccugcaccaccacccucuacaaggggguguacgagcugcaggcccuggagcucaacauggagacgcugaacaugugcaugccgcugagcugcaccaagaacaacucccaccacuacauccgggugggcaacgagaccggccucgagcugacccugacgaacaccagccucaucaaccacaaguucugcaaccuguccgacgcccacaagaagaaccuguacgaccacgcccucaugagcaucaucuccaccuuccaccugagcauccccaacuucaaccaguacgaggccauguccugcgacuucaacgacgggaagaucagcguccaguacaaccugucccacaccuacgcgggcgacacggccaaccacugcgggaccguggccaacggcgugcuccagaccuucaugcgcauggccuggggcgggagcuacaucgcgcuggacuccggccgcgggggcugggacugcaucaugaccagcuaccaguaccugaucauccagaacacgaccugggaggaccacugccaguucucccggcccagccccaucggguaccucggccugcugucccagcggacccgcgacaucuacaucagccggcgccggcgcggcaccuucacguggacccucuccgacagcgaggggaaggacaccccgggcggguacugccugacccgguggaugcugaucgaggccgagcucaagugcuucggcaacacggccgucgccaagugcaacgagaagcacgacgaggaguucugcgacaugcugcgccuguucgacuucugcaagcaggccauccagcggcucaaggcgcccgcccagaugagcauccagcugaucaacaaggccgugaacgcccugaucaacgaccagcucaucaugaagaaccaccuccgcgacaucauggggauccccuacugcaacuacuccaaguacugguaccugaaccacaccgugaccggcaagaccagccugcccaagugcuggcuggucuccaacggcagcuaccugaacgagacgcacuucuccgacgacaucgagcagcaggccgacaacaugaucaccgagaugcuccagaaggaguacauggagcggcaggggaagaccccgcugggccugguggaccuguucguguucagcaccuccuucuaccucaucagcaucuuccugcaccuggucaagauccccacgcaccgccacgugguggggaagcccugccccaagccgcaccggcucaaccacaugggcaucugcuccugcggguucuacaagcagcccggcguccccgugcgcuggaagcggugaggacuagucccuguucccagagcccacuuuuuuuucuuuuuuugaaauaaaauagccugucuuucagaucuaaaaaaaaaaaaaaaaaaaaaaaaaaaaaaaaaaaaaaaaaaaaaaaaaaaaaaaaaaaaaaaaaaaaaaaaaaaaaaaaaaaaaaaaaaaaaaaaaaaa

SEQ ID NO: 23812 - RNA, 1743 nt, Artificial Sequence
  mRNA product Design a-2 (A100) comprising derived and/or modified sequence from LASV(Z0947-SLE-2011;Clade IV)__AIT17840__GPCmut2 (opt1)
aggagaguccgcucagccagguugcagaagcggcuuagcguguguccuaaucuucucucugcguguagguaggccugugccgcaaacaagcuuaccaugggccagaucgugaccuucuuccaggaggucccccacgugaucgaggaggugaugaacaucguccugaucgcccucagcauccuggccgugcugaaggggcucuacaacuucgcgaccugcggccugguggggcuggucacguuccuccugcugugcggccgcuccugcaccaucagccucuacaaggggguguacgagcugcagacccuggagcucaacauggagacccugaacaugugcaugccgcuguccugcacgaagaacaacagccaccacuacaucauggugggcaacgagaccggccucgagcugacccugaccaacacguccaucaucaaccacaaguucugcaaccucagcgacgcccacaagaagaaccuguacgaccacgcccugauguccaucaucagcaccuuccaccucuccauccccaacuucaaccaguacgaggccaugagcugcgacuucaacgggggcaagaucuccguccaguacaaccugagccacuccuacgccggggacgcggccaaccacugcggcaccguggccaacggggugcugcagaccuucaugcggauggccuggggcggcagcuacaucgcgcucgacuccgggcgcgaccggugggacugcaucaugacgagcuaccaguaccugaucauccagaacaccaccugggaggaccacugccaguucucccgccccagccccaucggcuaccuggggcuccugucccagcggacccgcgacaucuacaucagccggcgccggcgcggcacguucaccuggacccugagcgacuccgagggcaaggacacccccgggggcuacugccucacgcgguggaugcugaucgaggccgagcugaagugcuucgggaacaccgccgucgccaagugcaacgagaagcacgacgaggaguucugcgacaugcuccgccuguucgacuucugcaagcaggccauccagcggcugaaggcgccggcccagaugagcauccagcucaucaacaaggccgugaacgcccugaucaacgaccagcugaucaugaagaaccaccuccgcgacaucaugggcauccccuacugcaacuacuccaaguacugguaccugaaccacaccaccacggggaagaccagccugcccaagugcuggcucguguccaacggcagcuaccugaacgagacccacuucuccgacgacaucgagcagcaggccgacaacaugaucaccgagaugcugcagaaggaguacauggagcggcagggcaagacgccgcucgggcuggucgaccuguucguguucagcaccuccuucuaccugaucagcaucuuccuccaccuggugaagauccccacccaccgccacaucgucggcaagcccugccccaagccgcaccggcugaaccacauggggaucugcuccugcggccucuacaagcagcccggggugcccgugaaguggaagcgcugaggacuagucccuguucccagagcccacuuuuuuuucuuuuuuugaaauaaaauagccugucuuucagaucuaaaaaaaaaaaaaaaaaaaaaaaaaaaaaaaaaaaaaaaaaaaaaaaaaaaaaaaaaaaaaaaaaaaaaaaaaaaaaaaaaaaaaaaaaaaaaaaaaaaa

SEQ ID NO: 23813 - RNA, 1743 nt, Artificial Sequence
  mRNA product Design a-2 (A100) comprising derived and/or modified sequence from LASV(Josiah;Clade IV)__NP_694870__GPCmut2 (opt4)
aggagaguccgcucagccagguugcagaagcggcuuagcguguguccuaaucuucucucugcguguagguaggccugugccgcaaacaagcuuaccaugggccagaucgugaccuucuuccaggaggugccccacgugaucgaggaggugaugaacaucgugcugaucgcccugagcgugcuggccgugcugaagggccuguacaacuucgccaccugcggccuggugggccuggugaccuuccugcugcugugcggcagaagcugcaccaccagccuguacaagggcguguacgagcugcagacccuggagcugaacauggagacccugaacaugugcaugccccugagcugcaccaagaacaacagccaccacuacaucauggugggcaacgagaccggccuggagcugacccugaccaacaccagcaucaucaaccacaaguucugcaaccugagcgacgcccacaagaagaaccuguacgaccacgcccugaugagcaucaucagcaccuuccaccugagcauccccaacuucaaccaguacgaggccaugagcugcgacuucaacggcggcaagaucagcgugcaguacaaccugagccacagcuacgccggcgacgccgccaaccacugcggcaccguggccaacggcgugcugcagaccuucaugagaauggccuggggcggcagcuacaucgcccuggacagcggcagaggcaacugggacugcaucaugaccagcuaccaguaccugaucauccagaacaccaccugggaggaccacugccaguucagcagacccagccccaucggcuaccugggccugcugagccagagaaccagagacaucuacaucagcagaagaagaagaggcaccuucaccuggacccugagcgacagcgagggcaaggacacccccggcggcuacugccugaccagauggaugcugaucgaggccgagcugaagugcuucggcaacaccgccguggccaagugcaacgagaagcacgacgaggaguucugcgacaugcugagacuguucgacuucugcaagcaggccauccagagacugaaggcccccgcccagaugagcauccagcugaucaacaaggccgugaacgcccugaucaacgaccagcugaucaugaagaaccaccugagagacaucaugggcauccccuacugcaacuacagcaaguacugguaccugaaccacaccaccaccggcagaaccagccugcccaagugcuggcuggugagcaacggcagcuaccugaacgagacccacuucagcgacgacaucgagcagcaggccgacaacaugaucaccgagaugcugcagaaggaguacauggagagacagggcaagaccccccugggccugguggaccuguucguguucagcaccagcuucuaccugaucagcaucuuccugcaccuggugaagauccccacccacagacacaucgugggcaagagcugccccaagccccacagacugaaccacaugggcaucugcagcugcggccuguacaagcagcccggcgugcccgugaaguggaagagaugaggacuagucccuguucccagagcccacuuuuuuuucuuuuuuugaaauaaaauagccugucuuucagaucuaaaaaaaaaaaaaaaaaaaaaaaaaaaaaaaaaaaaaaaaaaaaaaaaaaaaaaaaaaaaaaaaaaaaaaaaaaaaaaaaaaaaaaaaaaaaaaaaaaaa

SEQ ID NO: 23814 - RNA, 1740 nt, Artificial Sequence
  mRNA product Design a-2 (A100) comprising derived and/or modified sequence from LASV(LP;Clade I)__AAF86701__GPCmut2 (opt4)
aggagaguccgcucagccagguugcagaagcggcuuagcguguguccuaaucuucucucugcguguagguaggccugugccgcaaacaagcuuaccaugggccagaucaucaccuucuuccaggaggugccccacgugaucgaggaggugaugaacaucgugcugaucgcccugagccugcuggccauccugaagggccuguacaacaucgccaccugcggcaucaucggccugguggccuuccuguuccugugcggcaagagcugcagccugacccugaagggcggcuacgagcugcagacccuggagcugaacauggagacccugaacaugugcaugccccugagcugcaccaagaacagcagccaccacuacaucagagugggcaacgagaccggccuggagcugacccugaccaacaccagcaucaucaaccacaaguucugcaaccugagcgacgcccacaagaagaaccuguacgaccacgcccugaugagcaucaucagcaccuuccaccugagcauccccaacuucaaccaguacgaggccaugagcugcgacuucaacggcggcaagaucagcgugcaguacaaccugagccacagcuacgccggcgacgccgccgagcacugcggcaccguggccaacggcgugcugcagaccuucaugagaauggccuggggcggcagauacaucgcccuggacagcggcaagggcaacugggacugcaucaugaccagcuaccaguaccugaucauccagaacaccaccugggaggaccacugccaguucagcagacccagccccaucggcuaccugggccugcugagccagagaaccagagacaucuacaucagcagaagaagaagaggcaccuucaccuggacccugagcgacagcgagggcaacgagacccccggcggcuacugccugaccagauggaugcugaucgaggccgagcugaagugcuucggcaacaccgccguggccaagugcaacgagaagcacgacgaggaguucugcgacaugcugagacuguucgacuucugcaagcaggccaucagaagacugaaggcccccgcccagaugagcauccagcugaucaacaaggccgugaacgcccugaucaacgaccagcugaucaugaagaaccaccugagagacaucaugggcauccccuacugcaacuacagcaaguacugguaccugaaccacaccagcagcggcagaaccagccugcccaagugcuggcugaucagcaacggcagcuaccugaacgagacccaguucagcgacgacaucgagcagcaggccgacaacaugaucaccgagaugcugcagaaggaguacaucgagagacagggcaagaccccccugggccugguggacaucuucaucuucagcaccagcuucuaccugaucagcaucuuccugcaccugaucaagauccccacccacagacacaucgugggcaagcccugccccaagccccacagacugaaccacaugggcgugugcagcugcggccuguacaagcaccccggcgugcccaccaaguggaagagaugaggacuagucccuguucccagagcccacuuuuuuuucuuuuuuugaaauaaaauagccugucuuucagaucuaaaaaaaaaaaaaaaaaaaaaaaaaaaaaaaaaaaaaaaaaaaaaaaaaaaaaaaaaaaaaaaaaaaaaaaaaaaaaaaaaaaaaaaaaaaaaaaaaaaa

SEQ ID NO: 23815 - RNA, 1740 nt, Artificial Sequence
  mRNA product Design a-2 (A100) comprising derived and/or modified sequence from LASV(803213;Clade II)__AAF86703__GPCmut2 (opt4)
aggagaguccgcucagccagguugcagaagcggcuuagcguguguccuaaucuucucucugcguguagguaggccugugccgcaaacaagcuuaccaugggccagaucaucaccuucuuccaggaggugccccacgugaucgaggaggugaugaacaucgugcugaucgcccugagccugcuggccauccugaagggcaucuacaacguggccaccugcggccuguucggccugaucagcuuccugcugcugugcggcagaagcugcagcgugaccuacaagggcguguacgagcugcagacccuggagcugaacauggccaaccugaacaugugcaugccccugagcugcaccaagaacaacagccaccacuacaucauggugggcaacgagaccggccuggagcugacccugaccaacaccagcaucaucaaccacaaguucugcaaccugagcgacgcccacaagaagaaccuguacgaccacgcccugaugagcaucaucagcaccuuccaccugagcauccccaacuucaaccaguacgaggccaugagcugcgacuucaacggcggcaagaucagcgugcaguacaaccugagccacagcuucgccguggacgccgccaaccacugcggcaccaucgccaacggcgugcugcagaccuucaugagaauggccuggggcggcagcuacaucgcccuggacagcggcaagggcaacugggacugcaucaugaccagcuaccaguaccugaucauccagaacaccaccugggaggaccacugccaguucagcagacccagccccaucggcuaccugggccugcugagccagagaaccagagacaucuacaucagcagaagaagaagaggcaccuucaccuggacccugagcgacagcgagggcaacgaggcccccggcggcuacugccugaccagauggaugcugaucgaggccgagcugaagugcuucggcaacaccgccguggccaagugcaacgagaagcacgacgaggaguucugcgacaugcugagacuguucgacuucugcaagcaggccaucaagagacugaagacccccgcccagaugagcauccagcugaucaacaaggccgugaacgcccugaucaacgaccagcugaucaugaagaaccaccugagagacaucaugggcauccccuacugcaacuacagcagauacugguaccugaaccacaccgugaccggcaagaccagccugcccagaugcuggcuggugagcaacggcagcuaccugaacgagacccacuucagcgacgacaucgagcagcaggccgacaacaugaucaccgagaugcugcagaaggaguacauggacagacagggcaagaccccccugggccugguggaccuguucguguucagcaccagcuucuaccugaucagcaucuuccugcaccuggugaagauccccacccacagacacaucgugggcaagcccugccccaagccccacagacugaaccacaugggcaucugcagcugcggccuguacaagcaccccggcgugcccgugaaguggaagagaugaggacuagucccuguucccagagcccacuuuuuuuucuuuuuuugaaauaaaauagccugucuuucagaucuaaaaaaaaaaaaaaaaaaaaaaaaaaaaaaaaaaaaaaaaaaaaaaaaaaaaaaaaaaaaaaaaaaaaaaaaaaaaaaaaaaaaaaaaaaaaaaaaaaaa

SEQ ID NO: 23816 - RNA, 1740 nt, Artificial Sequence
  mRNA product Design a-2 (A100) comprising derived and/or modified sequence from LASV(GA391;Clade III)__CAA36645__GPCmut2 (opt4)
aggagaguccgcucagccagguugcagaagcggcuuagcguguguccuaaucuucucucugcguguagguaggccugugccgcaaacaagcuuaccaugggccagaucgugaccuucuuccaggaggugccccacgugaucgaggaggugaugaacaucgugcugaucgcccugagcauccuggccauccugaagggccuguacaacguggccaccugcggccugaucggccuggugaccuuccugcugcugagcggcagaagcugcagccugaucuacaagggcaccuacgagcugcagacccuggagcugaacauggagacccugaacaugugcaugccccugagcugcaccaagaacaacagccaccacuacaucagagugggcaacgagaccggccuggagcugacccugaccaacaccagcauccugaaccacaaguucugcaaccugagcgacgcccacaagagaaaccuguacgaccacagccugaugagcaucaucagcaccuuccaccugagcauccccaacuucaaccaguacgaggccaugagcugcgacuucaacggcggcaagaucaccgugcaguacaaccugagccacagcuucgccguggacgccgccggccacugcggcacccuggccaacggcgugcugcagaccuucaugagaauggccuggggcggcagcuacaucgcccuggacagcggcagaggcaacugggacugcaucaugaccagcuaccaguaccugaucauccagaacaccaccugggacgaccacugccaguucagcagacccagccccaucggcuaccugggccugcugagccagagaaccagagacaucuacaucagcagaagaagaagaggcaccuucaccuggacccugagcgacagcgagggcaacgagacccccggcggcuacugccugaccagauggaugcugaucgaggccgagcugaagugcuucggcaacaccgccguggccaagugcaacgagaagcacgacgaggaguucugcgacaugcugagacuguucgacuucugcaagcaggccaucagaagacugaagacccccgcccagaugagcauccagcugaucaacaaggccgugaacgcccugaucaacgaccagcugaucaugaagaaccaccugagagacaucaugggcauccccuacugcaacuacagcagauacugguaccugaaccacaccagcaccggcaagaccagccugcccagaugcuggcugaucagcaacggcagcuaccugaacgagaccaaguucagcgacgacaucgagcagcaggccgacaacaugaucaccgagaugcugcagaaggaguacaucgacagacagggcaagaccccccugggccugguggaccuguucguguucagcaccagcuucuaccugaucagcaucuuccugcaccuggugaagauccccacccacagacacaucgugggcaagcccugccccaagccccacagacugaaccacaugggcaucugcagcugcggccuguacaagcagcccggcgugcccgugagauggaagagaugaggacuagucccuguucccagagcccacuuuuuuuucuuuuuuugaaauaaaauagccugucuuucagaucuaaaaaaaaaaaaaaaaaaaaaaaaaaaaaaaaaaaaaaaaaaaaaaaaaaaaaaaaaaaaaaaaaaaaaaaaaaaaaaaaaaaaaaaaaaaaaaaaaaaa

SEQ ID NO: 23817 - RNA, 1743 nt, Artificial Sequence
  mRNA product Design a-2 (A100) comprising derived and/or modified sequence from LASV(AV;Clade V)__CCA30314__GPCmut2 (opt4)
aggagaguccgcucagccagguugcagaagcggcuuagcguguguccuaaucuucucucugcguguagguaggccugugccgcaaacaagcuuaccaugggccagaucgugaccuucuuccaggaggugccccacgugaucgaggaggugaugaacaucgugcugaucgcccugagcauccuggccgugcugaagggccuguacaacaucgccaccugcggccugaucggccugaucaccuuccugcugcugugcggcagaagcugcagcagcaaccuguacaagggcguguacgagcugcagagccuggaccugaacauggagacccugaacaugugcaugccccugagcugcaccaagaacaacagccaccacuacaucagagugggcaacgacaccggccuggagcugacccugaccaacaccagcauccugaaccacaaguucugcaaccugagcgacgcccacaagaaggaccuguacgaccacgcccugaugagcaucaucagcaccuuccaccugagcauccccaacuucaaccaguacgaggccaugagcugcgacuucaacggcggcaagaucagcgugcaguacaaccugagccacagcuacgccaucgacgccgccaaccacugcggcaccguggccaacggcauccugcagaccuucaugagaauggccuggggcggcagcuacaucgcccuggacagcggcagaggcaacugggacugcaucaugaccagcuaccaguaccugaucauccagaacaccaccugggagaaccacugccaguucagcagacccagccccaucggcuaccugggccugcugagccagagaaccagagacaucuacaucagcagaagaagaagaggcaccuucaccuggacccugagcgacagcgagggcaacgccacccccggcggcuacugccugaccagauggaugcugaucgaggccgagcugaagugcuucggcaacaccgccguggccaagugcaacgagaagcacgacgaggaguucugcgacaugcugagacuguucgacuucugcaagcaggccaucagcagacugaagagccccgcccagaugagcauccagcugaucaacaaggccgugaacgcccugaucaacgaccagcugaucaugaagaaccaccugagagacaucaugggcauccccuacugcaacuacagcaaguacugguaccugaaccacaccaucaccggcaagaccagccugcccaagugcuggcuggugagcaacggcagcuaccugaacgagacccacuucagcgacgacaucgagcagcaggccgacaacaugaucaccgagaugcugcagaaggaguacauggagagacagggcaagaccccccugggccugguggaccuguucguguucagcaccagcuucuaccugaucagcaucuuccugagacuggugaagauccccacccacagacacaucgugggcaagcccugccccaagccccacagacugaaccacaugggcaucugcagcugcggccuguacaagcagcccggcgugcccgugagauggaagagaugaggacuagucccuguucccagagcccacuuuuuuuucuuuuuuugaaauaaaauagccugucuuucagaucuaaaaaaaaaaaaaaaaaaaaaaaaaaaaaaaaaaaaaaaaaaaaaaaaaaaaaaaaaaaaaaaaaaaaaaaaaaaaaaaaaaaaaaaaaaaaaaaaaaaa

SEQ ID NO: 23818 - RNA, 1740 nt, Artificial Sequence
  mRNA product Design a-2 (A100) comprising derived and/or modified sequence from LASV(Togo/2016/7082;Clade VI)__AMR44577__GPCmut2 (opt4)
aggagaguccgcucagccagguugcagaagcggcuuagcguguguccuaaucuucucucugcguguagguaggccugugccgcaaacaagcuuaccaugggccagaucaucaccuucuuccaggaggugccccacgugaucgaggaggugaugaacaucgugcugaucgcccugagccugcuggccauccugaagggcguguacaacguggccaccugcggcaucaucggccuggugaccuuccuguuccugugcggcagaagcugcagccugaucuacaagggcagcuacgagcugcagacccuggagcugaacauggagacccugaacaugugcaugccccugagcugcaccaagaacagcagccaccacuacaucagagugggcaacgagaccggccuggagcugacccugaccaacaccagcaucaucaaccacaaguucugcaaccugagcgacgcccacaagagaaaccuguacgaccacgcccugaugagcauccugagcaccuuccaccugagcauccccaacuucaaccaguacgaggccaugagcugcgacuucaacggcggcaagaucagcgugcaguacaaccugagccacgccuacgccguggacgccgccgagcacugcggcaccguggccaacggcgugcugcagaccuucaugagaauggccuggggcggcagcuacaucgcccuggacagcggcagaggcaacugggacugcaucaugaccagcuaccaguaccugaucauccagaacaccaccugggaggaccacugccaguucagcagacccagccccaucggcuaccugggccugcugagccagagaaccagagacaucuacaucagcagaagaagaagaggcaccuucaccuggacccugagcgacagcgagggcaacgagacccccggcggcuacugccugaccagauggaugcugaucgaggccgagcugaagugcuucggcaacaccgccguggccaagugcaacgagaagcacgacgaggaguucugcgacaugcugagacuguucgacuucugcaagcaggccauccagagacugaagagccccgcccagaugagcauccagcugaucaacaaggccgugaacgcccugaucaacgaccagcugaucaugaagaaccaccugagagacaugaugggcauccccuacugcaacuacagcaaguacugguaccugaaccacaccagcagcggcagaaccagccugcccaagugcuggcuggugagcaacggcagcuaccugaacgagacccacuucagcgacgacaucgagcagcaggccgacaacaugaucaccgagaugcugcagaaggaguacaucgacagacagggcaagaccccccugggccugguggaccuguucguguucagcaccagcuucuaccugaucagcaucuuccugcaccugaucaagauccccacccacagacacaucgugggcaagcccugccccaagccccacagacugaaccacaugggcaucugcagcugcggccuguacaagcagcccggcgugcccaccagauggaagagaugaggacuagucccuguucccagagcccacuuuuuuuucuuuuuuugaaauaaaauagccugucuuucagaucuaaaaaaaaaaaaaaaaaaaaaaaaaaaaaaaaaaaaaaaaaaaaaaaaaaaaaaaaaaaaaaaaaaaaaaaaaaaaaaaaaaaaaaaaaaaaaaaaaaaa

SEQ ID NO: 23819 - RNA, 1740 nt, Artificial Sequence
  mRNA product Design a-2 (A100) comprising derived and/or modified sequence from LASV(KAK-428;Clade n.d. (VII))__ANH09740__GPCmut2 (opt4)
aggagaguccgcucagccagguugcagaagcggcuuagcguguguccuaaucuucucucugcguguagguaggccugugccgcaaacaagcuuaccaugggccagaucgugaccuucuuccaggaggugccccacgugaucgaggaggugaugaacaucgugcugaucgcccugagccugcuggccauccugaagggccuguacaacuucgccaccugcggcgugaucggccugaucaccuuccugcugcugugcggcagaagcugcagcgccaccuacaagggccaguacgagcugcagacccuggagcugaacauggagagccugaacaugugcaugccccugagcugcaccaagaacaacagccaccacuacaucagagccggcaacaacaccggccuggagcugacccugaccaacaccagcaucaucagccacaaguucugcaaccugagcgacgcccacaagaagaaccuguacgaccacacccugaugagcaucaucaccaccuuccaccugagcauccccaacuucaaccaguacgaggccaugagcugcgacuucaacggcggcaagaucagcauccaguacaaccugagccacagcuacgccggcgacgccgcccagcacugcggcaccguggccaacggcgugcugcagaccuucaugagaauggccuggggcggcagcuaccuggcccuggacagcggcagaagaggcugggacugcaucaucagcagcuaccaguaccugaucauccagaacaccaccugggacgaccacugccaguucagcagacccagccccaucggcuaccugggcuucgugagccagaagaccagagacaucuacaucagcagaagaagaagaggcaccuucaccuggacccugagcgacagcgagggccacgacaugcccggcggcuacugccugaccagauggaugcugaucgaggccgaccugaagugcuucggcaacaccgccguggccaagugcaacgagaagcacgacgaggaguucugcgacauguggagacuguucgacuucugcaagcaggccauccagagacugaaggcccccgcccagaugaacauccagcugaucaacaaggccgugaacgcccugaucaacgaccagcugaugaugaagaaccaccugagagacaucaugggcauccccuacugcaacuacagcaaguucugguaccugaacaacaccaccaccggcagaaccagccugcccagaugcuggcugaucagcaacggcagcuaccugaacgagacccacuucagcgacgacaucgagcagcaggccgacaacaugaucaccgagaugcugcagaaggaguacauggacagacagggcaagaccccccugggccugguggaccuguucguguucagcaccagcuucuaccugaucaccaucuuccugcaccuggugaagauccccacccacagacacaucgugggcaagcccugccccaagccccacagacugaaccacaugggcaucugcagcugcggccuguacaagcagcccggcgugcccgugagauggaagagaugaggacuagucccuguucccagagcccacuuuuuuuucuuuuuuugaaauaaaauagccugucuuucagaucuaaaaaaaaaaaaaaaaaaaaaaaaaaaaaaaaaaaaaaaaaaaaaaaaaaaaaaaaaaaaaaaaaaaaaaaaaaaaaaaaaaaaaaaaaaaaaaaaaaaa

SEQ ID NO: 23820 - RNA, 1740 nt, Artificial Sequence; identical to SEQ ID NO: 23814
  mRNA product Design a-2 (A100) comprising derived and/or modified sequence from LASV(Pinneo-NIG-1969;Clade I)__AIT17836__GPCmut2 (opt4)

SEQ ID NO: 23821 - RNA, 1740 nt, Artificial Sequence
  mRNA product Design a-2 (A100) comprising derived and/or modified sequence from LASV(ISTH0009-NIG-2011;Clade II)__AIT17404__GPCmut2 (opt4)
aggagaguccgcucagccagguugcagaagcggcuuagcguguguccuaaucuucucucugcguguagguaggccugugccgcaaacaagcuuaccaugggccagaucaucaccuucuuccaggaggugccccacgugaucgaggaggugaugaacaucgugcugaucgcccugagccugcuggccauccugaagggcaucuacaacguggccaccugcggccuguucggccuggugagcuuccugcugcugugcggcagaagcugcagcaccaccuacaagggcguguacgagcugcagacccuggagcuggacauggccagccugaacaugugcaugccccugagcugcaccaagaacaacagccaccacuacaucauggugggcaacgagaccggccuggagcugacccugaccaacaccagcaucaucaaccacaaguucugcaaccugagcgacgcccacaagaagaaccuguacgaccacgcccugaugagcaucaucagcaccuuccaccugagcauccccaacuucaaccaguacgaggccaugagcugcgacuucaacggcggcaagaucagcgugcaguacaaccugagccacgccuacgccguggacgccgccaaccacugcggcaccaucgccaacggcgugcugcagaccuucaugagaauggccuggggcggcagcuacaucgcccuggacagcggcaagggcagcugggacugcaucaugaccagcuaccaguaccugaucauccagaacaccaccugggaggaccacugccaguucagcagacccagccccaucggcuaccugggccugcugagccagagaaccagagacaucuacaucagcagaagaagaagaggcaccuucaccuggacccugagcgacagcgagggcaacgagacccccggcggcuacugccugaccagauggaugcugaucgaggccgagcugaagugcuucggcaacaccgccguggccaagugcaacgagaagcacgacgaggaguucugcgacaugcugagacuguucgacuucugcaagcaggccaucagaagacugaagacccccgcccagaugagcauccagcugaucaacaaggccgugaacgcccugaucaacgaccagcugaucaugaagaaccaccugagagacaucaugggcauccccuacugcaacuacagcaaguacugguaccugaaccacaccgugaccggcaagaccagccugcccagaugcuggcuggugagcaacggcagcuaccugaacgagacccacuucagcgacgacaucgagcagcaggccgacaacaugaucaccgagcugcugcagaaggaguacauggacagacagggcaagaccccccugggccugguggaccuguucguguucagcaccagcuucuaccugaucagcaucuuccugcaccugaucaagauccccacccacagacacaucaccggcaagcccugccccaagccccacagacugaaccacaugggcaucugcagcugcggccuguacaagcaccccggcgugcccgugaaguggaagagaugaggacuagucccuguucccagagcccacuuuuuuuucuuuuuuugaaauaaaauagccugucuuucagaucuaaaaaaaaaaaaaaaaaaaaaaaaaaaaaaaaaaaaaaaaaaaaaaaaaaaaaaaaaaaaaaaaaaaaaaaaaaaaaaaaaaaaaaaaaaaaaaaaaaaa

SEQ ID NO: 23822 - RNA, 1740 nt, Artificial Sequence
  mRNA product Design a-2 (A100) comprising derived and/or modified sequence from LASV(ISTH2010-NIG-2012;Clade II)__AIT17482__GPCmut2 (opt4)
aggagaguccgcucagccagguugcagaagcggcuuagcguguguccuaaucuucucucugcguguagguaggccugugccgcaaacaagcuuaccaugggccagaucaucaccuucuuccaggaggugccccacgugaucgaggaggugaugaacaucgugcugaucgcccugagccugcuggccauccugaagggcaucuacaacguggccaccugcggccuguucggccuggugagcuuccugcugcugugcggcagaagcugcagcaccaccuacaagggcguguacgagcugcagacccuggagcuggacauggccagccugaacaugugcaugccccugagcugcaccaagaacaacagccaccacuacaucauggugggcaacgagaccggccuggagcugacccugaccaacaccagcaucaucaaccacaaguucugcaaccugagcgacgcccacaagaagaaccuguacgaccacgcccugaugagcaucaucagcaccuuccaccugagcauccccaacuucaaccaguacgaggccaugagcugcgacuucaacggcggcaagaucagcgugcaguacaaccugagccacgccuacgccguggacgccgccaaccacugcggcaccaucgccaacggcgugcugcagaccuucaugagaauggccuggggcggcagcuacaucgcccuggacagcggcaagggcagcugggacugcaucaugaccagcuaccaguaccugaucauccagaacaucaccugggaggaccacugccaguucagcagacccagccccaucggcuaccugggccugcugagccagagaaccagagacaucuacaucagcagaagaagaagaggcaccuucaccuggacccugagcgacagcgagggcaacgagacccccggcggcuacugccugaccagauggaugcugaucgaggccgagcugaagugcuucggcaacaccgccguggccaagugcaacgagaagcacgacgaggaguucugcgacaugcugagacuguucgacuucugcaagcaggccaucagaagacugaagacccccgcccagaugagcauccagcugaucaacaaggccgugaacgcccugaucaacgaccagcugaucaugaagaaccaccugagagacaucaugggcauccccuacugcaacuacagcaaguacugguaccugaaccacaccgugaccggcaagaccagccugcccagaugcuggcuggugagcaacggcagcuaccugaacgagacccacuucagcgacgacaucgagcagcaggccgacaacaugaucaccgagcugcugcagaaggaguacaucgacagacagggcaagaccccccugggccugguggaccuguucguguucagcaccagcuucuaccugaucagcaucuuccugcaccuggugaagauccccacccacagacacguggugggcaagcccugccccaagccccacagacugaaccacaugggcaucugcagcugcggccuguacaagcaccccggcgugcccgugaaguggaagagaugaggacuagucccuguucccagagcccacuuuuuuuucuuuuuuugaaauaaaauagccugucuuucagaucuaaaaaaaaaaaaaaaaaaaaaaaaaaaaaaaaaaaaaaaaaaaaaaaaaaaaaaaaaaaaaaaaaaaaaaaaaaaaaaaaaaaaaaaaaaaaaaaaaaaa

SEQ ID NO: 23823 - RNA, 1740 nt, Artificial Sequence
  mRNA product Design a-2 (A100) comprising derived and/or modified sequence from LASV(Lassa virus/H.sapiens-wt/NGA/2015/ISTH_0543;Clade II)__AVO03639__GPCmut2 (opt4)
aggagaguccgcucagccagguugcagaagcggcuuagcguguguccuaaucuucucucugcguguagguaggccugugccgcaaacaagcuuaccaugggccagaucaucaccuucuuccaggaggugccccacgugaucgaggaggugaugaacaucgugcugaucgcccugagccugcuggccauccugaagggcaucuacaacguggccaccugcggccuguucggccuggugagcuuccugcugcugugcggcagaagcugcagcaccaccuacaagggcguguacgagcugcagacccuggagcuggacauggccaaccugaacaugugcaugccccugagcugcaccaagaacaacagccaccacuacaucauggugggcaacgagaccggccuggagcugacccugaccaacaccagcaucaucaaccacaaguucugcaaccugagcgacgcccacaagaagaaccuguacgaccacgcccugaugagcaucaucagcaccuuccaccugagcauccccaacuucaaccaguacgaggccaugagcugcgacuucaacggcggcaagaucagcgugcaguacaaccugagccacaccuacgccguggacgccgccaaccacugcggcaccaucgccaacggcgugcugcagaccuucaugagaauggccuggggcggcagcuacaucgcccuggacagcggcaagggcagcugggacugcaucaugaccagcuaccaguaccuggugauccagaacaccaccugggaggaccacugccaguucagcagacccagccccaucggcuaccugggccugcugagccagagaaccagagacaucuacaucagcagaagaagaagaggcaccuucaccuggacccugagcgacagcgagggcaacgagacccccggcggcuacugccugaccagauggaugcugaucgaggccgagcugaagugcuucggcaacaccgccguggccaagugcaacgagaagcacgacgaggaguucugcgacaugcugagacuguucgacuucugcaagcaggccaucagaagacugaagacccccgcccagaugagcauccagcugaucaacaaggccgugaacgcccugaucaacgaccagcugaucaugaagaaccaccugagagacaucaugggcauccccuacugcaacuacagcaaguacugguaccugaaccacaccgugaccggcaagaccagccugcccagaugcuggcuggugagcaacggcagcuaccugaacgagacccacuucagcgacgacaucgagcagcaggccgacaacaugaucaccgagcugcugcagaaggaguacaucgacagacagggcaagaccccccugggccugguggaccuguucguguucagcaccagcuucuaccugaucagcaucuuccugcaccuggugaagauccccacccacagacacaucaccggcaagcccugccccaagccccacagacugaaccacaugggcaucugcagcugcggccuguacaagcaccccggcgugcccgugaaguggaagagaugaggacuagucccuguucccagagcccacuuuuuuuucuuuuuuugaaauaaaauagccugucuuucagaucuaaaaaaaaaaaaaaaaaaaaaaaaaaaaaaaaaaaaaaaaaaaaaaaaaaaaaaaaaaaaaaaaaaaaaaaaaaaaaaaaaaaaaaaaaaaaaaaaaaaa

SEQ ID NO: 23824 - RNA, 1740 nt, Artificial Sequence
  mRNA product Design a-2 (A100) comprising derived and/or modified sequence from LASV(Lassa virus/H.sapiens-wt/NGA/2016/ISTH_0009;Clade II)__AVO03571__GPCmut2 (opt4)
aggagaguccgcucagccagguugcagaagcggcuuagcguguguccuaaucuucucucugcguguagguaggccugugccgcaaacaagcuuaccaugggccagaucaucaccuucuuccaggaggugccccacgugaucgaggaggugaugaacaucgugcugaucgcccugagccugcuggccauccugaagggcaucuacaacguggccaccugcggccugcugggccuggugagcuuccugcugcugugcggcagaagcugcagcaccaccuacaagggcguguacgagcugcagacccuggagcuggacauggccagccugaacaugugcaugccccugagcugcaccaagaacaacagccaccacuacaucauggugggcaacgagaccggccuggagcugacccugaccaacaccagcaucaucaaccacaaguucugcaaccugagcgacgcccacaagaagaaccuguacgaccacgcccugaugagcaucaucagcaccuuccaccugagcauccccaacuucaaccaguacgaggccaugagcugcgacuucaacggcggcagaaucagcgugcaguacaaccugagccacagcuacgccguggacgccgccaaccacugcggcaccaucgccaacggcgugcugcagaccuucaugagaauggccuggggcggcagcuacaucgcccuggacagcggcaagggcagcugggacugcaucaugaccagcuaccaguaccugaucauccagaacaccaccugggaggaccacugccaguucagcagacccagccccaucggcuaccugggccugcugagccagagaaccagagacaucuacaucagcagaagaagaagaggcaccuucaccuggacccugagcgacagcgagggcaacgagacccccggcggcuacugccugaccagauggaugcugaucgaggccgagcugaagugcuucggcaacaccgccguggccaagugcaacgagaagcacgacgaggaguucugcgacaugcugagacuguucgacuucugcaagcaggccaucagaagacugaagacccccgcccagaugagcauccagcugaucaacaaggccgugaacgcccugaucaacgaccagcugaucaugaagaaccaccugagagacaucaugggcauccccuacugcaacuacagcaaguacugguaccugaaccacaccgugaccggcaagaccagccugcccagaugcuggcuggugagcaacggcagcuaccugaacgagacccacuucagcgacgacaucgagcagcaggccgacaacaugaucaccgagcugcugcagaaggaguacaucgacagacagggcaagaccccccugggccugguggaccuguucguguucagcaccagcuucuaccugaucagcaucuuccugcaccuggugaagauccccacccacagacacaucaccggcaagcccugccccaagccccacagacugaaccacaugggcaucugcagcugcggccuguacaaccaccccggcgugcccgugaaguggaagagaugaggacuagucccuguucccagagcccacuuuuuuuucuuuuuuugaaauaaaauagccugucuuucagaucuaaaaaaaaaaaaaaaaaaaaaaaaaaaaaaaaaaaaaaaaaaaaaaaaaaaaaaaaaaaaaaaaaaaaaaaaaaaaaaaaaaaaaaaaaaaaaaaaaaaa

SEQ ID NO: 23825 - RNA, 1740 nt, Artificial Sequence
  mRNA product Design a-2 (A100) comprising derived and/or modified sequence from LASV(Lassa virus/H.sapiens-wt/NGA/2016/ISTH_0017;Clade II)__AVO03567__GPCmut2 (opt4)
aggagaguccgcucagccagguugcagaagcggcuuagcguguguccuaaucuucucucugcguguagguaggccugugccgcaaacaagcuuaccaugggccagaucaucaccuucuuccaggaggugccccacgugaucgaggaggugaugaacaucgugcugaucgcccugagccugcuggccauccugaagggcaucuacaacguggccaccugcggccuguucggccuggugagcuuccugcugcugugcggcagaagcugcagcaccaccuacaagggcguguacgagcugcagacccuggagcuggacauggccagccugaacaugugcaugccccugagcugcaccaagaacaacagccaccacuacaucauggugggcaacgagaccggccuggagcugacccugaccaacaccagcaucaucaaccacaaguucugcaaccugagcgacgcccacaagaagaaccuguacgaccacgcccugaugagcaucaucagcaccuuccaccugagcauccccaacuucaaccaguacgaggccaugagcugcgacuucaacggcggcaagaucagcgugcaguacaaccugagccacaccuacgccaucgacgccgccaaccacugcggcaccaucgccaacggcgugcugcagaccuucaugagaauggccuggggcggcagcuacaucgcccuggacagcggcaagggcagcugggacugcaucaugaccagcuaccaguaccugaucauccagaacaccaccugggaggaccacugccaguucagcagacccagccccaucggcuaccugggccugcugagccagagaaccagagacaucuacaucagcagaagaagaagaggcaccuucaccuggacccugagcgacagcgagggcaacgagacccccggcggcuacugccugaccagauggaugcugaucgaggccgagcugaagugcuucggcaacaccgccguggccaagugcaacgagaagcacgacgaggaguucugcgacaugcugagacuguucgacuucugcaagcaggccaucagaagacugaagacccccgcccagaugagcauccagcugaucaacaaggccgugaacgcccugaucaacgaccagcugaucaugaagaaccaccugagagacaucaugggcauccccuacugcaacuacagcaaguacugguaccugaaccacaccgugaccggcaagaccagccugcccagaugcuggcuggugagcaacggcagcuaccugaacgagacccacuucagcgacgacaucgagcagcaggccgacaacaugaucaccgagcugcugcagaaggaguacauggacagacagggcaagaccccccugggccugguggaccuguucguguucagcaccagcuucuaccugaucagcaucuuccugcaccuggugagaauccccacccacagacacgugaucggcaagcccugccccaagccccacagacugaaccacaugggcaucugcagcugcggccuguacaagcaccccggcgugcccgugaaguggaagagaugaggacuagucccuguucccagagcccacuuuuuuuucuuuuuuugaaauaaaauagccugucuuucagaucuaaaaaaaaaaaaaaaaaaaaaaaaaaaaaaaaaaaaaaaaaaaaaaaaaaaaaaaaaaaaaaaaaaaaaaaaaaaaaaaaaaaaaaaaaaaaaaaaaaaa

SEQ ID NO: 23826 - RNA, 1740 nt, Artificial Sequence
  mRNA product Design a-2 (A100) comprising derived and/or modified sequence from LASV(Lassa virus/H.sapiens-wt/NGA/2018/ISTH_0959;Clade II)__AVV65099__GPCmut2 (opt4)
aggagaguccgcucagccagguugcagaagcggcuuagcguguguccuaaucuucucucugcguguagguaggccugugccgcaaacaagcuuaccaugggccagaucaucaccuucuuccaggaggugccccacgugaucgaggaggugaugaacaucgugcugaucgcccugagccugcuggccauccugaagggcaucuacaacguggugaccugcggccuguucggccuggugagcuuccugcugcugugcggcagaagcugcagcaccaccuacaagggcguguacgagcugcagacccuggagcuggacauggccagccugaacaugugcaugccccugagcugcaccaagaacaacagccaccacuacaucauggugggcaacgagaccggccuggagcugacccugaccaacaccagcaucaucaaccacaaguucugcaaccugagcgacgcccacaagaagaaccuguacgaccacgcccugaugagcaucaucagcaccuuccaccugagcauccccaacuucaaccaguacgaggccaugagcugcgacuucaacggcggcaagaucagcgugcaguacaaccugagccacgccuacgccaucgacgccgccaaccacugcggcaccaucgccaacggcgugcugcagaccuucaugagaauggccuggggcggcagcuacaucgcccuggacagcggcaagggcagcugggacugcaucaugaccagcuaccaguaccugaucauccagaacaccaccugggaggaccacugccaguucagcagacccagccccaucggcuaccugggccugcugagccagagaaccagagacaucuacaucagcagaagaagaagaggcaccuucaccuggacccugagcgacagcgagggcaacgagacccccggcggcuacugccugaccagauggaugcugaucgaggccgagcugaagugcuucggcaacaccgccguggccaagugcaacgagaagcacgacgaggaguucugcgacaugcugagacuguucgacuucugcaagcaggccaucagaagacugaagacccccgcccagaugagcauccagcugaucaacaaggccgugaacgcccugaucaacgaccagcugaucaugaagaaccaccugagagacaucaugggcauccccuacugcaacuacagcaaguacugguaccugaaccacaccgugaccggcaagaccagccugcccagaugcuggcuggugagcaacggcagcuaccugaacgagacccacuucagcgacgacaucgagcagcaggccgacaacaugaucaccgagcugcugcagaaggaguacaucgacagacagggcaagaccccccugggccugguggaccuguucguguucagcaccagcuucuaccugaucagcaucuuccugcaccuggugaagauccccacccacagacacgugaucggcaagcccugccccaagccccacagacugaaccacaugggcaucugcagcugcggccuguacaagcaccccggcgugcccgugaaguggaagagaugaggacuagucccuguucccagagcccacuuuuuuuucuuuuuuugaaauaaaauagccugucuuucagaucuaaaaaaaaaaaaaaaaaaaaaaaaaaaaaaaaaaaaaaaaaaaaaaaaaaaaaaaaaaaaaaaaaaaaaaaaaaaaaaaaaaaaaaaaaaaaaaaaaaaa

SEQ ID NO: 23827 - RNA, 1740 nt, Artificial Sequence
  mRNA product Design a-2 (A100) comprising derived and/or modified sequence from LASV(LASV003-NIG-2008;Clade II)__AIT17580__GPCmut2 (opt4)
aggagaguccgcucagccagguugcagaagcggcuuagcguguguccuaaucuucucucugcguguagguaggccugugccgcaaacaagcuuaccaugggccagaucaucaccuucuuccaggaggugccccacgugaucgaggaggugaugaacaucgugcugaucgcccugagccugcuggccauccugaagggcaucuacaacguggccaccugcggccuguucggccuggugagcuuccugcugcugugcggcagaagcugcagcaccaccuacaagggcguguacgagcugcagacccuggagcuggacauggccagccugaacaugugcaugccccugagcugcaccaagaacaacagccaccacuacaucauggugggcaacgagaccggccuggagcugacccugaccaacaccagcaucaucaaccacaaguucugcaaccugagcgacgcccacaagaagaaccuguacgaccacgcccugaugagcaucaucagcaccuuccaccugagcauccccaacuucaaccaguacgaggccaugagcugcgacuucaacggcggcaagaucagcgugcaguacaaccugagccacaccuacgccguggacgccgccaaccacugcggcaccaucgccaacggcgugcugcagaccuucaugagaauggccuggggcggcagcuacaucgcccuggacagcggcaagggcagcugggacugcaucaugaccagcuaccaguaccugaucauccagaacaccaccugggaggaccacugccaguucagcagacccagccccaucggcuaccugggccugcugagccagagaaccagagacaucuacaucagcagaagaagaagaggcaccuucaccuggacccugagcgacagcgagagcaacgagacccccggcggcuacugccugaccagauggaugcugaucgaggccgagcugaagugcuucggcaacaccgccguggccaagugcaacgagaagcacgacgaggaguucugcgacaugcugagacuguucgacuucugcaagcaggccaucagaagacugaaggcccccgcccagaugagcauccagcugaucaacaaggccgugaacgcccugaucaacgaccagcugaucaugaagaaccaccugagagacaucaugggcauccccuacugcaacuacagcaaguacugguaccugaaccacaccgugaccggcagaaccagccugcccagaugcuggcuggugagcaacggcagcuaccugaacgagacccacuucagcgacgacaucgagcagcaggccgacaacaugaucaccgagcugcugcagaaggaguacauggacagacagggcaagaccccccugggccugguggaccuguucguguucagcaccagcuucuaccugaucagcaucuuccugcaccuggugaagauccccacccacagacacgugaucggcaagcccugccccaagccccacagacugaaccacaugggcaucugcagcugcggccuguacaagcaccccggcgugcccgugaaguggaagagaugaggacuagucccuguucccagagcccacuuuuuuuucuuuuuuugaaauaaaauagccugucuuucagaucuaaaaaaaaaaaaaaaaaaaaaaaaaaaaaaaaaaaaaaaaaaaaaaaaaaaaaaaaaaaaaaaaaaaaaaaaaaaaaaaaaaaaaaaaaaaaaaaaaaaa

SEQ ID NO: 23828 - RNA, 1740 nt, Artificial Sequence
  mRNA product Design a-2 (A100) comprising derived and/or modified sequence from LASV(LASV035-NIG-2009;Clade II)__AIT17588__GPCmut2 (opt4)
aggagaguccgcucagccagguugcagaagcggcuuagcguguguccuaaucuucucucugcguguagguaggccugugccgcaaacaagcuuaccaugggccagaucaucaccuucuuccaggaggugccccacgugaucgaggaggugaugaacaucgugcugaucgcccugagccugcuggccauccugaagggcaucuacaacguggccaccugcggccuguucggccuggugagcuuccugcugcugugcggcagaagcugcagcaccaccuacaagggcguguacgagcugcagacccuggagcuggacauggccagccugaacaugugcaugccccugagcugcaccaagaacaacagccaccacuacaucauggugggcaacgagaccggccuggagcugacccugaccaacaccagcaucaucaaccacaaguucugcaaccugagcgacgcccacaagaagaaccuguacgaccacgcccugaugagcaucaucagcaccuuccaccugagcauccccaacuucaaccaguacgaggccaugagcugcgacuucaacggcggcaagaucagcgugcaguacaaccugagccacgccuacgccguggacgccgccaaccacugcggcaccaucgccaacggcgugcugcagaccuucaugagaauggccuggggcggcagcuacaucgcccuggacagcggcaagggcagcugggacugcaucaugaccagcuaccaguaccugaucauccagaacaccaccugggaggaccacugccaguucagcagacccagccccaucggcuaccugggccugcugagccagagaaccagagacaucuacaucagcagaagaagaagaggcaccuucaccuggacccugagcgacagcgagggcaacgagacccccggcggcuacugccugaccagauggaugcugaucgaggccgagcugaagugcuucggcaacaccgccguggccaagugcaacgagaagcacgacgaggaguucugcgacaugcugagacuguucgacuucugcaagcaggccaucagaagacugaaggcccccgcccagaugagcauccagcugaucaacaaggccgugaacgcccugaucaacgaccagcugaucaugaagaaccaccugagagacaucaugggcauccccuacugcaacuacagcaaguacugguaccugaaccacaccgugaccggcaagaccagccugcccagaugcuggcuggugagcaacggcagcuaccugaacgagacccacuucagcgacgacaucgagcagcaggccgacaacaugaucaccgagcugcugcagaaggaguacaucgacagacagggcaagaccccccugggccugguggaccuguucguguucagcaccagcuucuaccugaucagcaucuuccugcaccuggugaagauccccacccacagacacgugaucggcaagcccugccccaagccccacagacugaaccacaugggcaucugcagcugcggccuguacaagcaccccggcgugcccgugaaguggaagagaugaggacuagucccuguucccagagcccacuuuuuuuucuuuuuuugaaauaaaauagccugucuuucagaucuaaaaaaaaaaaaaaaaaaaaaaaaaaaaaaaaaaaaaaaaaaaaaaaaaaaaaaaaaaaaaaaaaaaaaaaaaaaaaaaaaaaaaaaaaaaaaaaaaaaa

SEQ ID NO: 23829 - RNA, 1740 nt, Artificial Sequence
  mRNA product Design a-2 (A100) comprising derived and/or modified sequence from LASV(LASV1000-NIG-2009;Clade II)__AIT17782__GPCmut2 (opt4)
aggagaguccgcucagccagguugcagaagcggcuuagcguguguccuaaucuucucucugcguguagguaggccugugccgcaaacaagcuuaccaugggccagaucaucaccuucuuccaggaggugccccacgugaucgaggaggugaugaacaucgugcugaucgcccugagccugcuggccauccugaagggcaucuacaacguggccaccugcggccuguucggccuggugagcuuccugcugcugugcggcagaagcugcagcaccaccuacaagggcguguacgagcugcagacccuggagcuggacauggccagccugaacaugugcaugccccugagcugcaccaagaacaacagccaccacuacaucauggugggcaacgagaccggccuggagcugacccugaccaacaccagcaucaucaaccacaaguucugcaaccugagcgacgcccacaagaagaaccuguacgaccacgcccugaugagcaucaucagcaccuuccaccugagcauccccaacuucaaccaguacgaggccaugagcugcgacuucaacggcggcaagaucagcgugcaguacaaccugagccacaccuacgccguggacgccgccaaccacugcggcaccaucgccaacggcgugcugcagaccuucaugagaauggccuggggcggcagcuacaucgcccuggacagcggcaagggcagcugggacugcaucaugaccagcuaccaguaccugaucauccagaacaccaccugggaggaccacugccaguucagcagacccagccccaucggcuaccugggccugcugagccagagaaccagagacaucuacaucagcagaagaagaagaggcaccuucaccuggacccugagcgacagcgagggcaacgagacccccggcggcuacugccugaccagauggaugcugaucgaggccgagcugaagugcuucggcaacaccgccguggccaagugcaacgagaagcacgacgaggaguucugcgacaugcugagacuguucgacuucugcaagcaggccaucaagagacugaagacccccgcccagaugagcauccagcugaucaacaaggccgugaacgcccugaucaacgaccagcugaucaugaagaaccaccugagagacaucaugggcauccccuacugcaacuacagcaaguacugguaccugaaccacaccgugaccggcaagaccagccugcccagaugcuggcuggugagcaacggcagcuaccugaacgagacccacuucagcgacgacaucgagcagcaggccgacaacaugaucaccgagcugcugcagaaggaguacaucgacagacagggcaagaccccccugggccugguggaccuguucguguucagcaccagcuucuaccugaucagcaucuuccugcaccuggugaagauccccacccacagacacguggugggcaagcccugccccaagccccacagacugaaccacaugggcaucugcagcugcggccuguacaagcaccccggcgugcccgugaaguggaagagaugaggacuagucccuguucccagagcccacuuuuuuuucuuuuuuugaaauaaaauagccugucuuucagaucuaaaaaaaaaaaaaaaaaaaaaaaaaaaaaaaaaaaaaaaaaaaaaaaaaaaaaaaaaaaaaaaaaaaaaaaaaaaaaaaaaaaaaaaaaaaaaaaaaaaa

SEQ ID NO: 23830 - RNA, 1740 nt, Artificial Sequence
  mRNA product Design a-2 (A100) comprising derived and/or modified sequence from LASV(LASV221-NIG-2010;Clade II)__AIT17624__GPCmut2 (opt4)
aggagaguccgcucagccagguugcagaagcggcuuagcguguguccuaaucuucucucugcguguagguaggccugugccgcaaacaagcuuaccaugggccagaucaucaccuucuuccaggaggugccccacgugaucgaggaggugaugaacaucgugcugaucgcccugagccugcuggccauccugaagggcaucuacaacguggccaccugcggccuguucggccuggugagcuuccugcugcugugcggcagaagcugcagcaccaccuacaagggcguguacgagcugcagacccuggagcuggacauggccagccugaacaugugcaugccccugagcugcaccaagaacaacagccaccacuacaucauggugggcaacgagaccggccuggagcugacccugaccaacaccagcaucaucaaccacaaguucugcaaccugagcgacgcccacaagaagaaccuguacgaccacgcccugaugagcaucaucagcaccuuccaccugagcauccccaacuucaaccaguacgaggccaugagcugcgacuucaacggcggcaagaucagcgugcaguacaaccugagccacaccuacgccaucgacgccgccaaccacugcggcaccaucgccaacggcgugcugcagaccuucaugagaauggccuggggcggcagcuacaucgcccuggacagcggcaagggcagcugggacugcaucaugaccagcuaccaguaccugaucauccagaacaccaccugggaggaccacugccaguucagcagacccagccccaucggcuaccugggccugcugagccagagaaccagagacaucuacaucagcagaagaagaagaggcaccuucaccuggacccugagcgacagcgagggcaacgagacccccggcggcuacugccugaccagauggaugcugaucgaggccgagcugaagugcuucggcaacaccgccguggccaagugcaacgagaagcacgacgaggaguucugcgacaugcugagacuguucgacuucugcaagcaggccaucagaagacugaagacccccgcccagaugagcauccagcugaucaacaaggccgugaacgcccugaucaacgaccagcugaucaugaagaaccaccugagagacaucaugggcauccccuacugcaacuacagcaaguacugguaccugaaccacaccgugaccggcaagaccagccugcccagaugcuggcuggugagcaacggcagcuaccugaacgagacccacuucagcgacgacaucgagcagcaggccgacaacaugaucaccgagaugcugcagaaggaguacauggacagacagggcaagaccccccugggccugguggaccuguucguguucagcaccagcuucuaccugaucagcaucuuccugcaccuggugaagauccccacccacagacacgugaucggcaagcccugccccaagccccacagacugaaccacaugggcaucugcagcugcggccuguacaagcaccccggcgugcccgugaaguggaagagaugaggacuagucccuguucccagagcccacuuuuuuuucuuuuuuugaaauaaaauagccugucuuucagaucuaaaaaaaaaaaaaaaaaaaaaaaaaaaaaaaaaaaaaaaaaaaaaaaaaaaaaaaaaaaaaaaaaaaaaaaaaaaaaaaaaaaaaaaaaaaaaaaaaaaa

SEQ ID NO: 23831 - RNA, 1740 nt, Artificial Sequence
  mRNA product Design a-2 (A100) comprising derived and/or modified sequence from LASV(LASV237-NIG-2010;Clade II)__AIT17638__GPCmut2 (opt4)
aggagaguccgcucagccagguugcagaagcggcuuagcguguguccuaaucuucucucugcguguagguaggccugugccgcaaacaagcuuaccaugggccagaucaucaccuucuuccaggaggugccccacgugaucgaggaggugaugaacaucgugcugaucgcccugagccugcuggccauccugaagggcaucuacaacguggccaccugcggccuguucggccuggugagcuuccugcugcugugcggcagaagcugcagcaccaccuacaagggcguguacgagcugcagacccuggagcuggacauggccagccugaacaugugcaugccccugagcugcaccaagaacaacagccaccacuacaucauggugggcaacgagaccggccuggagcugacccugaccaacaccagcaucaucaaccacaaguucugcaaccugagcgacgcccacaagaaggaccuguacgaccacgcccugaugagcaucaucagcaccuuccaccugagcauccccaacuucaaccaguacgaggccaugagcugcgacuucaacggcggcaagaucagcgugcaguacaaccugagccacaccuacgccguggacgccgccaaccacugcggcaccaucgccaacggcgugcugcagaccuucaugagaauggccuggggcggcagcuacaucgcccuggacagcggcaagggcagcugggacugcaucaugaccagcuaccaguaccugaucauccagaacaccaccugggaggaccacugccaguucagcagacccagccccaucggcuaccugggccugcugagccagagaaccagagacaucuacaucagcagaagaagaagaggcaccuucaccuggacccugagcgacagcgagggcaacgagacccccggcggcuacugccugaccagauggaugcugaucgaggccgagcugaagugcuucggcaacaccgccguggccaagugcaacgagaagcacgacgaggaguucugcgacaugcugagacuguucgacuucugcaagcaggccaucagaagacugaagacccccgcccagaugagcauccagcugaucaacaaggccgugaacgcccugaucaacgaccagcugaucaugaagaaccaccugagagacaucaugggcauccccuacugcaacuacagcaaguacugguaccugaaccacaccgugaccggcaagaccagccugcccagaugcuggcuggugagcaacggcagcuaccugaacgagacccacuucagcgacgacaucgagcagcaggccgacaacaugaucaccgagcugcugcagaaggaguacauggacagacagggcaagaccccccugggccugguggaccuguucguguucagcaccagcuucuaccugaucagcaucuuccugcaccugaucaagauccccacccacagacacaucaccggcaagcccugccccaagccccacagacugaaccacaugggcaucugcagcugcggccuguacaagcaccccggcgugcccgugaaguggaagagaugaggacuagucccuguucccagagcccacuuuuuuuucuuuuuuugaaauaaaauagccugucuuucagaucuaaaaaaaaaaaaaaaaaaaaaaaaaaaaaaaaaaaaaaaaaaaaaaaaaaaaaaaaaaaaaaaaaaaaaaaaaaaaaaaaaaaaaaaaaaaaaaaaaaaa

SEQ ID NO: 23832 - RNA, 1740 nt, Artificial Sequence
  mRNA product Design a-2 (A100) comprising derived and/or modified sequence from LASV(LASV253-NIG-2011;Clade II)__AIT17670__GPCmut2 (opt4)
aggagaguccgcucagccagguugcagaagcggcuuagcguguguccuaaucuucucucugcguguagguaggccugugccgcaaacaagcuuaccaugggccagaucaucaccuucuuccaggaggugccccacgugaucgaggaggugaugaacaucgugcugaucgcccugagccugcuggccauccugaagggcaucuacaacguggccaccugcggccuguucggccuggugagcuuccugcugcugugcggcagaagcugcagcaccaccuacaagggcguguacgagcugcagacccuggagcuggacauggccagccugaacaugugcaugccccugagcugcaccaagaacaacagccaccacuacaucauggugggcaacgagaccggccuggagcugacccugaccaacaccagcaucaucaaccacaaguucugcaaccugagcgacgcccacaagaagaaccuguacgaccacgcccugaugagcaucaucagcaccuuccaccugagcauccccaacuucaaccaguacgaggccaugagcugcgacuucaacggcggcaagaucagcgugcaguacaaccugagccacaccuacgccguggacgccgccaaccacugcggcaccaucgccaacggcgugcugcagaccuucaugagaauggccuggggcggcagcuacaucgcccuggacagcggcaagggcagcugggacugcaucaugaccagcuaccaguaccugaucauccagaacaccaccugggaggaccacugccaguucagcagacccagccccaucggcuaccugggccugcugagccagagaaccagagacaucuacaucagcagaagaagaagaggcaccuucaccuggacccugagcgacagcgagggcaacgagacccccggcggcuacugccugaccagauggaugcugaucgaggccgagcugaagugcuucggcaacaccgccguggccaagugcaacgagaagcacgacgaggaguucugcgacaugcugagacuguucgacuucugcaagcaggccaucagaagacugaaggcccccgcccagaugagcauccagcugaucaacaaggccgugaacgcccugaucaacgaccagcugaucaugaagaaccaccugagagacaucaugggcauccccuacugcaacuacagcaaguacugguaccugaaccacaccgugaccggcagaaccagccugcccagaugcuggcuggugagcaacggcagcuaccugaacgagacccacuucagcgacgacaucgagcagcaggccgacaacaugaucaccgagcugcugcagaaggaguacaucgacagacagggcaagaccccccugggccugguggaccuguucguguucagcaccagcuucuaccugaucagcaucuuccugcaccuggugaagauccccacccacagacacaucaucggcaagcccugccccaagccccacagacugaaccacaugggcaucugcagcugcggccuguacaagcaccccggcgugcccgugaaguggaagagaugaggacuagucccuguucccagagcccacuuuuuuuucuuuuuuugaaauaaaauagccugucuuucagaucuaaaaaaaaaaaaaaaaaaaaaaaaaaaaaaaaaaaaaaaaaaaaaaaaaaaaaaaaaaaaaaaaaaaaaaaaaaaaaaaaaaaaaaaaaaaaaaaaaaaa

SEQ ID NO: 23833 - RNA, 1740 nt, Artificial Sequence
  mRNA product Design a-2 (A100) comprising derived and/or modified sequence from LASV(LASV254-NIG-2011;Clade II)__AIT17674__GPCmut2 (opt4)
aggagaguccgcucagccagguugcagaagcggcuuagcguguguccuaaucuucucucugcguguagguaggccugugccgcaaacaagcuuaccaugggccagaucaucaccuucuuccaggaggugccccacgugaucgaggaggugaugaacaucgugcugaucgcccugagccugcuggccauccugaagggcaucuacaacguggccaccugcggccuguucggccuggugagcuuccugcugcugugcggcagaagcugcagcaccaccuacaagggcguguacgagcugcagacccuggagcuggacaugaccaaccugaacaugugcaugccccugagcugcaccaagaacaacagccaccacuacaucauggugggcaacgagaccggccuggagcugacccugaccaacaccagcaucaucaaccacaaguucugcaaccugagcgacgcccacaagaagaaccuguacaaccacgcccugaugagcaucaucagcaccuuccaccugagcauccccaacuucaaccaguacgaggccaugagcugcgacuucaacggcggcaagaucagcgugcaguacaaccugagccacagcuacgccguggacgccgccaaccacugcggcaccaucgccaacggcgugcugcagaccuucaugagaauggccuggggcggcagcuacaucgcccuggacagcggcaagggcaacugggacugcaucaugaccagcuaccaguaccugaucauccagaacaccaccugggaggaccacugccaguucagcagacccagccccaucggcuaccugggccugcugagccagagaaccagagacaucuacaucagcagaagaagaagaggcaccuucaccuggacccugagcgacagcgagggcaacgagacccccggcggcuacugccugaccagauggaugcugaucgaggccgagcugaagugcuucggcaacaccgccguggccaagugcaacgagaagcacgacgaggaguucugcgacaugcugagacuguucgacuucugcaagcaggccaucagaagacugaagacccccgcccaggccaacauccagcugaucaacaaggccgugaacgcccugaucaacgaccagcugaucaugaagaaccaccugagagacaucaugggcauccccuacugcaacuacagcaaguacugguaccugaaccacaccgugaccggcaagaccagccugcccagaugcuggcuggugagcaacggcagcuaccugaacgagacccacuucagcgacgacaucgagcagcaggccgacaacaugaucaccgagcugcugcagaaggaguacauggacagacagggcaagaccccccugggccugguggaccuguucguguucagcaccagcuucuaccugaucagcaucuuccugcaccuggugaagauccccacccacagacacgugaucggcaagcccugccccaagccccacagacugaaccacaugggcaucugcagcugcggccuguacaagcaccccggcgugcccgugaaguggaagagaugaggacuagucccuguucccagagcccacuuuuuuuucuuuuuuugaaauaaaauagccugucuuucagaucuaaaaaaaaaaaaaaaaaaaaaaaaaaaaaaaaaaaaaaaaaaaaaaaaaaaaaaaaaaaaaaaaaaaaaaaaaaaaaaaaaaaaaaaaaaaaaaaaaaaa

SEQ ID NO: 23834 - RNA, 1740 nt, Artificial Sequence
  mRNA product Design a-2 (A100) comprising derived and/or modified sequence from LASV(Nig08-A19;Clade III)__ADU56618__GPCmut2 (opt4)
aggagaguccgcucagccagguugcagaagcggcuuagcguguguccuaaucuucucucugcguguagguaggccugugccgcaaacaagcuuaccaugggccagaucgugaccuucuuccaggaggugccccacgugaucgaggaggugaugaacaucgugcugaucgcccugagcauccuggccauccugaagggccuguacaacaucgccaccugcggccugaucggccuggugaccuuccugcugcugagcggcagaagcugcagcaugaccuacaagggcguguacgagcugcagacccuggagcugaacaugaacacccugaacaugugcaugccccugagcugcaccaagaacaacagccaccacuacaucauggugggcaacgagaccggccuggagcugacccugaccaacaccagccugcugcaccacaaguucugcaaccugagcgacgcccacaagaagaaccuguacgaccacacccugaugagcaucaucagcaccuuccaccugagcauccccaacuucaaccaguacgaggccaugagcugcgacuucaacggcggcaagaucaccgugcaguacaaccugagccacagcuacgccaucgacgccgccaaccacugcggcaccguggccaacggcgugcugcagaccuucaugagaauggccuggggcggcagcuacaucgcccuggacagcggcagaggcaagugggacugcaucaugaccagcuaccaguaccugaucauccagaacaccaccugggaggaccacugccaguucagcagacccagccccaucggcuaccugggccugcugagccagagaaccagagacaucuacaucagcagaagaagaagaggcaccuucaccuggacccugagcgacagcgagggcaacgagacccccggcggcuacugccugaccagauggaugcugaucgaggccgagcugaagugcuucggcaacaccgccguggccaagugcaacgagaagcacgacgaggaguucugcgacaugcugagacuguucgacuucugcaagcaggccaucagaagacugaaggcccccgcccagaugagcauccagcugaucaacaaggccgugaacgcccugaucaacgaccagcugaucaugaagaaccaccugagagacaucaugggcauccccuacugcaacuacagcaaguacugguaccugaaccacaccagcaccggcagaaccagccugcccagaugcuggcuggugagcaacggcagcuaccugaacgagacccacuucagcgacgacaucgagcagcaggccgacaacaugaucaccgagaugcugcagaaggaguaccuggacagacagggcaagaccccccugggccugguggaccuguucguguucagcaccagcuucuaccugaucagcaucuuccugcaccuggugaagauccccacccacagacacaucgugggcaagcccugccccaagccccacagacugaaccacaugggcaucugcagcugcggccuguacaagcagcccggcgugcccgugagauggaagagaugaggacuagucccuguucccagagcccacuuuuuuuucuuuuuuugaaauaaaauagccugucuuucagaucuaaaaaaaaaaaaaaaaaaaaaaaaaaaaaaaaaaaaaaaaaaaaaaaaaaaaaaaaaaaaaaaaaaaaaaaaaaaaaaaaaaaaaaaaaaaaaaaaaaaa

SEQ ID NO: 23835 - RNA, 1743 nt, Artificial Sequence
  mRNA product Design a-2 (A100) comprising derived and/or modified sequence from LASV(G1180-SLE-2010;Clade IV)__AIT17168__GPCmut2 (opt4)
aggagaguccgcucagccagguugcagaagcggcuuagcguguguccuaaucuucucucugcguguagguaggccugugccgcaaacaagcuuaccaugggccagaucgugaccuucuuccaggaggugccccacgugaucgaggaggugaugaacaucgugcugaucgcccugagcauccuggccgugcugaagggccuguacaacuucgccaccugcggccuggugggccugcugaccuuccugcugcugugcggcagaagcugcaccgccagcagauacaagggcguguacgagcugcagacccuggagcugaacauggagacccugaacaugugcaugccccugagcugcaccaagaacaacagccaccacuacaucauggugggcaacgagaccggccuggagcugacccugaccaacaccagcaucaucaaccacaaguucugcaaccugagcgacgcccacaagaagaaccuguacgaccacgcccugaugagcaucaucagcaccuuccaccugagcauccccaacuucaaccaguacgaggccaugagcugcgacuucaacggcggcaagaucagcgugcaguacaaccugagccacagcuacgccggcgacgccgccaaccacugcggcaccguggccaacggcgugcugcagaccuucaugagaauggccuggggcggcagcuacaucgcccuggacagcggccacggcagcugggacugcaucaugaccagcuaccaguaccugaucauccagaacaccaccugggaggaccacugccaguucagcagacccagccccaucggcuaccugggccugcugagccagagaaccagagacaucuacaucagcagaagaagaagaggcaccuucaccuggacccugagcgacagcgagggcaaggacacccccggcggcuacugccugaccagauggaugcugaucgaggccgagcugaagugcuucggcaacaccgccguggccaagugcaacgagaagcacgacgaggaguucugcgacaugcugagacuguucgacuucugcaagcaggccauccagagacugaaggcccccgcccagaugagcauccagcugaucaacaaggccgugaacgcccugaucaacgaccagcugaucaugaagaaccaccugagagacaucaugggcauccccuacugcaacuacagcaaguacugguaccugaaccacaccaccaccggcaagaccagccugcccaagugcuggcuggugagcaacggcagcuaccugaacgagacccacuucagcgacgacaucgagcagcaggccgacaacaugaucaccgagaugcugcagaaggaguacauggagagacagggcaagaccccccugggccugguggaccuguucguguucagcaccagcuucuaccugaucagcaucuuccugcaccuggugaagauccccacccacagacacaucgugggcaagagcugccccaagccccacagacugaaccacaugggcaucugcagcugcggccuguacaagcagcccggcgugcccgugaaguggaagagaugaggacuagucccuguucccagagcccacuuuuuuuucuuuuuuugaaauaaaauagccugucuuucagaucuaaaaaaaaaaaaaaaaaaaaaaaaaaaaaaaaaaaaaaaaaaaaaaaaaaaaaaaaaaaaaaaaaaaaaaaaaaaaaaaaaaaaaaaaaaaaaaaaaaaa

SEQ ID NO: 23836 - RNA, 1743 nt, Artificial Sequence
  mRNA product Design a-2 (A100) comprising derived and/or modified sequence from LASV(G1442-SLE-2011;Clade IV)__AIT17180__GPCmut2 (opt4)
aggagaguccgcucagccagguugcagaagcggcuuagcguguguccuaaucuucucucugcguguagguaggccugugccgcaaacaagcuuaccaugggccagaucgugaccuucuuccaggaggugccccacgugaucgaggaggugaugaacaucgugcugaucgcccugagcauccuggccgugcugaagggccuguacaacguggccaccugcggccugaucggccuggugaccuuccugcugcugugcggcagaagcugcaccaccacccuguacaagggcguguacgagcugcagacccuggagcugaacauggagacccugaacaugugcaugccccugagcugcaccaagaacaacagccaccacuacaucagagugggcaacgagaccggccuggagcugacccugaccaacaccagcaucaucaaccacaaguucugcaaccugagcgacgcccacaagaagaaccuguacgaccacgcccugaugagcaucaucagcaccuuccaccugagcauccccaacuucaaccaguacgaggccaugagcugcgacuucaacggcggcaagaucagcgugcaguacaaccugagccacagcuacgccggcgacgccgccaaccacugcggcaccguggccaacggcgugcugcagaccuucaugagaauggccuggggcggcagcuacaucgcccuggacagcggcagaggcaacugggacugcaucaugaccagcuaccaguaccugaucauccagaacaccaccugggacgaccacugccaguucagcagacccagccccaucggcuaccugggccugcugagccagagaaccagagacguguacaucagcagaagaagaagaggcaccuucaccuggacccugagcgacagcgagggcaaggacacccccggcggcuacugccugaccagauggaugcugaucgaggccgagcugaagugcuucggcaacaccgccguggccaagugcaacgagaagcacgacgaggaguucugcgacaugcugagacuguucgacuucugcaagcaggccauccagagacugaaggcccccgcccagaugagcauccagcugaucaacaaggccgugaacgcccugaucaacgaccagcugaucaugaagaaccaccugagagacaucaugggcauccccuacugcaacuacagcaaguacugguaccugaacaacaccgccaccggcaagaccagccugcccaagugcuggcugaucagcaacggcagcuaccugaacgagacccacuucagcgacgacaucgagcaggaggccgacaacaugaucaccgagaugcugcagaaggaguacauggagagacagggcaagaccccccugggccugguggaccuguucguguucagcaccagcuucuaccugaucagcaucuuccugcaccuggugaagauccccacccacagacacaucgugggcaagagcugccccaagccccacagacugaaccacaugggcaucugcagcugcggccuguacaagcagcccggcgugcccgugagauggaagagaugaggacuagucccuguucccagagcccacuuuuuuuucuuuuuuugaaauaaaauagccugucuuucagaucuaaaaaaaaaaaaaaaaaaaaaaaaaaaaaaaaaaaaaaaaaaaaaaaaaaaaaaaaaaaaaaaaaaaaaaaaaaaaaaaaaaaaaaaaaaaaaaaaaaaa

SEQ ID NO: 23837 - RNA, 1743 nt, Artificial Sequence
  mRNA product Design a-2 (A100) comprising derived and/or modified sequence from LASV(G3010-SLE-2013;Clade IV)__AIT17344__GPCmut2 (opt4)
aggagaguccgcucagccagguugcagaagcggcuuagcguguguccuaaucuucucucugcguguagguaggccugugccgcaaacaagcuuaccaugggccagaucgugaccuucuuccaggaggugccccacgugaucgaggaggugaugaacaucgugcugaucgcccugagcauccuggccgugcugaagggccuguacaacuucgccaccugcggccuggugggccuggugaccuuccugcugcugugcggcagaagcugcaccaccagccuguacaagggcguguacgagcugcagacccuggagcugaacauggagacccugaacaugugcaugccccugagcugcaccaagaacaacagccaccacuacaucauggugggcaacgagaccggccuggagcugacccugaccaacaccagcaucaucaaccacaaguucugcaaccugagcgacgcccacaagaagaaccuguacaaccacgcccugaugagcaucaucagcaccuuccaccugagcauccccaacuucaaccaguacgaggccaugagcugcgacuucaacggcggcaagaucagcgugcaguacaaccugagccacagcuacgccggcgacgccgccagccacugcggcaccguggccaacggcgugcugcagaccuucaugagaauggccuggggcggcagcuacaucgcccuggacagcggcuacggcaagugggacugcaucaugaccagcuaccaguaccugaucauccagaacaccaccugggaggaccacugccaguucagcagacccagccccaucggcuaccugggccugcugagccagagaaccagagacaucuacaucagcagaagaagaagaggcaccuucaccuggacccugagcgacagcgagggcaaggacacccccggcggcuacugccugaccagauggaugcugaucgaggccgagcugaagugcuucggcaacaccgccguggccaagugcaacgagaagcacgacgaggaguucugcgacaugcugagacuguucgacuucugcaagcaggccauccagagacugaagacccccgcccagaugagcauccagcugaucaacaaggccgugaacgcccugaucaacgaccagcugaucaugaagaaccaccugagagacaucaugggcauccccuacugcaacuacagcaaguacugguaccugaaccacaccaccaccggcaagaccagccugcccaagugcuggcuggugagcaacggcagcuaccugaacgagacccacuucagcgacgacaucgagcagcaggccgacaacaugaucaccgagaugcugcagaaggaguacauggagagacagggcaagaccccccugggccugguggaccuguucguguucagcaccagcuucuaccugaucagcaucuuccugcaccuggugaagauccccacccacagacacaucgugggcaagagcugccccaagccccacagacugaaccacaugggcaucugcagcugcggccuguacaagcagcccggcgugcccgugagauggaagagaugaggacuagucccuguucccagagcccacuuuuuuuucuuuuuuugaaauaaaauagccugucuuucagaucuaaaaaaaaaaaaaaaaaaaaaaaaaaaaaaaaaaaaaaaaaaaaaaaaaaaaaaaaaaaaaaaaaaaaaaaaaaaaaaaaaaaaaaaaaaaaaaaaaaaa

SEQ ID NO: 23838 - RNA, 1743 nt, Artificial Sequence
  mRNA product Design a-2 (A100) comprising derived and/or modified sequence from LASV(G502-SLE-2009;Clade IV)__AIT17126__GPCmut2 (opt4)
aggagaguccgcucagccagguugcagaagcggcuuagcguguguccuaaucuucucucugcguguagguaggccugugccgcaaacaagcuuaccaugggccagaucgugaccuucuuccaggaggugccccacgugaucgaggaggugaugaacaucgugcugaucgcccugagcauccuggccgugcugaagggccuguacaacuucgccaccugcggccuggugggccugcugaccuuccugcugcugugcggcagaagcugcaccaccggccuguacaagggcguguacgagcugcagacccuggagcugaacauggagacccugaacaugugcaugccccugagcugcaccaagaacaacagccaccacuacaucauggugggcaacgagaccggccuggagcugacccugaccaacaccagcaucaucaaccacaaguucugcaaccugagcgacgcccacaagaagaaccuguacgaccacgcccugaugagcaucaucagcaccuuccaccugagcauccccaacuucaaccaguacgaggccaugagcugcgacuucaacggcggcaagaucagcgugcaguacaaccugagccacagcuacgccggcgacgccgccgaccacugcggcaccguggccaacggcgugcugcagaccuucaugagaauggccuggggcggcagcuacaucgcccuggacagcggcagaggcagaugggacugcaucaugaccagcuaccaguaccugaucauccagaacaccaccugggaggaccacugccaguucagcagacccagccccaucggcuaccugggccugcugagccagagaaccagagacaucuacaucagcagaagaagaagaggcaccuucaccuggacccugagcgacagcgagggcaaggacacccccggcggcuacugccugaccagauggaugcugaucgaggccgagcugaagugcuucggcaacaccgccguggccaagugcaacgagaagcacgacgaggaguucugcgacaugcugagacuguucgacuucugcaagcaggccauccagagacugaaggcccccgcccagaugagcauccagcugaucaacaaggccgugaacgcccugaucaacgaccagcuggugaugaagaaccaccugagagacaucaugggcauccccuacugcaacuacagcagauacugguaccugaaccacaccaccaccggcagaaccagccugcccaagugcuggcuggugagcaacggcagcuaccugaacgagacccacuucagcgacgacaucgagcagcaggccgacaacaugaucaccgagaugcugcagaaggaguacauggagagacagggcaagaccccccugggccugguggaccuguucguguucagcaccagcuucuaccugaucagcaucuuccugcaccuggugaagauccccacccacagacacaucgugggcaagagcugccccaagccccacagacugaaccacaugggcaucugcagcugcggccuguacaagcagcccggcgugcccgugaaguggaagagaugaggacuagucccuguucccagagcccacuuuuuuuucuuuuuuugaaauaaaauagccugucuuucagaucuaaaaaaaaaaaaaaaaaaaaaaaaaaaaaaaaaaaaaaaaaaaaaaaaaaaaaaaaaaaaaaaaaaaaaaaaaaaaaaaaaaaaaaaaaaaaaaaaaaaa

SEQ ID NO: 23839 - RNA, 1743 nt, Artificial Sequence
  mRNA product Design a-2 (A100) comprising derived and/or modified sequence from LASV(G733-SLE-2010;Clade IV)__AIT17154__GPCmut2 (opt4)
aggagaguccgcucagccagguugcagaagcggcuuagcguguguccuaaucuucucucugcguguagguaggccugugccgcaaacaagcuuaccaugggccagaucgugaccuucuuccaggaggugccccacgugaucgaggaggugaugaacaucgugcugaucgcccugagcauccuggccgugcugaagggccuguacaacuucgccaccugcggcaucgugggccuggugagcuuccugcugcugugcggcagaagcugcaccaccagccuguacaagggcguguacgagcugcagacccuggagcugaacauggagacccugaacaugugcaugccccugagcugcaccaagaacaacagccaccacuacaucauggugggcaacgagaccggccuggagcugacccugaccaacaccagcaucaucaaccacaaguucugcaaccugagcgacgcccacaagaagaaccuguacgaccacgcccugaugagcaucaucagcaccuuccaccugagcauccccaacuucaaccaguacgaggccaugagcugcgacuucaacggcggcaagaucagcgugcaguacaaccugagccacagcuacgccggcgacgccgccaaccacugcggcaccaucgccaacggcgugcugcagaccuucaugagaauggccuggggcggcagcuacaucgcccuggacagcggcagagacagaugggacugcaucaugaccagcuaccaguaccugaucauccagaacaccaccugggaggaccacugccaguucagcagacccagccccaucggcuaccugggccugcugagccagagaaccagagacaucuacaucagcagaagaagaagaggcaccuucaccuggacccugagcgacagcgagggcaaggacacccccggcggcuacugccugaccagauggaugcugaucgaggccgagcugaagugcuucggcaacaccgccguggccaagugcaacgagaagcacgacgaggaguucugcgacaugcugagacuguucgacuucugcaagcaggccauccagagacugaaggcccccgcccagaugagcauccagcugaucaacaaggccgugaacgcccugaucaacgaccagcugaucaugaagaaccaccugagagacaucaugggcauccccuacugcaacuacagcaaguacugguaccugaaccacaccaccaccggcaagaccagccugcccaagugcuggcuggugagcaacggcagcuaccugaacgagacccacuucagcgacgacaucgagcagcaggccgacaacaugaucaccgagaugcugcagaaggaguacauggagagacagggcaagaccccccugggccugguggaccuguucguguucagcaccagcuucuaccugaucagcaucuuccugcaccuggugaagauccccacccacagacacguggugggcaagagcugccccaagccccacagacugaaccacaugggcaucugcagcugcggccuguacggccagcccggcgugcccgugaaguggaagagaugaggacuagucccuguucccagagcccacuuuuuuuucuuuuuuugaaauaaaauagccugucuuucagaucuaaaaaaaaaaaaaaaaaaaaaaaaaaaaaaaaaaaaaaaaaaaaaaaaaaaaaaaaaaaaaaaaaaaaaaaaaaaaaaaaaaaaaaaaaaaaaaaaaaaa

SEQ ID NO: 23840 - RNA, 1743 nt, Artificial Sequence
  mRNA product Design a-2 (A100) comprising derived and/or modified sequence from MOPV/LASV reassortant(IGS-1;Clade IV)__AFY05576__GPCmut2 (opt4)
aggagaguccgcucagccagguugcagaagcggcuuagcguguguccuaaucuucucucugcguguagguaggccugugccgcaaacaagcuuaccaugggccagaucgugaccuucuuccaggaggugccccacgugaucgaggaggugaugaacaucgugcugaucgcccugagcgugcuggccgugcugaagggccuguacaacuucgccaccugcggccuggugggccuggugaccuuccugcugcugugcggcagaagcugcaccaccagccuguacaagggcguguacgagcugcagacccuggagcugaacauggagacccugaacaugugcaugccccugagcugcaccaagaacaacagccaccacuacaucauggugggcaacgagaccggccuggagcugacccugaccaacaccagcaucaucaaccacaaguucugcaaccugagcgacgcccacaagaagaaccuguacgaccacgcccugaugagcaucaucagcaccuuccaccugagcauccccaacuucaaccaguacgaggccaugagcugcgacuucaacggcggcaagaucagcgugcaguacaaccugagccacagcuacgccggcgacgccgccaaccacugcggcaccguggccaacggcgugcugcagaccuucaugagaauggccuggggcggcagcuacaucgcccuggacagcggcagaggcaacugggacugcaucaugaccagcuaccaguaccugaucauccagaacaccaccugggaggaccacugccaguucagcagacccagccccaucggcuaccugggccugcugagccagagaaccagagacaucuacaucagcagaagaagaagaggcaccuucaccuggacccugagcgacagcgagggcgaggacacccccggcggcuacugccugaccagauggaugcugaucgaggccgagcugaagugcuucggcaacaccgccguggccaagugcaacgagaagcacgacgaggaguucugcgacaugcugagacuguucgacuucugcaagcaggccauccagagacugaaggcccccgcccagaugagcauccagcugaucaacaaggccgugaacgcccugaucaacgaccagcugaucaugaagaaccaccugagagacaucaugggcauccccuacugcaacuacagcaaguacugguaccugaaccacaccaccaccggcagaaccagccugcccaagugcuggcuggugagcaacggcagcuaccugaacgagacccacuucagcgacgacaucgagcagcaggccgacaacaugaucaccgagaugcugcagaaggaguacauggagagacagggcaagaccccccugggccugguggaccuguucguguucagcaccagcuucuaccugaucagcaucuuccugcaccuggugaagauccccacccacagacacaucgugggcaagagcugccccaagccccacagacugaaccacaugggcaucugcagcugcggccuguacaagcagcccggcgugcccgugaaguggaagagaugaggacuagucccuguucccagagcccacuuuuuuuucuuuuuuugaaauaaaauagccugucuuucagaucuaaaaaaaaaaaaaaaaaaaaaaaaaaaaaaaaaaaaaaaaaaaaaaaaaaaaaaaaaaaaaaaaaaaaaaaaaaaaaaaaaaaaaaaaaaaaaaaaaaaa

SEQ ID NO: 23841 - RNA, 1743 nt, Artificial Sequence
  mRNA product Design a-2 (A100) comprising derived and/or modified sequence from LASV(LM765-SLE-2012;Clade IV)__AIT17814__GPCmut2 (opt4)
aggagaguccgcucagccagguugcagaagcggcuuagcguguguccuaaucuucucucugcguguagguaggccugugccgcaaacaagcuuaccaugggccagaucgugaccuucuuccaggaggugccccacgugaucgaggaggugaugaacaucgugcugaucgcccugagcauccuggccgugcugaagggccuguacaacuucgccaccugcggccuggugggccuggugaccuuccugcugcugugcggcagaagcugcaccaccagccuguacaagggcguguacgagcugcagacccuggagcugaacauggagacccugaacaugugcaugccccugagcugcaccaagaacaacagccaccacuacaucauggugggcaacgagaccggccuggagcugacccugaccaacaccagcaucaucgaccacaaguucugcaaccugagcgacgcccacagaaagaaccuguacgaccacgcccugaugagcaucaucagcaccuuccaccugagcauccccaacuucaaccaguacgaggccaugagcugcgacuucaacggcggcaagaucagcgugcaguacaaccugagccacagcuacgccaaggacgccgccgaccacugcggcaccguggccaacggcgugcugcagaccuucaugagaauggccuggggcggcagcuacaucgcccuggacagcggcagaggcagaugggacugcaucaugaccagcuaccaguaccugaucauccagaacaccaccugggaggaccacugccaguucagcagacccagccccaucggcuaccugggccugcugagccagagaaccagagacaucuacaucagcagaagaagaagaggcaccuucaccuggacccugagcgacagcgagggcaaggacacccccggcggcuacugccugaccagauggaugcugaucgaggccgagcugaagugcuucggcaacaccgccguggccaagugcaacgagaagcacgacgaggaguucugcgacaugcugagacuguucgacuucugcaagcaggccauccagagacugaaggcccccgcccagaugagcauccagcugaucaacaaggccgugaacgcccugaucaacgaccagcugaucaugaagaaccaccugagagacaucaugggcauccccuacugcaacuacagcaaguacugguaccugaaccacaccaccaccggcaagaccagccugcccaagugcuggcuggugagcaacggcagcuaccugaacgagacccacuucagcgacgacaucgagcagcaggccgacaacaugaucaccgagaugcugcagaaggaguacauggagagacagggcaagaccccccugggccugguggaccuguucguguucagcaccagcuucuaccugaucagcaucuuccugcaccuggugaagauccccacccacagacacaucgugggcaagcccugccccaagccccacagacugaaccacaugggcaucugcagcugcggccuguacaagcagcccggcgugcccgugaaguggaagagaugaggacuagucccuguucccagagcccacuuuuuuuucuuuuuuugaaauaaaauagccugucuuucagaucuaaaaaaaaaaaaaaaaaaaaaaaaaaaaaaaaaaaaaaaaaaaaaaaaaaaaaaaaaaaaaaaaaaaaaaaaaaaaaaaaaaaaaaaaaaaaaaaaaaaa

SEQ ID NO: 23842 - RNA, 1743 nt, Artificial Sequence
  mRNA product Design a-2 (A100) comprising derived and/or modified sequence from LASV(LM776-SLE-2012;Clade IV)__AIT17824__GPCmut2 (opt4)
aggagaguccgcucagccagguugcagaagcggcuuagcguguguccuaaucuucucucugcguguagguaggccugugccgcaaacaagcuuaccaugggccagaucgugaccuucuuccaggaggugccccacgugaucgaggaggugaugaacaucgugcugaucgcccugagcauccuggccgugcugaagggccuguacaacuucgccaccugcggccuggugggccuggugaccuuccugcugcugugcggcagaagcugcaccaccagcguguacaagggcguguacgagcugcagacccuggagcugaacauggagacccugaacaugugcaugccccugagcugcaccaagaacaacagccaccacuacaucauggugggcaacgagaccggccuggagcugacccugaccaacaccagcaucaucaaccacaaguucugcaaccugagcgacgcccacaagaagaaccuguacgaccacgcccugaugagcaucaucagcaccuuccaccugagcauccccaacuucaaccaguacgaggccaugagcugcgacuucaacggcggcaagaucagcgugcaguacaaccugagccacagcuacgccggcgacgccgccaaccacugcggcaccguggccaacggcgugcugcagaccuucaugagaauggccuggggcggcagcuacaucgcccuggacagcggccacggcaagugggacugcaucaugaccagcuaccaguaccugaucauccagaacaccaccugggaggaccacugccaguucagcagacccagccccaucggcuaccugggccugcugagccagagaaccagagacaucuacaucagcagaagaagaagaggcaccuucaccuggacccugagcgacagcgagggcaaggacacccccggcggcuacugccugaccagauggaugcugaucgaggccgagcugaagugcuucggcaacaccgccguggccaagugcaacgagaagcacgacgaggaguucugcgacaugcugagacuguucgacuucugcaagcaggccauccagagacugaaggcccccgcccagaugagcauccagcugaucaacaaggccgugaacgcccugaucaacgaccagcugaucaugaagaaccaccugagagacaucaugggcauccccuacugcaacuacagcaaguacugguaccugaaccacaccaccaccggcaagaccagccugcccaagugcuggcuggugagcaacggcagcuaccugaacgagacccacuucagcgacgacaucgagcagcaggccgacaacaugaucaccgagaugcugcagaaggaguacauggagagacagggcaagaccccccugggccugguggaccuguucguguucagcaccagcuucuaccugaucagcaucuuccugcaccuggugaagauccccacccacagacacaucgugggcaagagcugccccaagccccacagacugaaccacaugggcaucugcagcugcggccuguacaagcagcccggcgugcccgugagauggaagagaugaggacuagucccuguucccagagcccacuuuuuuuucuuuuuuugaaauaaaauagccugucuuucagaucuaaaaaaaaaaaaaaaaaaaaaaaaaaaaaaaaaaaaaaaaaaaaaaaaaaaaaaaaaaaaaaaaaaaaaaaaaaaaaaaaaaaaaaaaaaaaaaaaaaaa

SEQ ID NO: 23843 - RNA, 1743 nt, Artificial Sequence
  mRNA product Design a-2 (A100) comprising derived and/or modified sequence from LASV(Mad39;Clade IV)__ANH09722__GPCmut2 (opt4)
aggagaguccgcucagccagguugcagaagcggcuuagcguguguccuaaucuucucucugcguguagguaggccugugccgcaaacaagcuuaccaugggccagaucgugaccuucuuccaggaggugccccacgugaucgaggaggugaugaacaucgugcugaucgcccugagcauccuggccgugcugaagggccuguacaacguggccaccugcggccugaucggccuggugaccuuccugcugcugugcggcagaagcugcaccaccacccuguacaagggcguguacgagcugcaggcccuggagcugaacauggagacccugaacaugugcaugccccugagcugcaccaagaacaacagccaccacuacaucagagugggcaacgagaccggccuggagcugacccugaccaacaccagccugaucaaccacaaguucugcaaccugagcgacgcccacaagaagaaccuguacgaccacgcccugaugagcaucaucagcaccuuccaccugagcauccccaacuucaaccaguacgaggccaugagcugcgacuucaacgacggcaagaucagcgugcaguacaaccugagccacaccuacgccggcgacaccgccaaccacugcggcaccguggccaacggcgugcugcagaccuucaugagaauggccuggggcggcagcuacaucgcccuggacagcggcagaggcggcugggacugcaucaugaccagcuaccaguaccugaucauccagaacaccaccugggaggaccacugccaguucagcagacccagccccaucggcuaccugggccugcugagccagagaaccagagacaucuacaucagcagaagaagaagaggcaccuucaccuggacccugagcgacagcgagggcaaggacacccccggcggcuacugccugaccagauggaugcugaucgaggccgagcugaagugcuucggcaacaccgccguggccaagugcaacgagaagcacgacgaggaguucugcgacaugcugagacuguucgacuucugcaagcaggccauccagagacugaaggcccccgcccagaugagcauccagcugaucaacaaggccgugaacgcccugaucaacgaccagcugaucaugaagaaccaccugagagacaucaugggcauccccuacugcaacuacagcaaguacugguaccugaaccacaccgugaccggcaagaccagccugcccaagugcuggcuggugagcaacggcagcuaccugaacgagacccacuucagcgacgacaucgagcagcaggccgacaacaugaucaccgagaugcugcagaaggaguacauggagagacagggcaagaccccccugggccugguggaccuguucguguucagcaccagcuucuaccugaucagcaucuuccugcaccuggugaagauccccacccacagacacguggugggcaagcccugccccaagccccacagacugaaccacaugggcaucugcagcugcggcuucuacaagcagcccggcgugcccgugagauggaagagaugaggacuagucccuguucccagagcccacuuuuuuuucuuuuuuugaaauaaaauagccugucuuucagaucuaaaaaaaaaaaaaaaaaaaaaaaaaaaaaaaaaaaaaaaaaaaaaaaaaaaaaaaaaaaaaaaaaaaaaaaaaaaaaaaaaaaaaaaaaaaaaaaaaaaa

SEQ ID NO: 23844 - RNA, 1743 nt, Artificial Sequence
  mRNA product Design a-2 (A100) comprising derived and/or modified sequence from LASV(Z0947-SLE-2011;Clade IV)__AIT17840__GPCmut2 (opt4)
aggagaguccgcucagccagguugcagaagcggcuuagcguguguccuaaucuucucucugcguguagguaggccugugccgcaaacaagcuuaccaugggccagaucgugaccuucuuccaggaggugccccacgugaucgaggaggugaugaacaucgugcugaucgcccugagcauccuggccgugcugaagggccuguacaacuucgccaccugcggccuggugggccuggugaccuuccugcugcugugcggcagaagcugcaccaucagccuguacaagggcguguacgagcugcagacccuggagcugaacauggagacccugaacaugugcaugccccugagcugcaccaagaacaacagccaccacuacaucauggugggcaacgagaccggccuggagcugacccugaccaacaccagcaucaucaaccacaaguucugcaaccugagcgacgcccacaagaagaaccuguacgaccacgcccugaugagcaucaucagcaccuuccaccugagcauccccaacuucaaccaguacgaggccaugagcugcgacuucaacggcggcaagaucagcgugcaguacaaccugagccacagcuacgccggcgacgccgccaaccacugcggcaccguggccaacggcgugcugcagaccuucaugagaauggccuggggcggcagcuacaucgcccuggacagcggcagagacagaugggacugcaucaugaccagcuaccaguaccugaucauccagaacaccaccugggaggaccacugccaguucagcagacccagccccaucggcuaccugggccugcugagccagagaaccagagacaucuacaucagcagaagaagaagaggcaccuucaccuggacccugagcgacagcgagggcaaggacacccccggcggcuacugccugaccagauggaugcugaucgaggccgagcugaagugcuucggcaacaccgccguggccaagugcaacgagaagcacgacgaggaguucugcgacaugcugagacuguucgacuucugcaagcaggccauccagagacugaaggcccccgcccagaugagcauccagcugaucaacaaggccgugaacgcccugaucaacgaccagcugaucaugaagaaccaccugagagacaucaugggcauccccuacugcaacuacagcaaguacugguaccugaaccacaccaccaccggcaagaccagccugcccaagugcuggcuggugagcaacggcagcuaccugaacgagacccacuucagcgacgacaucgagcagcaggccgacaacaugaucaccgagaugcugcagaaggaguacauggagagacagggcaagaccccccugggccugguggaccuguucguguucagcaccagcuucuaccugaucagcaucuuccugcaccuggugaagauccccacccacagacacaucgugggcaagcccugccccaagccccacagacugaaccacaugggcaucugcagcugcggccuguacaagcagcccggcgugcccgugaaguggaagagaugaggacuagucccuguucccagagcccacuuuuuuuucuuuuuuugaaauaaaauagccugucuuucagaucuaaaaaaaaaaaaaaaaaaaaaaaaaaaaaaaaaaaaaaaaaaaaaaaaaaaaaaaaaaaaaaaaaaaaaaaaaaaaaaaaaaaaaaaaaaaaaaaaaaaa

SEQ ID NO: 23845 - RNA, 1743 nt, Artificial Sequence
  mRNA product Design a-2 (A100) comprising derived and/or modified sequence from LASV(Josiah;Clade IV)__NP_694870__GPCmut2 (opt5)
aggagaguccgcucagccagguugcagaagcggcuuagcguguguccuaaucuucucucugcguguagguaggccugugccgcaaacaagcuuaccaugggccagaucgugaccuucuuucaagaggucccccacguuauugaagaggugaugaacaucgugcugauugcccucagcguccuggcugugcuuaaggggcuguacaauuucgccacaugcggacucguuggccuggugacguuucuucugcucugugggagauccugcaccacaucucuguauaaaggagucuacgaacugcagacccucgagcugaacauggaaacacuuaauauguguaugccucugagcugcaccaagaacaauucccaucacuauaucauggugggcaacgagacagggcucgagcugacccuuacgaauaccucuauuaucaaccauaaauucuguaaucugagcgacgcgcacaagaaaaaccucuacgaucaugcucugauguccaucauuucuacauuucaccugagcaucccgaauuucaaccaguaugaagccauguccugcgacuuuaauggaggcaagauuagcguucaguacaaccucucucacuccuaugccggcgaugcugccaaucauugugggaccguggcuaacggaguccugcaaacauucaugcggauggccuggggcgggagcuacaucgcgcuugacucuggacgcggcaacugggauugcauuaugaccuccuaccaguaucugaucauucagaauacgacaugggaggaccacugucaguuuagcagacccucuccuaucggguaccucggacugcuuucccaacggacccgcgauaucuauauuagcagacggcgcagaggcacauucaccuggacccuguccgacucugaaggcaaggauacacccgggggauacugccucacgcgguggaugcugaucgaggccgagcugaaauguuuuggcaacaccgcuguggccaagugcaaugaaaaacaugacgaggaguucugcgauaugcuccgccuguuugacuucuguaagcaggcuauucagagacuuaaagccccugcgcagaugagcauccaacugauuaacaaggccgugaaugcucucaucaacgaucagcugaucaugaagaaucaccuucgggacauuauggggauccccuauugcaacuacuccaaauauugguaccugaaucacacaaccacaggacgcaccagccucccuaaguguuggcuggucucuaacggcuccuaccugaaugaaacgcauuucagcgacgauauugaacagcaagccgacaacaugaucacagagaugcuccagaaagaguauauggaaagacaggggaagaccccgcugggacuuguugaucuguuuguguucucuaccagcuuuuaccucauuuccaucuuccugcaccuggugaaaauccccacacaucggcacauugucggcaagucuugcccuaaaccccaucgccuuaaucacaugggcaucuguagcugcgggcucuauaagcagccuggagugcccguuaaguggaaaagaugaggacuagucccuguucccagagcccacuuuuuuuucuuuuuuugaaauaaaauagccugucuuucagaucuaaaaaaaaaaaaaaaaaaaaaaaaaaaaaaaaaaaaaaaaaaaaaaaaaaaaaaaaaaaaaaaaaaaaaaaaaaaaaaaaaaaaaaaaaaaaaaaaaaaa

SEQ ID NO: 23846 - RNA, 1740 nt, Artificial Sequence
  mRNA product Design a-2 (A100) comprising derived and/or modified sequence from LASV(LP;Clade I)__AAF86701__GPCmut2 (opt5)
aggagaguccgcucagccagguugcagaagcggcuuagcguguguccuaaucuucucucugcguguagguaggccugugccgcaaacaagcuuaccaugggccagaucauuaccuucuuucaagaggugccccacgucaucgaagagguuaugaacauugugcugaucgcccucagccugcuugcuauucugaaggggcucuacaauaucgccacaugcggaaucauuggccugguggcguuccuuuuucugugugggaaauccugcucucucacgcugaagggaggcuaugaacugcagacccucgagcugaacauggaaacacuuaauauguguaugccucugagcugcaccaaaaacuccucucaucacuacaucagagucgggaaugagacaggacucgagcugacccuuacaaacaccagcauuaucaaucauaaguucuguaaccuguccgacgcucacaaaaagaaucucuaugaucaugcccugaugucuauuaucagcacguuucaccuguccauuccgaacuucaaucaguacgaagccaugagcugcgacuuuaacggcggcaagaucucugugcaguauaaucucucccacagcuacgcuggggaugccgcugagcauuguggaaccguugccaacggcgugcugcaaacauucaugcggauggcguggggagggcgcuauaucgcccuugacucuggcaaagggaauugggauugcauuaugaccuccuaccaguaccugaucauucagaacacaaccugggaagaccacugucaguuuagcagacccucuccuaucggauaucucggccugcuuucccaacggacgcgcgauauuuacaucagcagacggcgcagaggcacauucaccuggacacuguccgacucugaggggaacgagacccccggaggcuauugccucacccgguggaugcugaucgaagcugagcugaaguguuuugggaauacagccgucgcuaaaugcaacgaaaagcaugaugaggaguucugcgacaugcuccgccuguuugauuucuguaaacaggccauuagacggcuuaaggcgccugcccagaugagcauccagcugauuaauaaggcugugaacgcccucaucaaugaccaacugauuaugaaaaaccaccuucgcgauaucaugggaauccccuacugcaauuauuccaaguacugguaucugaaccacacgagcucuggcagaaccucccucccuaaauguuggcugauuagcaaugggucuuaccugaacgaaacacaguucagcgacgacaucgagcagcaagcugauaauaugauuaccgaaaugcuccagaaggaguacaucgaacggcagggaaaaacaccgcugggccuuguugacauuuuuaucuucuccaccucuuuuuaucugauuagcaucuuccuccaucugaucaagauucccacgcaccgccauaucgugggcaaaccuugccccaagccucacagacugaaccauaugggggucuguuccugcggacuuuacaagcaccccggcgugccgacaaaauggaagcggugaggacuagucccuguucccagagcccacuuuuuuuucuuuuuuugaaauaaaauagccugucuuucagaucuaaaaaaaaaaaaaaaaaaaaaaaaaaaaaaaaaaaaaaaaaaaaaaaaaaaaaaaaaaaaaaaaaaaaaaaaaaaaaaaaaaaaaaaaaaaaaaaaaaaa

SEQ ID NO: 23847 - RNA, 1740 nt, Artificial Sequence
  mRNA product Design a-2 (A100) comprising derived and/or modified sequence from LASV(803213;Clade II)__AAF86703__GPCmut2 (opt5)
aggagaguccgcucagccagguugcagaagcggcuuagcguguguccuaaucuucucucugcguguagguaggccugugccgcaaacaagcuuaccaugggccagaucauuaccuucuuucaagaggugccccacgucaucgaagagguuaugaacauugugcugaucgcccucagccugcuugcuauucugaaggggaucuacaauguggccacaugcggacucuucggccugaucuccuuucuucugcucugugggagaucuugcagcgucacguauaaaggaguguacgaacugcagacccuggagcucaacauggcgaaucugaacauguguaugccucuuuccugcacaaagaauaacucucaucacuauauuaugguuggcaaugaaaccgggcuggagcucacacugaccaacacaagcaucauuaaucauaaauucuguaaccuuuccgacgcucacaagaaaaaucuguacgaucaugcccucaugucuaucauuagcaccuuucaccuguccaucccgaacuucaaucaguaugaggccaugagcugcgacuuuaacggaggcaagauuucugugcaguacaaucugucccacagcuucgcugucgaugccgcuaaccauuguggcacgaucgccaacggggugcuccaaaccuuuaugcggauggcguggggaggcucuuauaucgcccuggacuccgggaagggaaauugggauugcauuaugacaagcuaccaguaccuuaucauucagaacaccacaugggaagaccacugucaguucucucgccccuccccuaucggcuaucuggggcuccugagccaaagaacccgggauauuuacaucucccgcagacggcgcggaacguuuacauggacccuuucugacagcgagggcaaugaagcucccggcggguauugccugacaagauggaugcucaucgaggccgagcugaaauguuucggaaacaccgcuguugccaagugcaaugaaaaacaugaugaggaauuuugcgacaugcugcgccucuucgauuucuguaagcaggcgauuaaacggcugaagaccccugcccagauguccauccagcuuauuaacaaggcugugaaugcccugaucaacgaccaacucauuaugaaaaaucaccugagagauaucaugggcauccccuacugcaacuauagccgguacugguaucuuaaucacacagucacggggaagaccucucugccucgcuguuggcucguguccaacggaagcuaccugaaugagacacauuuuucugacgacauugaacagcaggcugauaacaugaucaccgagaugcugcaaaaagaguacauggacagacagggcaagacaccgcucgggcugguggaucuuuucgucuuuagcaccuccuucuaucugauuucuaucuuucuccaccugguuaaaauucccacgcaucggcacaucgugggaaagccuugccccaaaccucaucgccugaaucacaugggcauuuguagcugcggccuuuacaagcaccccggggugccggucaaguggaaaagaugaggacuagucccuguucccagagcccacuuuuuuuucuuuuuuugaaauaaaauagccugucuuucagaucuaaaaaaaaaaaaaaaaaaaaaaaaaaaaaaaaaaaaaaaaaaaaaaaaaaaaaaaaaaaaaaaaaaaaaaaaaaaaaaaaaaaaaaaaaaaaaaaaaaaa

SEQ ID NO: 23848 - RNA, 1740 nt, Artificial Sequence
  mRNA product Design a-2 (A100) comprising derived and/or modified sequence from LASV(GA391;Clade III)__CAA36645__GPCmut2 (opt5)
aggagaguccgcucagccagguugcagaagcggcuuagcguguguccuaaucuucucucugcguguagguaggccugugccgcaaacaagcuuaccaugggccagaucgugaccuucuuucaagaggucccccacguuauugaagaggugaugaacaucgugcugauugcccucagcauccuggcuauucuuaaggggcuguacaaugucgccacaugcggacucaucggccuggugacguuccuucugcucuccgggagaucuuguagccugaucuauaaaggaaccuacgaacugcagacacucgagcugaacauggaaacccuuaauaugugcaugccucuguccuguacaaagaacaauucucaucacuauauucggguuggcaacgagaccgggcucgagcugacacuuaccaauacgagcauccugaaccauaaauuuugcaaucucuccgacgcgcacaagcgcaaccuguacgaucauucucugaugagcauuaucuccaccuuccaccucagcauuccgaauuuuaaccaguaugaagcuaugucuugugacuucaauggaggcaaaaucacagugcaguacaaccugucccacagcuuugccgucgaugccgcuggccauugcgggacccuugccaauggagugcugcaaacauucaugagaauggcuuggggcgggucuuauauugcccucgacuccggacggggcaacugggauuguaucaugaccagcuaccaguaccugaucauucagaacacgacaugggacgaucacugccaguuuucucgccccuccccuaucggguaucuuggacugcucagccaaagaacccgggacauuuacaucucccgcagacggcgcggcacauucaccuggacccugucugauagcgagggcaaugaaacacccgggggauauugucugacgagauggaugcucauugaggcggagcugaagugcuuuggcaacaccgccguugcuaaguguaaugaaaaacaugacgaggaguucugcgauaugcuucggcuguuugacuucugcaagcaggccauccgcagacucaaaaccccugcucagauguccauccagcugauuaacaaggccgugaaugcgcuuaucaacgaucaacugauuaugaaaaaucaccuccgggacaucauggggauucccuacuguaacuauagccgcuacugguaucugaaucacacaucuacaggaaagaccucccugccuagaugcuggcucaucagcaacggcucuuaccugaaugaaacgaaguucagcgacgauaucgaacagcaggccgacaacaugauuacagagaugcuucaaaaagaguacaucgaucggcaggggaagaccccgcugggacucgucgaccuguuuguguucuccaccucuuuuuaucugauuagcaucuuccuucaucucgugaaaauucccacacacagacauaucgucggcaagccuugucccaaaccucaccgccugaaucauaugggcauuugcuccugugggcuguacaagcagcccggaguuccggugcgguggaaaagaugaggacuagucccuguucccagagcccacuuuuuuuucuuuuuuugaaauaaaauagccugucuuucagaucuaaaaaaaaaaaaaaaaaaaaaaaaaaaaaaaaaaaaaaaaaaaaaaaaaaaaaaaaaaaaaaaaaaaaaaaaaaaaaaaaaaaaaaaaaaaaaaaaaaaa

SEQ ID NO: 23849 - RNA, 1743 nt, Artificial Sequence
  mRNA product Design a-2 (A100) comprising derived and/or modified sequence from LASV(AV;Clade V)__CCA30314__GPCmut2 (opt5)
aggagaguccgcucagccagguugcagaagcggcuuagcguguguccuaaucuucucucugcguguagguaggccugugccgcaaacaagcuuaccaugggccagaucgugaccuucuuucaagaggucccccacguuauugaagaggugaugaacaucgugcugauugcccucagcauccuggcuguccuuaaggggcuguacaauauugccacaugcggacucaucggccugaucacguuccuucugcucugugggagauccugcucuagcaaccuguauaaaggaguguacgaacugcagucccucgaccugaauauggagacccuuaacauguguaugccucugucuugcacaaagaauaacagccaucacuauauucggguuggcaaugauaccgggcucgaacugacacuuaccaacacauccauccugaaucauaaauuuuguaaccucucugacgcgcacaagaaagaucuguacgaccaugcucugaugagcauuaucuccaccuuccaccucagcauuccgaauuuuaaccaguaugaggccaugucuugcgauuucaauggaggcaagaucuccgugcaguacaaccugagccacucuuaugccauugacgcugccaaucauuguggcacggucgcuaacgggauccuucaaaccuuuaugcgcauggccuggggaggcuccuacaucgcgcuggauagcgggagaggaaacugggacugcauuaugacaucuuaccaguaucucaucauucagaauaccacaugggagaaccacugucaguucucccggcccagcccuaucggcuaccuggggcuucugucccaacgcaccagagauauuuauaucucucggcgcagacggggaacguuuacauggacccucagcgacuccgaaggcaaugccacacccggcggguacugccugacccgcuggaugcugaucgaggcugaacucaaguguuucggaaacaccgccguggcuaaaugcaaugagaagcaugaugaggaauuuugcgacaugcugagacuuuucgauuuuuguaaacaggccauuagccggcugaagucuccugcgcagauguccauccagcucauuaacaaagccguuaaugcucugaucaacgaccaacuuauuaugaagaaucaucugcgcgacaucaugggcauccccuauugcaacuacagcaaguauugguaccucaaucacacaauuacggggaaaaccucucugccuaaguguuggcuggugagcaacggauccuaccucaaugagacacacuucucugaugacaucgaacagcaggccgauaacaugauuaccgagaugcugcaaaaagaauauauggagagacagggcaagacaccgcuugggcuggucgaccucuucguguuuagcaccuccuucuaccugaucagcauuuuucugcggcuugugaaaauccccacgcaccgccauauugucggaaagccuugccccaaaccucacagacucaaucauaugggcaucuguucuugcggccuguauaagcagcccgggguuccggugcgguggaagagaugaggacuagucccuguucccagagcccacuuuuuuuucuuuuuuugaaauaaaauagccugucuuucagaucuaaaaaaaaaaaaaaaaaaaaaaaaaaaaaaaaaaaaaaaaaaaaaaaaaaaaaaaaaaaaaaaaaaaaaaaaaaaaaaaaaaaaaaaaaaaaaaaaaaaa

SEQ ID NO: 23850 - RNA, 1740 nt, Artificial Sequence
  mRNA product Design a-2 (A100) comprising derived and/or modified sequence from LASV(Togo/2016/7082;Clade VI)__AMR44577__GPCmut2 (opt5)
aggagaguccgcucagccagguugcagaagcggcuuagcguguguccuaaucuucucucugcguguagguaggccugugccgcaaacaagcuuaccaugggccagaucauuaccuucuuucaagaggugccccacgucaucgaagagguuaugaacauugugcugaucgcccucagccugcuugcuauucugaaggggguguacaaugucgccacaugcggaaucaucggccucgugacguuccuguuucuuugugggagauccugcucucugauuuauaaaggaagcuacgaacuccagacccuggagcugaacauggaaacacucaauauguguaugccucuguccugcaccaagaacucuagccaucacuauauccggguuggcaaugagacagggcuugagcugacccucacaaacaccuccauuaucaaucauaaauucuguaaccugucugacgcgcacaagcgcaaucuuuacgaucaugcucugaugagcauucucuccacguuucaccugagcaucccgaacuucaaucaguaugaagccaugucuugcgacuuuaacggaggcaaaauuuccgugcaguacaaucugagccacgccuaugcugucgaugccgcugagcauuguggcaccguggccaacgggguucuccaaacauucaugagaauggcguggggaggcucuuacaucgcccuggacuccgggcggggaaauugggauugcaucaugaccagcuaccaguaucuuauuauccagaacacaaccugggaagaccacugucaguuuucucgccccuccccuauuggcuaccuggggcuccugagccaaagaacgcgggauaucuauauuucccgcagacggcgcggaacauucaccuggacacuuucugacagcgagggcaacgagacccccggcggguacugccugaccagauggaugcucaucgaagcugagcugaaguguuuuggaaauacagccguggcuaagugcaacgaaaaacaugaugaggaguucugcgacaugcugcggcucuuugauuucuguaagcaggccauccagcgccugaaauccccugcgcagaugagcauucaacuuaucaauaaggccgucaacgcucugauuaaugaccagcucaucaugaaaaaccaccugagagauaugaugggcauucccuauugcaauuacucuaaguauugguaccuuaaccacacguccagcgggcggaccucucugccuaaguguuggcucgugagcaauggauccuaccugaacgaaacacauuucucugacgacaucgagcagcaagccgauaauaugaucaccgaaaugcugcagaaagaguauauugaccgccagggcaagacaccgcucgggcugguggaucuuuuugucuucagcaccuccuuuuaccugaucagcauuuuccuccaccugaucaaaauucccacgcauagacacaucguuggaaagccuugccccaaaccucaucggcugaaccacaugggcauuuguucuugcggccuuuauaagcagcccggggugccgacaagauggaaacgcugaggacuagucccuguucccagagcccacuuuuuuuucuuuuuuugaaauaaaauagccugucuuucagaucuaaaaaaaaaaaaaaaaaaaaaaaaaaaaaaaaaaaaaaaaaaaaaaaaaaaaaaaaaaaaaaaaaaaaaaaaaaaaaaaaaaaaaaaaaaaaaaaaaaaa

SEQ ID NO: 23851 - RNA, 1740 nt, Artificial Sequence
  mRNA product Design a-2 (A100) comprising derived and/or modified sequence from LASV(KAK-428;Clade n.d. (VII))__ANH09740__GPCmut2 (opt5)
aggagaguccgcucagccagguugcagaagcggcuuagcguguguccuaaucuucucucugcguguagguaggccugugccgcaaacaagcuuaccaugggccagaucgugaccuucuuucaagaggucccccacguuauugaagaggugaugaacaucgugcugauugcccucagccugcuugcuauccugaaggggcucuacaauuucgccacaugcggagucauuggccugaucacguuucuucugcucugugggagauccugcucugcgaccuauaaaggacaguacgaacugcagacacuggagcucaacauggaaagccugaauauguguaugccucuuuccugcaccaagaacaauucucaucacuauauccgggcuggcaacaauacagggcuggagcucacccugacaaacaccagcauuaucucccauaaauucuguaaucuuucugacgcccacaagaaaaaccuguacgaucauacgcucaugagcauuaucaccacauuucaccuguccauuccgaauuucaaccaguaugaggccaugagcugcgacuuuaauggaggcaagaucucuauucaauacaaccugucccacagcuaugcuggcgaugccgcucagcauugugggaccguggccaauggaguucuccagacauucaugcgcauggcguggggcgggucuuaccuggcccuugacuccggaagacggggcugggauugcaucaucagcucuuaccaguaucugauuauccaaaacaccacgugggacgaucacugucaguuuucccgccccagcccuauuggguaccucggauucgugucccagaagacaagagacaucuauauuucucggcgcagacggggcaccuuuacauggacccugagcgauuccgaaggccaugacaugcccgggggauacugccuuacccgcuggaugcugaucgaggcugaucucaaauguuucggcaacacagccgucgcuaagugcaaugaaaaacacgacgaggaguuuugcgauauguggagacuguucgacuucuguaagcaggccauccaacggcugaaagcgccugcccagaugaacauucagcucaucaauaaggcugugaacgcccugauuaaugaccaacuuaugaugaagaaccaucugcgcgauaucauggggauucccuauugcaauuacagcaaauuuugguaucucaacaauacgaccacaggaagaaccucucugccucgguguuggcuuaucuccaacggcagcuaccugaaugaaacacacuucucugacgauaucgagcagcaggcugacaacaugauuaccgaaaugcuccagaaggaguacauggaucgccaagggaaaacgccgcugggacugguugaccucuuuguguucagcacauccuuuuaucugaucaccauuuuccuucaccuggucaagauccccacccauagacacauugugggcaaaccuugccccaagccucaucggcucaaucacaugggcaucuguucuugcgggcuguacaaacagcccggagugccggucagauggaagcgcugaggacuagucccuguucccagagcccacuuuuuuuucuuuuuuugaaauaaaauagccugucuuucagaucuaaaaaaaaaaaaaaaaaaaaaaaaaaaaaaaaaaaaaaaaaaaaaaaaaaaaaaaaaaaaaaaaaaaaaaaaaaaaaaaaaaaaaaaaaaaaaaaaaaaa

SEQ ID NO: 23852 - RNA, 1740 nt, Artificial Sequence; identical to SEQ ID NO: 23846
  mRNA product Design a-2 (A100) comprising derived and/or modified sequence from LASV(Pinneo-NIG-1969;Clade I)__AIT17836__GPCmut2 (opt5)

SEQ ID NO: 23853 - RNA, 1740 nt, Artificial Sequence
  mRNA product Design a-2 (A100) comprising derived and/or modified sequence from LASV(ISTH0009-NIG-2011;Clade II)__AIT17404__GPCmut2 (opt5)
aggagaguccgcucagccagguugcagaagcggcuuagcguguguccuaaucuucucucugcguguagguaggccugugccgcaaacaagcuuaccaugggccagaucauuaccuucuuucaagaggugccccacgucaucgaagagguuaugaacauugugcugaucgcccucagccugcuugcuauucugaaggggaucuacaauguggccacaugcggacucuucggccuggucuccuuucuucugcucugugggagaucuugcagcacgaccuauaaaggaguguacgaacugcagacacuggagcucgacauggcgucccugaacauguguaugccucuuucuugcaccaagaauaacagccaucacuauaucaugguuggcaaugaaacagggcuggagcucacccugacaaacaccuccauuaucaaucauaaauucuguaaccuuucugaugcucacaagaaaaaucuguacgaccaugcccucaugagcauuaucuccacguuucaccugagcauuccgaacuucaaucaguaugaggccaugucuugcgauuuuaacggaggcaagaucuccgugcaguacaaucugagccacgcuuaugccgucgacgcugccaaccauuguggcaccauugcgaauggggugcuccaaacauucaugcggauggccuggggaggcucuuacaucgcucuggauuccgggaagggaagcugggacugcaucaugaccucuuaccaguaucuuauuauccagaacacaaccugggaagaucacugucaguuuucccgccccagcccuauuggcuaccuggggcuccugucccaaagaacgcgggacaucuauauuucucgcagacggcgcggaacauucaccuggacacuuagcgauuccgagggcaacgaaacccccggcggguacugccugaccagauggaugcucaucgaggccgagcugaaauguuuuggaaauacagcuguugccaagugcaacgaaaaacaugacgaggaguucugcgauaugcugcggcucuuugacuucuguaagcaggcgauccgcagacugaaaacgccugcccagaugagcauucagcuuaucaauaaggcugugaacgcccugauuaaugaucaacucaucaugaagaaccaucugcgggacauuaugggcauccccuauugcaauuacucuaaauauugguaccuuaaccacaccgucacagggaagaccucccugccucgcuguuggcucgugagcaauggaucuuaccugaacgaaacacacuucagcgacgauaucgaacagcaggcugacaauaugauuaccgagcugcuccaaaaagaguauauggauagacagggcaagacgccgcuggggcuuguggaccuguuugucuucuccacaucuuuuuaccucaucagcauuuuccugcaccugaucaaaauucccacccaucggcacaucaccggaaagccuugccccaaaccucaucgccuuaaccacaugggcauuuguuccugcggccucuauaagcaccccgggguuccggugaaguggaaaagaugaggacuagucccuguucccagagcccacuuuuuuuucuuuuuuugaaauaaaauagccugucuuucagaucuaaaaaaaaaaaaaaaaaaaaaaaaaaaaaaaaaaaaaaaaaaaaaaaaaaaaaaaaaaaaaaaaaaaaaaaaaaaaaaaaaaaaaaaaaaaaaaaaaaaa

SEQ ID NO: 23854 - RNA, 1740 nt, Artificial Sequence
  mRNA product Design a-2 (A100) comprising derived and/or modified sequence from LASV(ISTH2010-NIG-2012;Clade II)__AIT17482__GPCmut2 (opt5)
aggagaguccgcucagccagguugcagaagcggcuuagcguguguccuaaucuucucucugcguguagguaggccugugccgcaaacaagcuuaccaugggccagaucauuaccuucuuucaagaggugccccacgucaucgaagagguuaugaacauugugcugaucgcccucagccugcuugcuauucugaaggggaucuacaauguggccacaugcggacucuucggccuggucuccuuucuucugcucugugggagaucuugcagcacgaccuauaaaggaguguacgaacugcagacacuggagcucgacauggcgucccugaacauguguaugccucuuucuugcaccaagaauaacagccaucacuauaucaugguuggcaaugaaacagggcuggagcucacccugacaaacaccuccauuaucaaucauaaauucuguaaccuuucugaugcucacaagaaaaaucuguacgaccaugcccucaugagcauuaucuccacguuucaccugagcauuccgaacuucaaucaguaugaggccaugucuugcgauuuuaacggaggcaagaucuccgugcaguacaaucugagccacgcuuaugccgucgacgcugccaaccauuguggcaccauugcgaauggggugcuccaaacauucaugcggauggccuggggaggcucuuacaucgcucuggauuccgggaagggaagcugggacugcaucaugaccucuuaccaguaucuuauuauccagaacauuacaugggaagaucacugucaguuuucccgccccagcccuaucggcuaccuggggcuccugucccaaagaacccgggacauuuauaucucucgcagacggcgcggaacguucacauggacccuuagcgauuccgagggcaacgaaacacccggcggguacugccugaccagauggaugcucaucgaggccgagcugaaauguuuuggaaauaccgcuguugccaagugcaacgaaaaacaugacgaggaguucugcgauaugcugcggcucuuugacuucuguaagcaggcgauucgcagacugaaaacgccugcccagaugagcauccagcuuauuaauaaggcugugaacgcccugaucaaugaucaacucauuaugaagaaccaucugcgggacaucaugggcauccccuauugcaauuacucuaaauauugguaccuuaaccacacagucaccgggaagacaucccugccucgcuguuggcucgugagcaauggaucuuaccugaacgaaacccacuucagcgacgauauugaacagcaggcugacaauaugaucacagagcugcuccaaaaagaguauauugauagacagggcaagaccccgcuggggcuuguggaccuguuugucuucuccacgucuuuuuaccucaucagcauuuuccugcaccugguuaaaauccccacacaucggcacguggugggaaagccuugccccaaaccucaucgccuuaaccacaugggcauuuguuccugcggccucuauaagcaccccggggucccggugaaguggaaaagaugaggacuagucccuguucccagagcccacuuuuuuuucuuuuuuugaaauaaaauagccugucuuucagaucuaaaaaaaaaaaaaaaaaaaaaaaaaaaaaaaaaaaaaaaaaaaaaaaaaaaaaaaaaaaaaaaaaaaaaaaaaaaaaaaaaaaaaaaaaaaaaaaaaaaa

SEQ ID NO: 23855 - RNA, 1740 nt, Artificial Sequence
  mRNA product Design a-2 (A100) comprising derived and/or modified sequence from LASV(Lassa virus/H.sapiens-wt/NGA/2015/ISTH_0543;Clade II)__AVO03639__GPCmut2 (opt5)
aggagaguccgcucagccagguugcagaagcggcuuagcguguguccuaaucuucucucugcguguagguaggccugugccgcaaacaagcuuaccaugggccagaucauuaccuucuuucaagaggugccccacgucaucgaagagguuaugaacauugugcugaucgcccucagccugcuugcuauucugaaggggaucuacaauguggccacaugcggacucuucggccuggucuccuuucuucugcucugugggagaucuugcagcacgaccuauaaaggaguguacgaacugcagacacuggagcucgacauggcgaaccugaauauguguaugccucuuuccugcaccaagaacaauucucaucacuauaucaugguuggcaacgaaacagggcuggagcucacccugacaaauaccagcauuaucaaccauaaauucuguaaucuuuccgaugcucacaagaaaaaccuguacgaccaugcccucaugucuauuaucagcacguuucaccuguccauuccgaauuucaaccaguaugaggccaugagcugcgauuuuaauggaggcaagaucucugugcaguacaaccugucccacaccuaugcugucgacgccgcuaaucauuguggcacaauugccaacggggugcuccaaaccuucaugcggauggcguggggaggcagcuacaucgcccuggauucugggaagggauccugggacugcaucaugacaagcuaccaguaucuuguuauucagaacaccacgugggaagaucacugucaguuuucucgccccuccccuaucggcuaccuggggcuccugagccaaagaacacgggacauuuauaucucccgcagacggcgcggaaccuucacauggacccuuucugauagcgagggcaaugaaacccccggcggguacugccugacaagauggaugcucauugaggcugagcugaaauguuuuggaaacacggccguggcuaagugcaaugaaaaacaugacgaggaguucugcgauaugcugcggcucuuugacuucuguaagcaggccauccgcagacugaaaaccccugcgcagauguccauccagcuuauuaacaaggccgucaaugcucugaucaacgaucaacucauuaugaagaaucaucugcgggacaucaugggcauucccuauugcaacuacagcaaauauugguaccuuaaucacacagugaccgggaagacaucucugccucgcuguuggcucguguccaacggaagcuaccugaaugaaacccacuucucugacgauaucgaacagcaggccgacaacaugaucacggagcugcuccaaaaagaguauauugauagacagggcaagacaccgcuggggcuugucgaccuguuuguuuucagcaccuccuuuuaccucaucucuauuuuccugcaccuggugaaaauccccacccaucggcacauuacaggaaagccuugccccaaaccucaucgccuuaaucacaugggcaucuguagcugcggccucuauaagcaccccggggugccggucaaguggaaaagaugaggacuagucccuguucccagagcccacuuuuuuuucuuuuuuugaaauaaaauagccugucuuucagaucuaaaaaaaaaaaaaaaaaaaaaaaaaaaaaaaaaaaaaaaaaaaaaaaaaaaaaaaaaaaaaaaaaaaaaaaaaaaaaaaaaaaaaaaaaaaaaaaaaaaa

SEQ ID NO: 23856 - RNA, 1740 nt, Artificial Sequence
  mRNA product Design a-2 (A100) comprising derived and/or modified sequence from LASV(Lassa virus/H.sapiens-wt/NGA/2016/ISTH_0009;Clade II)__AVO03571__GPCmut2 (opt5)
aggagaguccgcucagccagguugcagaagcggcuuagcguguguccuaaucuucucucugcguguagguaggccugugccgcaaacaagcuuaccaugggccagaucauuaccuucuuucaagaggugccccacgucaucgaagagguuaugaacauugugcugaucgcccucagccugcuugcuauucugaaggggaucuacaauguggccacaugcggacuccugggccuugucuccuuccugcuccugugugggagaucuugcagcacgaccuauaaaggaguguacgaacugcagacacucgagcuggacauggcgucccuuaacauguguaugccucugucuugcaccaagaauaacagccaucacuauaucaugguuggcaaugaaacagggcucgagcugacccuuacaaacaccuccauuaucaaucauaaauuuuguaaccugucugaugcucacaagaaaaaucucuacgaccaugcccugaugagcauuaucuccacguuccaccugagcauuccgaacuuuaaucaguaugaggccaugucuugcgauuucaacggaggccggaucuccgugcaguacaaucucagccacucuuaugcugucgacgccgcuaaccauuguggcaccauugccaauggggugcugcaaacauuuaugcgcauggcguggggaggcuccuacaucgcccuugauagcgggaagggaucuugggacugcaucaugaccuccuaccaguaucugauuauccagaacacaaccugggaagaucacugucaguucagcagacccuccccuauuggcuaccucgggcugcuuucucaacggacgcgcgacaucuauauuagcagacggcgcagaggaacauuuaccuggacacuguccgauagcgagggcaacgaaacccccggcggguacugccucacccgguggaugcugaucgaggcugagcugaaguguuucggaaauacagccguugcuaaaugcaacgaaaagcaugacgaggaauuuugcgauaugcuccgccuguucgacuuuuguaaacaggccaucagacggcuuaagacgccugcgcagaugucuauucagcugaucaauaaagccgugaacgcucucauuaaugaucaacugaucaugaagaaccaccuucgcgacauuaugggcauccccuauugcaauuacuccaaguauugguaccugaaccacaccgucacagggaaaaccagccucccuagauguuggcuggugucuaauggaagcuaccugaacgagacacauuucuccgacgauaucgaacagcaggccgacaauaugauuaccgagcuccugcaaaaggaguauaucgaucggcagggcaaaacgccgcuugggcugguggaccucuucgucuuuucuaccagcuucuaccugauuuccaucuuucugcaccuuguuaagauucccacacaucgccacaucaccggaaaaccuugccccaagccucauagacucaaccacaugggcauuuguagcugcggccuguauaaucaccccggggugccggugaaauggaagcggugaggacuagucccuguucccagagcccacuuuuuuuucuuuuuuugaaauaaaauagccugucuuucagaucuaaaaaaaaaaaaaaaaaaaaaaaaaaaaaaaaaaaaaaaaaaaaaaaaaaaaaaaaaaaaaaaaaaaaaaaaaaaaaaaaaaaaaaaaaaaaaaaaaaaa

SEQ ID NO: 23857 - RNA, 1740 nt, Artificial Sequence
  mRNA product Design a-2 (A100) comprising derived and/or modified sequence from LASV(Lassa virus/H.sapiens-wt/NGA/2016/ISTH_0017;Clade II)__AVO03567__GPCmut2 (opt5)
aggagaguccgcucagccagguugcagaagcggcuuagcguguguccuaaucuucucucugcguguagguaggccugugccgcaaacaagcuuaccaugggccagaucauuaccuucuuucaagaggugccccacgucaucgaagagguuaugaacauugugcugaucgcccucagccugcuugcuauucugaaggggaucuacaauguggccacaugcggacucuucggccuggucuccuuucuucugcucugugggagaucuugcagcacgaccuauaaaggaguguacgaacugcagacacuggagcucgacauggcgucccugaacauguguaugccucuuucuugcaccaagaauaacagccaucacuauaucaugguuggcaaugaaacagggcuggagcucacccugacaaacaccuccauuaucaaucauaaauucuguaaccuuucugaugcucacaagaaaaaucuguacgaccaugcccucaugagcauuaucuccacguuucaccugagcauuccgaacuucaaucaguaugaggccaugucuugcgauuuuaacggaggcaagaucuccgugcaguacaaucugagccacaccuaugcuauugacgccgcuaaccauuguggcacaaucgccaaugggguccuccaaaccuucaugcggauggcguggggaggcucuuacaucgcccuggauuccgggaagggaagcugggacugcauuaugacaucuuaccaguaucuuaucauucagaacaccacgugggaagaucacugucaguuuucccgccccagcccuaucggcuaccuggggcuccugucccaaagaacacgggacauuuauaucucucgcagacggcgcggaaccuucacauggacccuuagcgauuccgagggcaacgaaacccccggcggguacugccugacaagauggaugcucaucgaggcugagcugaaauguuuuggaaauacggccguggcuaagugcaacgaaaaacaugacgaggaguucugcgauaugcugcggcucuuugacuucuguaagcaggccauucgcagacugaaaaccccugcgcagaugagcauccagcuuauuaauaaggccguuaacgcucugaucaaugaucaacucauuaugaagaaccaucugcgggacaucaugggcauccccuauugcaauuacucuaaauauugguaccuuaaccacacagugaccgggaagacaucccugccucgcuguuggcucgucagcaauggaucuuaccugaacgaaacccacuucagcgacgauauugaacagcaggccgacaauaugaucacggagcugcuccaaaaagaguauauggauagacagggcaagacaccgcuggggcuuguggaccuguuuguguucuccaccucuuuuuaccucauuagcaucuuccugcaccugguccggauucccacccaucgccacguuaucggaaaaccuugccccaagccucauagacuuaaccacaugggcauuuguuccugcggccucuauaaacaccccggggugccggugaaguggaagcggugaggacuagucccuguucccagagcccacuuuuuuuucuuuuuuugaaauaaaauagccugucuuucagaucuaaaaaaaaaaaaaaaaaaaaaaaaaaaaaaaaaaaaaaaaaaaaaaaaaaaaaaaaaaaaaaaaaaaaaaaaaaaaaaaaaaaaaaaaaaaaaaaaaaaa

SEQ ID NO: 23858 - RNA, 1740 nt, Artificial Sequence
  mRNA product Design a-2 (A100) comprising derived and/or modified sequence from LASV(Lassa virus/H.sapiens-wt/NGA/2018/ISTH_0959;Clade II)__AVV65099__GPCmut2 (opt5)
aggagaguccgcucagccagguugcagaagcggcuuagcguguguccuaaucuucucucugcguguagguaggccugugccgcaaacaagcuuaccaugggccagaucauuaccuucuuucaagaggugccccacgucaucgaagagguuaugaacauugugcugaucgcccucagccugcuugcuauucugaaggggaucuacaauguggucacaugcggacucuucggccugguguccuuucuucugcucugugggagaucuugcagcacgaccuauaaaggaguuuacgaacugcagacacuggagcucgacauggccucccugaacauguguaugccucuuucuugcaccaagaauaacagccaucacuauaucauggugggcaaugaaacagggcuggagcucacccugacaaacaccuccauuaucaaucauaaauucuguaaccuuucugaugcgcacaagaaaaaucuguacgaccaugcucucaugagcauuaucuccacguuucaccugagcauuccgaacuucaaucaguaugaggccaugucuugcgauuuuaacggaggcaagaucuccguccaguacaaucugagccacgccuaugcuauugacgccgcuaaccauuguggcaccaucgccaauggggugcuccaaacauucaugcggauggcguggggaggcucuuacaucgcccuggauuccgggaagggaagcugggacugcauuaugaccucuuaccaguaucuuaucauucagaacacaaccugggaagaucacugucaguuuucccgccccagcccuaucggcuaccuggggcuccugucccaaagaacgcgggacauuuauaucucucgcagacggcgcggaacauucaccuggacacuuagcgauuccgagggcaacgaaacccccggcggguacugccugaccagauggaugcucaucgaggcugagcugaaauguuuuggaaauacagccguugcuaagugcaacgaaaaacaugacgaggaguucugcgauaugcugcggcucuuugacuucuguaagcaggccauucgcagacugaaaacgccugcgcagaugagcauccagcuuauuaauaaggccgugaacgcucugaucaaugaucaacucauuaugaagaaccaucugcgggacaucaugggcauccccuauugcaauuacucuaaauauugguaccuuaaccacaccgucacagggaagaccucccugccucgcuguuggcucgugagcaauggaucuuaccugaacgaaacacacuucagcgacgauauugaacagcaggccgacaauaugaucaccgagcugcuccaaaaagaguauauugauagacagggcaagacgccgcuggggcuuguggaccuguuugucuucuccacaucuuuuuaccucaucagcauuuuccugcaccugguuaaaauccccacccaucggcacgugauuggaaagccuugccccaaaccucaucgccuuaaccacaugggcaucuguuccugcggccucuauaagcaccccggggugccggucaaguggaaaagaugaggacuagucccuguucccagagcccacuuuuuuuucuuuuuuugaaauaaaauagccugucuuucagaucuaaaaaaaaaaaaaaaaaaaaaaaaaaaaaaaaaaaaaaaaaaaaaaaaaaaaaaaaaaaaaaaaaaaaaaaaaaaaaaaaaaaaaaaaaaaaaaaaaaaa

SEQ ID NO: 23859 - RNA, 1740 nt, Artificial Sequence
  mRNA product Design a-2 (A100) comprising derived and/or modified sequence from LASV(LASV003-NIG-2008;Clade II)__AIT17580__GPCmut2 (opt5)
aggagaguccgcucagccagguugcagaagcggcuuagcguguguccuaaucuucucucugcguguagguaggccugugccgcaaacaagcuuaccaugggccagaucauuaccuucuuucaagaggugccccacgucaucgaagagguuaugaacauugugcugaucgcccucagccugcuugcuauucugaaggggaucuacaauguggccacaugcggacucuucggccuggucuccuuucuucugcucugugggagaucuugcagcacgaccuauaaaggaguguacgaacugcagacacuggagcucgacauggcgucccugaacauguguaugccucuuucuugcaccaagaauaacagccaucacuauaucaugguuggcaaugaaacagggcuggagcucacccugacaaacaccuccauuaucaaucauaaauucuguaaccuuucugaugcucacaagaaaaaucuguacgaccaugcccucaugagcauuaucuccacguuucaccugagcauuccgaacuucaaucaguaugaggccaugucuugcgauuuuaacggaggcaagaucuccgugcaguacaaucugagccacaccuaugcugucgacgccgcuaaccauuguggcacaauugccaauggggugcuccaaaccuucaugcggauggcguggggaggcucuuacaucgcccuggauuccgggaagggaagcugggacugcaucaugacaucuuaccaguaucuuauuauccagaacaccacgugggaagaucacugucaguuuucccgccccagcccuauuggcuaccuggggcuccugucccaaagaacacgggacaucuauauuucucgcagacggcgcggaaccuucacauggacccuuagcgauuccgagagcaacgaaacccccggcggcuacugccugacaagauggaugcucaucgaggcugagcugaaauguuuugggaauacggccguugcuaagugcaacgaaaaacaugacgaggaguucugcgauaugcugcggcucuuugacuucuguaagcaggccauccgcagacugaaagcgccugcccagaugucuauucagcuuaucaauaaggcugugaacgcccugauuaaugaucaacucaucaugaagaaccaucugcgggacauuaugggaauccccuauugcaauuacuccaaauauugguaccuuaaccacaccgucacaggccgcaccagccugccuagauguuggcucgugucuaaugggagcuaccugaacgaaacacacuucuccgacgauaucgaacagcaggcugacaauaugauuaccgagcugcuccaaaaggaguauauggaucggcagggaaaaacgccgcugggccuuguggaccuguuugucuucucuaccagcuuuuaccucaucuccauuuuccugcaccugguuaagauccccacacaucgccacgugauugggaaaccuugccccaagccucauagacuuaaccacaugggaaucuguagcugcggccucuauaaacaccccggcgugccggucaaguggaagcggugaggacuagucccuguucccagagcccacuuuuuuuucuuuuuuugaaauaaaauagccugucuuucagaucuaaaaaaaaaaaaaaaaaaaaaaaaaaaaaaaaaaaaaaaaaaaaaaaaaaaaaaaaaaaaaaaaaaaaaaaaaaaaaaaaaaaaaaaaaaaaaaaaaaaa

SEQ ID NO: 23860 - RNA, 1740 nt, Artificial Sequence
  mRNA product Design a-2 (A100) comprising derived and/or modified sequence from LASV(LASV035-NIG-2009;Clade II)__AIT17588__GPCmut2 (opt5)
aggagaguccgcucagccagguugcagaagcggcuuagcguguguccuaaucuucucucugcguguagguaggccugugccgcaaacaagcuuaccaugggccagaucauuaccuucuuucaagaggugccccacgucaucgaagagguuaugaacauugugcugaucgcccucagccugcuugcuauucugaaggggaucuacaauguggccacaugcggacucuucggccuggucuccuuucuucugcucugugggagaucuugcagcacgaccuauaaaggaguguacgaacugcagacacuggagcucgacauggcgucccugaacauguguaugccucuuucuugcaccaagaauaacagccaucacuauaucaugguuggcaaugaaacagggcuggagcucacccugacaaacaccuccauuaucaaucauaaauucuguaaccuuucugaugcucacaagaaaaaucuguacgaccaugcccucaugagcauuaucuccacguuucaccugagcauuccgaacuucaaucaguaugaggccaugucuugcgauuuuaacggaggcaagaucuccgugcaguacaaucugagccacgcuuaugccgucgacgcugccaaccauuguggcaccauugcgaauggggugcuccaaacauucaugcggauggccuggggaggcucuuacaucgcucuggauuccgggaagggaagcugggacugcaucaugaccucuuaccaguaucuuauuauccagaacacaaccugggaagaucacugucaguuuucccgccccagcccuauuggcuaccuggggcuccugucccaaagaacgcgggacaucuauauuucucgcagacggcgcggaacauucaccuggacacuuagcgauuccgagggcaacgaaacccccggcggguacugccugaccagauggaugcucaucgaggccgagcugaaauguuuuggaaauacagcuguugccaagugcaacgaaaaacaugacgaggaguucugcgauaugcugcggcucuuugacuucuguaagcaggcgauccgcagacugaaagccccugcucagaugagcauucagcuuaucaauaaggccgugaacgcucugauuaaugaucaacucaucaugaagaaccaucugcgggacauuaugggcauccccuauugcaauuacucuaaauauugguaccuuaaccacacggucaccgggaagacaucccugccucgcuguuggcucgugagcaauggaucuuaccugaacgaaacccacuucagcgacgauaucgaacagcaggccgacaauaugauuacagagcugcuccaaaaagaguauaucgauagacagggcaagaccccgcuggggcuuguggaccuguuugucuucuccacgucuuuuuaccucauuagcaucuuccugcaccugguuaaaauucccacacaucggcacgugaucggaaagccuugccccaaaccucaucgccuuaaccacaugggcauuuguuccugcggccucuauaagcaccccggggugccggucaaguggaaaagaugaggacuagucccuguucccagagcccacuuuuuuuucuuuuuuugaaauaaaauagccugucuuucagaucuaaaaaaaaaaaaaaaaaaaaaaaaaaaaaaaaaaaaaaaaaaaaaaaaaaaaaaaaaaaaaaaaaaaaaaaaaaaaaaaaaaaaaaaaaaaaaaaaaaaa

SEQ ID NO: 23861 - RNA, 1740 nt, Artificial Sequence
  mRNA product Design a-2 (A100) comprising derived and/or modified sequence from LASV(LASV1000-NIG-2009;Clade II)__AIT17782__GPCmut2 (opt5)
aggagaguccgcucagccagguugcagaagcggcuuagcguguguccuaaucuucucucugcguguagguaggccugugccgcaaacaagcuuaccaugggccagaucauuaccuucuuucaagaggugccccacgucaucgaagagguuaugaacauugugcugaucgcccucagccugcuugcuauucugaaggggaucuacaauguggccacaugcggacucuucggccuggucuccuuucuucugcucugugggagaucuugcagcacgaccuauaaaggaguguacgaacugcagacacuggagcucgacauggcgucccugaacauguguaugccucuuucuugcaccaagaauaacagccaucacuauaucaugguuggcaaugaaacagggcuggagcucacccugacaaacaccuccauuaucaaucauaaauucuguaaccuuucugaugcucacaagaaaaaucuguacgaccaugcccucaugagcauuaucuccacguuucaccugagcauuccgaacuucaaucaguaugaggccaugucuugcgauuuuaacggaggcaagaucuccgugcaguacaaucugagccacaccuaugcugucgacgccgcuaaccauuguggcacaauugccaauggggugcuccaaaccuucaugcggauggcguggggaggcucuuacaucgcccuggauuccgggaagggaagcugggacugcaucaugacaucuuaccaguaucuuauuauccagaacaccacgugggaagaucacugucaguuuucccgccccagcccuauuggcuaccuggggcuccugucccaaagaacacgggacaucuauauuucucgcagacggcgcggaaccuucacauggacccuuagcgauuccgagggcaacgaaacccccggcggguacugccugacaagauggaugcucaucgaggcugagcugaaauguuuuggaaauacggccguugcuaagugcaacgaaaaacaugacgaggaguucugcgauaugcugcggcucuuugacuucuguaagcaggccaucaaacgccugaagaccccugcgcagaugagcauucagcuuaucaauaaggccgugaacgcucugauuaaugaucaacucaucaugaaaaaccaccugagagacauuaugggcauccccuauugcaauuacucuaaguauugguaccuuaaccacacagucaccgggaaaacaucccugccucgguguuggcucgugagcaauggaucuuaccugaacgaaacccauuucagcgacgauaucgaacagcaggccgacaauaugauuacggagcugcuccaaaaggaguauaucgaucgccagggcaaaacaccgcuggggcuuguggaccuguuugucuucuccaccucuuuuuaccucauuagcaucuuccugcaccugguuaagauucccacccauagacacguggugggaaaaccuugccccaagccucaucggcuuaaccacaugggcaucuguuccugcggccucuauaagcaccccggggucccggugaaauggaagcgcugaggacuagucccuguucccagagcccacuuuuuuuucuuuuuuugaaauaaaauagccugucuuucagaucuaaaaaaaaaaaaaaaaaaaaaaaaaaaaaaaaaaaaaaaaaaaaaaaaaaaaaaaaaaaaaaaaaaaaaaaaaaaaaaaaaaaaaaaaaaaaaaaaaaaa

SEQ ID NO: 23862 - RNA, 1740 nt, Artificial Sequence
  mRNA product Design a-2 (A100) comprising derived and/or modified sequence from LASV(LASV221-NIG-2010;Clade II)__AIT17624__GPCmut2 (opt5)
aggagaguccgcucagccagguugcagaagcggcuuagcguguguccuaaucuucucucugcguguagguaggccugugccgcaaacaagcuuaccaugggccagaucauuaccuucuuucaagaggugccccacgucaucgaagagguuaugaacauugugcugaucgcccucagccugcuugcuauucugaaggggaucuacaauguggccacaugcggacucuucggccuggucuccuuucuucugcucugugggagaucuugcagcacgaccuauaaaggaguguacgaacugcagacacuggagcucgacauggcgucccugaacauguguaugccucuuucuugcaccaagaauaacagccaucacuauaucaugguuggcaaugaaacagggcuggagcucacccugacaaacaccuccauuaucaaucauaaauucuguaaccuuucugaugcucacaagaaaaaucuguacgaccaugcccucaugagcauuaucuccacguuucaccugagcauuccgaacuucaaucaguaugaggccaugucuugcgauuuuaacggaggcaagaucuccgugcaguacaaucugagccacaccuaugcuauugacgccgcuaaccauuguggcacaaucgccaaugggguccuccaaaccuucaugcggauggcguggggaggcucuuacaucgcccuggauuccgggaagggaagcugggacugcauuaugacaucuuaccaguaucuuaucauucagaacaccacgugggaagaucacugucaguuuucccgccccagcccuaucggcuaccuggggcuccugucccaaagaacacgggacauuuauaucucucgcagacggcgcggaaccuucacauggacccuuagcgauuccgagggcaacgaaacccccggcggguacugccugacaagauggaugcucaucgaggcugagcugaaauguuuuggaaauacggccguggcuaagugcaacgaaaaacaugacgaggaguucugcgauaugcugcggcucuuugacuucuguaagcaggccauucgcagacugaaaaccccugcgcagaugagcauccagcuuauuaauaaggccguuaacgcucugaucaaugaucaacucauuaugaagaaccaucugcgggacaucaugggcauccccuauugcaauuacucuaaauauugguaccuuaaccacacagugaccgggaagacaucccugccucgcuguuggcucgucagcaauggaucuuaccugaacgaaacccacuucagcgacgauauugaacagcaggccgacaauaugaucacggagaugcugcaaaaagaguauauggauagacagggcaagacaccgcucgggcugguggaccuuuuuguguucuccaccucuuuuuaccugauuagcaucuuccuccaccuggucaaaauucccacccaucggcacguuaucggaaagccuugccccaaaccucaucgccugaaccacaugggcauuuguuccugcggccuuuauaagcaccccggggugccggugaaguggaaaagaugaggacuagucccuguucccagagcccacuuuuuuuucuuuuuuugaaauaaaauagccugucuuucagaucuaaaaaaaaaaaaaaaaaaaaaaaaaaaaaaaaaaaaaaaaaaaaaaaaaaaaaaaaaaaaaaaaaaaaaaaaaaaaaaaaaaaaaaaaaaaaaaaaaaaa

SEQ ID NO: 23863 - RNA, 1740 nt, Artificial Sequence
  mRNA product Design a-2 (A100) comprising derived and/or modified sequence from LASV(LASV237-NIG-2010;Clade II)__AIT17638__GPCmut2 (opt5)
aggagaguccgcucagccagguugcagaagcggcuuagcguguguccuaaucuucucucugcguguagguaggccugugccgcaaacaagcuuaccaugggccagaucauuaccuucuuucaagaggugccccacgucaucgaagagguuaugaacauugugcugaucgcccucagccugcuugcuauucugaaggggaucuacaauguggccacaugcggacucuucggccuggucuccuuucuucugcucugugggagaucuugcagcacgaccuauaaaggaguguacgaacugcagacacuggagcucgacauggcgucccugaacauguguaugccucuuucuugcaccaagaauaacagccaucacuauaucaugguuggcaaugaaacagggcuggagcucacccugacaaacaccuccauuaucaaucauaaauucuguaaccuuucugaugcucacaagaaagaccuguacgaucaugcccucaugagcauuaucuccacguuucaccugagcauuccgaauuucaaccaguaugaggccaugucuugcgacuuuaauggaggcaagaucuccgugcaguacaaccugagccacaccuaugcugucgaugccgcuaaucauuguggcacaauugccaacggggugcuccaaaccuucaugcggauggcguggggaggcucuuacaucgcccuggacuccgggaagggaagcugggauugcaucaugacaucuuaccaguaucuuauuauccagaauaccacgugggaagaccacugucaguuuucccgccccagcccuauuggcuaccuggggcuccugucccaaagaacacgggauaucuauauuucucgcagacggcgcggaaccuucacauggacccuuagcgacuccgagggcaacgaaacccccggcggguacugccugacaagauggaugcucaucgaggcugagcugaaauguuuuggaaacacggccguugcuaagugcaaugaaaaacaugaugaggaguucugcgacaugcugcggcucuuugauuucuguaagcaggccauccgcagacugaaaaccccugcgcagaugagcauucagcuuaucaacaaggccgugaaugcucugauuaacgaccaacucaucaugaagaaucaucugcgggacauuaugggcauccccuauugcaacuacucuaaauauugguaccuuaaucacacagucaccgggaagacaucccugccucgcuguuggcucgugagcaacggaucuuaccugaaugaaacccacuucagcgaugacaucgaacagcaggccgauaacaugauuacggagcugcuccaaaaagaguauauggacagacagggcaagacaccgcuggggcuuguggaucuguuugucuucuccaccucuuuuuaccucaucagcauuuuccugcaccugaucaaaauucccacccaucggcacaucacaggaaagccuugccccaaaccucaucgccuuaaucacaugggcauuuguuccugcggccucuauaagcaccccgggguuccggugaaguggaaaagaugaggacuagucccuguucccagagcccacuuuuuuuucuuuuuuugaaauaaaauagccugucuuucagaucuaaaaaaaaaaaaaaaaaaaaaaaaaaaaaaaaaaaaaaaaaaaaaaaaaaaaaaaaaaaaaaaaaaaaaaaaaaaaaaaaaaaaaaaaaaaaaaaaaaaa

SEQ ID NO: 23864 - RNA, 1740 nt, Artificial Sequence
  mRNA product Design a-2 (A100) comprising derived and/or modified sequence from LASV(LASV253-NIG-2011;Clade II)__AIT17670__GPCmut2 (opt5)
aggagaguccgcucagccagguugcagaagcggcuuagcguguguccuaaucuucucucugcguguagguaggccugugccgcaaacaagcuuaccaugggccagaucauuaccuucuuucaagaggugccccacgucaucgaagagguuaugaacauugugcugaucgcccucagccugcuugcuauucugaaggggaucuacaauguggccacaugcggacucuucggccuggucuccuuucuucugcucugugggagaucuugcagcacgaccuauaaaggaguguacgaacugcagacacuggagcucgacauggcgucccugaacauguguaugccucuuucuugcaccaagaauaacagccaucacuauaucaugguuggcaaugaaacagggcuggagcucacccugacaaacaccuccauuaucaaucauaaauucuguaaccuuucugaugcucacaagaaaaaucuguacgaccaugcccucaugagcauuaucuccacguuucaccugagcauuccgaacuucaaucaguaugaggccaugucuugcgauuuuaacggaggcaagaucuccgugcaguacaaucugagccacaccuaugcugucgacgccgcuaaccauuguggcacaauugccaauggggugcuccaaaccuucaugcggauggcguggggaggcucuuacaucgcccuggauuccgggaagggaagcugggacugcaucaugacaucuuaccaguaucuuauuauccagaacaccacgugggaagaucacugucaguuuucccgccccagcccuauuggcuaccuggggcuccugucccaaagaacacgggacaucuauauuucucgcagacggcgcggaaccuucacauggacccuuagcgauuccgagggcaacgaaacccccggcggguacugccugacaagauggaugcucaucgaggcugagcugaaauguuuuggaaauacggccguugcuaagugcaacgaaaaacaugacgaggaguucugcgauaugcugcggcucuuugacuucuguaagcaggccauccgcagacugaaagcgccugcccagaugagcauucagcuuaucaauaaggcugugaacgcccugauuaaugaucaacucaucaugaagaaccaucugcgggacauuaugggcauccccuauugcaauuacucuaaauauugguaccuuaaccacaccgucacagggcgcaccucccugccuagauguuggcucgugagcaauggaucuuaccugaacgaaacacacuucagcgacgauaucgaacagcaggcugacaauaugauuaccgagcugcuccaaaaggaguauaucgaucggcagggcaaaacgccgcuggggcuuguggaccuguuugucuucuccacaucuuuuuaccucauuagcaucuuccugcaccugguuaagauucccacccaucgccacaucauuggaaaaccuugccccaagccucauagacuuaaccacaugggcaucuguuccugcggccucuauaaacaccccggggugccggugaaguggaagcggugaggacuagucccuguucccagagcccacuuuuuuuucuuuuuuugaaauaaaauagccugucuuucagaucuaaaaaaaaaaaaaaaaaaaaaaaaaaaaaaaaaaaaaaaaaaaaaaaaaaaaaaaaaaaaaaaaaaaaaaaaaaaaaaaaaaaaaaaaaaaaaaaaaaaa

SEQ ID NO: 23865 - RNA, 1740 nt, Artificial Sequence
  mRNA product Design a-2 (A100) comprising derived and/or modified sequence from LASV(LASV254-NIG-2011;Clade II)__AIT17674__GPCmut2 (opt5)
aggagaguccgcucagccagguugcagaagcggcuuagcguguguccuaaucuucucucugcguguagguaggccugugccgcaaacaagcuuaccaugggccagaucauuaccuucuuucaagaggugccccacgucaucgaagagguuaugaacauugugcugaucgcccucagccugcuugcuauucugaaggggaucuacaauguggccacaugcggacucuucggccuggucuccuuucuucugcucugugggagaucuugcagcacgaccuauaaaggaguguacgaacugcagacacuggagcucgacaugaccaaccugaauauguguaugccucuuuccugcacaaagaacaauucucaucacuauaucaugguuggcaacgaaaccgggcuggagcucacacugaccaauacgagcauuaucaaccauaaauucuguaaucuuuccgaugcgcacaagaaaaaccuguacaaucaugcucucaugucuauuaucagcaccuuucaccuguccauuccgaacuucaaucaguaugaggccaugagcugcgacuuuaacggaggcaagaucucugugcaguacaaucugucccacagcuaugccgucgaugcugccaaccauuguggcacaauugcuaacggggugcuccaaaccuucaugcggauggccuggggaggcucuuacaucgcgcuggacuccgggaagggaaauugggauugcaucaugacaagcuaccaguaucuuauuauccagaacaccacgugggaagaccacugucaguuuucucgccccuccccuauuggcuaccuggggcuccugagccaaagaacacgggauaucuauauuucccgcagacggcgcggaaccuucacauggacccuuucugacagcgagggcaaugaaacccccggcggguacugccugacaagauggaugcucaucgaggccgagcugaaauguuuuggaaacacggcuguugccaagugcaaugaaaaacaugaugaggaguucugcgacaugcugcggcucuuugauuucuguaagcaggcuauccgcagacugaaaaccccugcccaggcgaacauucagcuuaucaauaaggccgugaacgcucugauuaaugaccaacucaucaugaagaaccaucugcgggauauuaugggcauccccuauugcaauuacuccaaauauugguaccuuaaccacacagucaccgggaagacaagccugccucgcuguuggcucgugucuaauggauccuaccugaacgaaacccacuucagcgacgacaucgaacagcaggccgauaauaugauuacggagcugcuccaaaaagaguauauggacagacagggcaagacaccgcuggggcuuguggaucuguuugucuucucuaccagcuuuuaccucaucuccauuuuccugcaccugguuaaaauccccacccaucggcacgugauuggaaagccuugccccaaaccucaucgccuuaaccacaugggcaucuguucuugcggccucuauaagcaccccggggugccggucaaguggaaaagaugaggacuagucccuguucccagagcccacuuuuuuuucuuuuuuugaaauaaaauagccugucuuucagaucuaaaaaaaaaaaaaaaaaaaaaaaaaaaaaaaaaaaaaaaaaaaaaaaaaaaaaaaaaaaaaaaaaaaaaaaaaaaaaaaaaaaaaaaaaaaaaaaaaaaa

SEQ ID NO: 23866 - RNA, 1740 nt, Artificial Sequence
  mRNA product Design a-2 (A100) comprising derived and/or modified sequence from LASV(Nig08-A19;Clade III)__ADU56618__GPCmut2 (opt5)
aggagaguccgcucagccagguugcagaagcggcuuagcguguguccuaaucuucucucugcguguagguaggccugugccgcaaacaagcuuaccaugggccagaucgugaccuucuuucaagaggucccccacguuauugaagaggugaugaacaucgugcugauugcccucagcauccuggcuauucuuaaggggcuguacaauaucgccacaugcggacucaucggccuggucacguuccuucugcucuccgggagaucuuguagcaugaccuauaaaggaguguacgaacugcagacacuggagcucaacaugaauacccugaacaugugcaugccucuuuccuguacaaagaauaacucucaucacuauauuaugguuggcaaugaaaccgggcuggagcucacacugaccaacacgagccuucugcaucacaaauuuugcaaucucuccgacgcgcauaagaaaaaccuguacgaucacacccugaugucuaucauuagcacauuccaccucuccaucccgaauuuuaaccaguaugaggcuaugagcugugacuucaauggaggcaagauuaccgugcaguacaaccugucucauuccuaugccaucgaugccgcuaaucacugcggcacagucgccaacggggugcuucaaaccuuuaugcggauggcuuggggaggcagcuacauugcccuggacucugggcgcggaaagugggauuguaucaugacguccuaccaguaucucaucauucagaacacaaccugggaagaccauugccaguucagcagacccucuccuaucggcuaccuggggcuucugucccaacggacacgcgauauuuauaucagcagacggcgcagaggaaccuuuaccuggacacucuccgacucugagggcaaugaaacgcccggcggguacugucugacccgguggaugcugauugaggcggagcucaaaugcuucggaaacacagccguugcuaaguguaaugaaaaacacgaugaggaauuuugcgacaugcugcgccuuuucgauuuuugcaagcaggccaucagacggcugaaagcuccugcccagaugagcauccagcucauuaacaaggcggugaaugcccugaucaacgaccaacuuauuaugaagaaucaucugcgcgauaucaugggcauucccuauuguaacuacuccaaauauugguaccucaaucacaccagcacagggagaaccucucugccucggugcuggcuggucuccaacggaagcuaccucaaugagacgcacuucucugacgacaucgaacagcaggcugauaacaugaucacagagaugcugcaaaaggaguaucuugaccgccagggcaaaaccccgcuggggcucguggaucuguucguguuuagcaccuccuucuaccugauuucuaucuuucuucaucucgucaagauucccacacacagacauaucguuggaaaaccuugucccaagccucaccggcugaaucacaugggcauuugcagcuguggccuguauaaacagcccggggugccggugagauggaagcgcugaggacuagucccuguucccagagcccacuuuuuuuucuuuuuuugaaauaaaauagccugucuuucagaucuaaaaaaaaaaaaaaaaaaaaaaaaaaaaaaaaaaaaaaaaaaaaaaaaaaaaaaaaaaaaaaaaaaaaaaaaaaaaaaaaaaaaaaaaaaaaaaaaaaaa

SEQ ID NO: 23867 - RNA, 1743 nt, Artificial Sequence
  mRNA product Design a-2 (A100) comprising derived and/or modified sequence from LASV(G1180-SLE-2010;Clade IV)__AIT17168__GPCmut2 (opt5)
aggagaguccgcucagccagguugcagaagcggcuuagcguguguccuaaucuucucucugcguguagguaggccugugccgcaaacaagcuuaccaugggccagaucgugaccuucuuucaagaggucccccacguuauugaagaggugaugaacaucgugcugauugcccucagcauccuggcuguccuuaaggggcuguacaauuucgccacaugcggacucgugggccugcuuacguuucugcuccugugugggagauccugcaccgcgucucgguauaaaggaguuuacgaacugcagacacucgagcugaacauggaaacccuuaauauguguaugccucugagcugcacaaagaacaauucccaucacuauauuauggugggcaacgagaccgggcucgagcugacacuuaccaauacgucuaucaucaaccauaaauucuguaaucugagcgacgcucacaagaaaaaccucuacgaucaugcccugauguccauuaucucuaccuuucaccugagcauuccgaauuucaaccaguaugaagccauguccugcgacuuuaauggaggcaagaucagcguccaguacaaccucucucacuccuaugcuggcgaugccgcuaaucauugugggacaguggccaacggaguucugcaaaccuucaugcgcauggcguggggcgggagcuacauugcccuugacucuggacacggcuccugggauugcaucaugacaagcuaccaguaucugauuauccagaacaccacgugggaggaccauugucaguuuucuagacccuccccuaucggguaccucggacugcuuagccaacggacacgcgauauuuauaucuccagacggcgcagaggcaccuucacauggacccugucugacagcgaaggcaaggauacccccgggggauacugccucacacgguggaugcugauugaggcugagcugaaauguuuuggcaauacggccguggcuaagugcaacgaaaaacacgacgaggaguucugcgauaugcuccgccuguuugacuucuguaagcaggccauccagagacuuaaagcgccugcccagauguccauucaacugaucaauaaggcugucaacgcccucaucaaugaucagcugauuaugaagaaccaccuucgggacaucauggggauucccuauugcaauuacagcaaauauugguaccugaaccauaccacaaccggaaagacaucucucccuaaauguuggcugguguccaauggcagcuaccugaacgaaacccacuucucugacgauaucgaacagcaagcugacaauaugauuacggagaugcuccagaaggaguauauggaacgccaggggaaaacaccgcugggacuuguggaucuguuugucuucagcaccuccuuuuaccucaucucuaucuuccugcaucugguuaagauucccacccacagacauaucgugggcaaaagcugcccuaagccccaccggcuuaaccacaugggcauuuguuccugcgggcucuauaagcagccuggagugcccgucaaauggaagcgcugaggacuagucccuguucccagagcccacuuuuuuuucuuuuuuugaaauaaaauagccugucuuucagaucuaaaaaaaaaaaaaaaaaaaaaaaaaaaaaaaaaaaaaaaaaaaaaaaaaaaaaaaaaaaaaaaaaaaaaaaaaaaaaaaaaaaaaaaaaaaaaaaaaaaa

SEQ ID NO: 23868 - RNA, 1743 nt, Artificial Sequence
  mRNA product Design a-2 (A100) comprising derived and/or modified sequence from LASV(G1442-SLE-2011;Clade IV)__AIT17180__GPCmut2 (opt5)
aggagaguccgcucagccagguugcagaagcggcuuagcguguguccuaaucuucucucugcguguagguaggccugugccgcaaacaagcuuaccaugggccagaucgugaccuucuuucaagaggucccccacguuauugaagaggugaugaacaucgugcugauugcccucagcauccuggcuguccuuaaggggcuguacaauguggccacaugcggacucauuggccugguuacguuccuucugcucugugggagauccugcaccacaacccuguauaaaggaguguacgaacugcagacacucgagcugaacauggaaacccuuaauauguguaugccucugucuugcacaaagaacaauagccaucacuauauccgggucggcaacgagaccgggcucgagcugacgcuuaccaauacauccaucauuaaccauaaauuuuguaaucugucugacgcgcacaagaaaaaccucuacgaucaugcucugaugagcaucauuuccaccuuccaccugucuaucccgaauuuuaaccaguaugaagccaugagcugcgacuucaauggaggcaagauuuccgugcaguacaaccucagccacucuuaugccggcgaugcugccaaucauugugggacaguugcuaacggagugcugcaaaccuuuaugcgcauggccuggggcggguccuacaucgcgcuugacagcggaagaggcaacugggauugcauuaugacgucuuaccaguaucugaucauccagaauacaaccugggacgaucacugucaguucucccggcccagcccuauuggguaccucggacugcuuucucaacgcacaagagacgucuauaucucccggcgcagacggggcaccuuuaccuggacacugagcgauuccgagggcaaggacacgcccgggggauacugccucacccgcuggaugcugauugaagccgagcugaaauguuucggcaacacagcuguggccaagugcaaugagaaacaugaugaagaguuuugcgacaugcucagacuguucgauuuuuguaagcaggcuauccagcggcuuaaagccccugcgcagaugucuauucaacugaucaacaaggccgugaaugcucucaucaacgaccagcugauuaugaagaaucaccuucgcgacaucauggggauucccuauugcaacuacagcaaauauugguaccugaauaacaccgccacaggaaagaccucccucccuaaauguuggcugaucagcaauggcucuuaccugaacgaaacgcacuucuccgaugacauugagcaggaagcugauaauaugaucacagagaugcuccaaaaggaguauauggaaagacaggggaaaaccccgcugggacuugucgaccuguucguuuuuagcaccucuuucuaccucaucagcauuuuucugcaucuggugaagauccccacacaccggcauauugugggcaaauccugcccuaagccccaccgccuuaaccauaugggcaucuguucuugcgggcucuauaagcagccuggaguccccgugagauggaaacggugaggacuagucccuguucccagagcccacuuuuuuuucuuuuuuugaaauaaaauagccugucuuucagaucuaaaaaaaaaaaaaaaaaaaaaaaaaaaaaaaaaaaaaaaaaaaaaaaaaaaaaaaaaaaaaaaaaaaaaaaaaaaaaaaaaaaaaaaaaaaaaaaaaaaa

SEQ ID NO: 23869 - RNA, 1743 nt, Artificial Sequence
  mRNA product Design a-2 (A100) comprising derived and/or modified sequence from LASV(G3010-SLE-2013;Clade IV)__AIT17344__GPCmut2 (opt5)
aggagaguccgcucagccagguugcagaagcggcuuagcguguguccuaaucuucucucugcguguagguaggccugugccgcaaacaagcuuaccaugggccagaucgugaccuucuuucaagaggucccccacguuauugaagaggugaugaacaucgugcugauugcccucagcauccuggcuguccuuaaggggcuguacaauuucgccacaugcggacucgugggccugguuacguuucuucugcucugugggagauccugcaccacaucucuguauaaaggaguguacgaacugcagacccucgagcugaacauggaaacacuuaauauguguaugccucugagcugcaccaagaacaauucccaucacuauauuauggucggcaacgagacagggcucgagcugacccuuacgaauaccucuaucaucaaccauaaauucuguaaucugagcgacgcgcacaagaaaaaccucuacaaucaugcucugauguccauuaucucuacauuucaccugagcauuccgaacuucaaucaguaugaagccauguccugcgauuuuaacggaggcaagaucagcgugcaguacaaucucucucacuccuaugccggcgacgcugccagccauugugggaccguugcuaacggagugcugcaaacauucaugcggauggccuggggcgggucuuacauugcgcuugauuccggauacggcaagugggacugcaucaugaccagcuaucaguaccugauuauccagaacacgacaugggaggaucacugucaguuuucucgccccuccccuaucggguaucucggacugcuuagccaaagaacccgggacauuuacaucucccgcagacggcgcggcacauucaccuggacccugucugauagcgaaggcaaagacacacccgggggauauugccucacgagauggaugcugauugaggccgagcugaaguguuuuggcaauaccgcugucgccaaaugcaacgaaaagcaugaugaggaguucugcgacaugcuccggcuguuugauuucuguaaacaggcuauccagcgccuuaagaccccugcccagauguccauucaacugaucaauaaggcggugaacgcccucaucaaugaccagcugauuaugaaaaaccaccuuagagauaucauggggauucccuacugcaauuauagcaaguacugguaccugaaccacacaacaaccggaaaaacgucucucccuaaguguuggcugguguccaauggcagcuaucugaacgaaacacauuucucugacgacaucgaacagcaagcugauaauaugauuaccgagaugcuccagaaagaguacauggaacggcaggggaagaccccgcugggacuugucgaccuguuuguuuucagcacauccuuuuaucucaucucuaucuuccugcaccuggugaaaauucccacccaucgccacaucgugggcaagagcugcccuaagccccauagacuuaaccacaugggcauuuguuccugcgggcucuacaaacagccuggaguccccgugcgguggaagcgcugaggacuagucccuguucccagagcccacuuuuuuuucuuuuuuugaaauaaaauagccugucuuucagaucuaaaaaaaaaaaaaaaaaaaaaaaaaaaaaaaaaaaaaaaaaaaaaaaaaaaaaaaaaaaaaaaaaaaaaaaaaaaaaaaaaaaaaaaaaaaaaaaaaaaa

SEQ ID NO: 23870 - RNA, 1743 nt, Artificial Sequence
  mRNA product Design a-2 (A100) comprising derived and/or modified sequence from LASV(G502-SLE-2009;Clade IV)__AIT17126__GPCmut2 (opt5)
aggagaguccgcucagccagguugcagaagcggcuuagcguguguccuaaucuucucucugcguguagguaggccugugccgcaaacaagcuuaccaugggccagaucgugaccuucuuucaagaggucccccacguuauugaagaggugaugaacaucgugcugauugcccucagcauccuggcuguccuuaaggggcuguacaauuucgccacaugcggacucgugggccugcuuacguuucugcuccugugugggagauccugcaccacaggacuguauaaaggcguuuacgaacuccagacccuggagcuuaacauggaaacacugaauauguguaugccucucucuugcaccaagaacaauagccaucacuauauuaugguggggaacgagacaggacuggagcuuacccugacgaauaccuccaucaucaaccauaaauucuguaaucucucugacgcgcacaagaaaaaccuguacgaucaugcucugaugagcauuaucuccacauuucaccucucuauuccgaauuucaaccaguaugaagccaugagcugcgacuuuaauggcggcaagaucuccguccaguacaaccugagccacucuuaugccggggaugcugccgaccauuguggaaccguggcuaauggcguucuucaaacauucaugcggauggccuggggaggguccuacauugcgcuggauagcggccgcgggagaugggacugcaucaugaccucuuaccaguaucucauuauccagaacacgacaugggaggaucacugucaguuuucccggcccagcccuaucggauaccugggccuucugucucaacgcaccagagacauuuauaucucccggcgcagacggggcacauucaccuggacccucagcgauuccgaagggaaggacacacccggaggcuacugccugacgcgcuggaugcugauugaggccgagcucaaauguuuugggaacaccgcuguggccaagugcaaugaaaaacaugaugaggaguucugcgacaugcugagacuuuuugauuucuguaagcaggcuauccagcggcugaaagccccugcgcagaugucuauucaacucaucaacaaggccgucaaugcucugaucaacgaccagcuugugaugaagaaucaucugcgcgacauuaugggaauccccuauugcaacuacagcagauauugguaccucaaucacacaaccacaggccggaccucccugccuaaauguuggcuggugagcaacgggucuuaccucaaugaaacgcacuucuccgaugacauugaacagcaagccgauaacaugaucacagagaugcugcagaaggaguauauggaacgccagggaaaaaccccgcuuggccuggucgaccucuuuguuuucagcaccucuuuuuaccugauuagcaucuuccugcaccuugugaagauccccacacauagacacauugugggcaaauccugcccuaagccccaucggcucaaucacauggggaucuguucuugcggacuguauaaacagccuggcguccccgugaaguggaagagaugaggacuagucccuguucccagagcccacuuuuuuuucuuuuuuugaaauaaaauagccugucuuucagaucuaaaaaaaaaaaaaaaaaaaaaaaaaaaaaaaaaaaaaaaaaaaaaaaaaaaaaaaaaaaaaaaaaaaaaaaaaaaaaaaaaaaaaaaaaaaaaaaaaaaa

SEQ ID NO: 23871 - RNA, 1743 nt, Artificial Sequence
  mRNA product Design a-2 (A100) comprising derived and/or modified sequence from LASV(G733-SLE-2010;Clade IV)__AIT17154__GPCmut2 (opt5)
aggagaguccgcucagccagguugcagaagcggcuuagcguguguccuaaucuucucucugcguguagguaggccugugccgcaaacaagcuuaccaugggccagaucgugaccuucuuucaagaggucccccacguuauugaagaggugaugaacaucgugcugauugcccucagcauccuggcuguccuuaaggggcuguacaauuucgccacaugcggaauugugggccucguuuccuuucugcuucugugugggagaucuugcacgaccagccucuauaaaggaguguacgaacugcagacacuggagcucaacauggaaacccugaauauguguaugccucuuuccugcacaaagaacaauucucaucacuauaucauggucggcaacgagaccgggcuggagcucacacugaccaauacgagcaucauuaaccauaaauucuguaaucuuuccgacgcgcacaagaaaaaccuguacgaucaugcucucaugucuaucauuagcaccuuucaccuguccaucccgaauuucaaccaguaugaagccaugagcugcgacuuuaauggaggcaagauuucugugcaguacaaccugucccacagcuaugccggcgaugcugccaaucauugugggacaaucgcuaacggaguucuccaaaccuucaugcggauggccuggggcgggucuuacauugcgcuggacuccggacgcgauagaugggacugcaucaugacaagcuaccaguaucuuaucauucagaacaccacgugggaggaucacugucaguuuucucggcccuccccuaucggcuaccuggggcuccugagccaacgcacaagagacauuuauaucucccggcgcagacggggaaccuucacauggacccuuucugauagcgaaggcaaggacacccccggcggguacugccugacacgcuggaugcucauugaggccgagcugaaauguuuuggaaauacggcuguggccaagugcaacgaaaaacaugaugaggaguucugcgacaugcugagacucuuugauuucuguaagcaggcuauccagcggcugaaagccccugcgcagauguccauccaacuuauuaauaaggccgucaacgcucugaucaaugaccagcucauuaugaagaaccaucugcgcgacaucaugggcauucccuauugcaauuacagcaaauauugguaccuuaaccacaccacaaccgggaagacaucucugccuaaauguuggcucguguccaauggaagcuaccugaacgaaacccacuucucugaugacaucgaacagcaagccgauaauaugaucacggagaugcugcagaaggaguauauggaaagacagggcaaaacaccgcucgggcugguggaccuuuuugucuucagcaccuccuuuuaccugauuucuaucuuccuccaccugguuaagauucccacccaucggcacguggugggaaaaagcugcccuaagccccaucgccugaaccacaugggcaucuguuccugcggccuuuaugggcagccuggaguccccgugaaguggaaaagaugaggacuagucccuguucccagagcccacuuuuuuuucuuuuuuugaaauaaaauagccugucuuucagaucuaaaaaaaaaaaaaaaaaaaaaaaaaaaaaaaaaaaaaaaaaaaaaaaaaaaaaaaaaaaaaaaaaaaaaaaaaaaaaaaaaaaaaaaaaaaaaaaaaaaa

SEQ ID NO: 23872 - RNA, 1743 nt, Artificial Sequence
  mRNA product Design a-2 (A100) comprising derived and/or modified sequence from MOPV/LASV reassortant(IGS-1;Clade IV)__AFY05576__GPCmut2 (opt5)
aggagaguccgcucagccagguugcagaagcggcuuagcguguguccuaaucuucucucugcguguagguaggccugugccgcaaacaagcuuaccaugggccagaucgugaccuucuuucaagaggucccccacguuauugaagaggugaugaacaucgugcugauugcccucagcguccuggcugugcuuaaggggcuguacaauuucgccacaugcggacucguuggccuggugacguuucuucugcucugugggagauccugcaccacaucucuguauaaaggagucuacgaacugcagacccucgagcugaacauggaaacacuuaauauguguaugccucugagcugcaccaagaacaauucccaucacuauaucauggugggcaacgagacagggcucgagcugacccuuacgaauaccucuauuaucaaccauaaauucuguaaucugagcgacgcgcacaagaaaaaccucuacgaucaugcucugauguccaucauuucuacauuucaccugagcaucccgaauuucaaccaguaugaagccauguccugcgacuuuaauggaggcaagauuagcguucaguacaaccucucucacuccuaugccggcgaugcugccaaucauugugggaccguggcuaacggaguccugcaaacauucaugcggauggccuggggcgggagcuacaucgcgcuugacucuggacgcggcaacugggauugcauuaugaccuccuaccaguaucugaucauucagaauacgacaugggaggaccacugucaguuuagcagacccucuccuaucggguaccucggacugcuuucccaacggacccgcgauaucuauauuagcagacggcgcagaggcacauucaccuggacccuguccgacucugaaggcgaggauacacccgggggauacugccucacgcgguggaugcugaucgaggccgaacugaaguguuuuggcaacaccgcuguggccaaaugcaaugagaagcaugacgaagaguucugcgauaugcuccgccuguuugacuucuguaaacaggcuauucagagacuuaaggccccugcgcagaugagcauccaacugauuaacaaagccgugaaugcucucaucaacgaucagcugaucaugaagaaucaccuucgggacauuauggggauccccuauugcaacuacuccaaguauugguaccugaaucacacaaccacaggacgcaccagccucccuaaauguuggcuggucucuaacggcuccuaccugaaugaaacgcauuucagcgacgauauugagcagcaagccgacaacaugaucacagagaugcuccagaaggaauauauggagagacaggggaaaaccccgcugggacuuguugaucuguuuguguucucuaccagcuuuuaccucauuuccaucuuccugcaccuggugaagauccccacacaucggcacauugucggcaaaucuugcccuaagccccaucgccuuaaucacaugggcaucuguagcugcgggcucuauaaacagccuggagugcccguuaaguggaagagaugaggacuagucccuguucccagagcccacuuuuuuuucuuuuuuugaaauaaaauagccugucuuucagaucuaaaaaaaaaaaaaaaaaaaaaaaaaaaaaaaaaaaaaaaaaaaaaaaaaaaaaaaaaaaaaaaaaaaaaaaaaaaaaaaaaaaaaaaaaaaaaaaaaaaa

SEQ ID NO: 23873 - RNA, 1743 nt, Artificial Sequence
  mRNA product Design a-2 (A100) comprising derived and/or modified sequence from LASV(LM765-SLE-2012;Clade IV)__AIT17814__GPCmut2 (opt5)
aggagaguccgcucagccagguugcagaagcggcuuagcguguguccuaaucuucucucugcguguagguaggccugugccgcaaacaagcuuaccaugggccagaucgugaccuucuuucaagaggucccccacguuauugaagaggugaugaacaucgugcugauugcccucagcauccuggcuguccuuaaggggcuguacaauuucgccacaugcggacucgugggccugguuacguuucuucugcucugugggagauccugcaccacaucucuguauaaaggaguguacgaacugcagacccucgagcugaacauggaaacacuuaauauguguaugccucugagcugcaccaagaacaauucccaucacuauauuauggucggcaacgagacagggcucgagcugacccuuacgaauaccucuaucaucgaccauaaauucuguaaccugagcgaugcgcaccggaagaaucucuacgaccaugcucugauguccauuaucucuacauuucaccugagcauuccgaacuucaaucaguaugaagccauguccugcgauuuuaacggaggcaaaaucagcgugcaguacaaucucucucacuccuaugccaaggacgcugccgaucauuguggcaccguugcuaacggggugcugcaaacauucaugcgcauggccuggggaggcagcuacauugcgcuugacucugggagaggacggugggauugcaucaugaccuccuaccaguaucugauuauccagaauacgacaugggaggaccacugucaguuuagccgccccucuccuaucggcuaccucgggcugcuuucccaaagaacccgggauauuuauaucagccgcagacggcgcggaacauucaccuggacccuguccgacucugaaggcaaggauacacccggcggguacugccucacgagauggaugcugauugaggccgagcugaaauguuuuggaaacaccgcugucgccaagugcaacgaaaaacaugacgaggaguucugcgauaugcuccggcuguuugacuucuguaagcaggcuauccagcgccuuaaagccccugcgcagaugagcauucaacugaucaauaaggccgugaacgcucucaucaaugaccagcugauuaugaagaaccaccuuagagauaucaugggcauucccuauugcaauuacuccaaauauugguaccugaaccacacaaccacagggaagaccagccucccuaaauguuggcuggugucuaauggauccuaccugaacgaaacgcauuucagcgacgauaucgaacagcaagccgacaauaugauuacagagaugcuccagaaggaguauauggaacggcagggcaaaaccccgcuggggcuugucgaucuguuuguuuucucuaccagcuuuuaccucaucuccaucuuccugcaccuggugaagauucccacacaucgccacaucgugggaaaaccuugccccaagccucauagacuuaaccacaugggcauuuguucuugcggccucuauaagcagcccggggucccggugaaauggaagcggugaggacuagucccuguucccagagcccacuuuuuuuucuuuuuuugaaauaaaauagccugucuuucagaucuaaaaaaaaaaaaaaaaaaaaaaaaaaaaaaaaaaaaaaaaaaaaaaaaaaaaaaaaaaaaaaaaaaaaaaaaaaaaaaaaaaaaaaaaaaaaaaaaaaaa

SEQ ID NO: 23874 - RNA, 1743 nt, Artificial Sequence
  mRNA product Design a-2 (A100) comprising derived and/or modified sequence from LASV(LM776-SLE-2012;Clade IV)__AIT17824__GPCmut2 (opt5)
aggagaguccgcucagccagguugcagaagcggcuuagcguguguccuaaucuucucucugcguguagguaggccugugccgcaaacaagcuuaccaugggccagaucgugaccuucuuucaagaggucccccacguuauugaagaggugaugaacaucgugcugauugcccucagcauccuggcuguccuuaaggggcuguacaauuucgccacaugcggacucgugggccugguuacguuucuucugcucugugggagauccugcaccacaucuguguauaaaggagucuacgaacugcagacccuggagcucaacauggaaacacugaauauguguaugccucuuagcugcaccaagaacaauucccaucacuauauuauggugggcaacgagacagggcuggagcucacccugacgaauaccucuaucaucaaccauaaauucuguaaucuuagcgacgcgcacaagaaaaaccuguacgaucaugcucucauguccauuaucucuacauuucaccugagcauuccgaauuucaaccaguaugaagccauguccugcgacuuuaauggaggcaagaucagcguucaguacaaccugucucacuccuaugccggcgaugcugccaaucauugugggaccguggcuaacggaguccuccaaacauucaugcggauggccuggggcgggagcuacauugcgcuggacucuggacacggcaagugggauugcaucaugaccuccuaccaguaucuuauuauccagaacacgacaugggaggaccauugucaguuuagccgccccucuccuaucggguaccugggacuccugucccaaagaacccgggauauuuauaucagccgcagacggcgcggcacauucaccuggacccuuuccgacucugaaggcaaagauacacccgggggauacugccugacgagauggaugcucauugaggccgagcugaaguguuuuggcaauaccgcuguggccaaaugcaacgaaaagcacgacgaggaguucugcgauaugcugcggcucuuugacuucuguaaacaggcuauccagcgccugaaggccccugcgcagaugagcauucaacuuaucaauaaggccgugaacgcucugaucaaugaucagcucauuaugaaaaaccaccugagagacaucauggggauucccuauugcaauuacuccaaguauugguaccuuaaccauacaaccacaggaaaaaccagccugccuaaguguuggcucgucucuaauggcuccuaccugaacgaaacgcacuucagcgacgauaucgaacagcaagccgacaauaugauuacagagaugcugcagaaagaguauauggaacggcaggggaagaccccgcucggacugguugaucuuuuuguguucucuaccagcuuuuaccugaucuccaucuuccuccaucuggugaaaauucccacacaccgccauaucgucggcaagucuugcccuaagccccacagacugaaccacaugggcauuuguagcugcgggcuuuauaaacagccuggagugcccguucgguggaagcgcugaggacuagucccuguucccagagcccacuuuuuuuucuuuuuuugaaauaaaauagccugucuuucagaucuaaaaaaaaaaaaaaaaaaaaaaaaaaaaaaaaaaaaaaaaaaaaaaaaaaaaaaaaaaaaaaaaaaaaaaaaaaaaaaaaaaaaaaaaaaaaaaaaaaaa

SEQ ID NO: 23875 - RNA, 1743 nt, Artificial Sequence
  mRNA product Design a-2 (A100) comprising derived and/or modified sequence from LASV(Mad39;Clade IV)__ANH09722__GPCmut2 (opt5)
aggagaguccgcucagccagguugcagaagcggcuuagcguguguccuaaucuucucucugcguguagguaggccugugccgcaaacaagcuuaccaugggccagaucgugaccuucuuucaagaggucccccacguuauugaagaggugaugaacaucgugcugauugcccucagcauccuggcuguccuuaaggggcuguacaauguggccacaugcggacucauuggccugguuacguuccuucugcucugugggagauccugcaccacaacccuguauaaaggaguguacgaacugcaggcgcucgagcugaacauggaaacacuuaauauguguaugccucugucuugcaccaagaacaauagccaucacuauauccgggucggcaacgagacagggcucgagcugacccuuacgaauaccucccugaucaaccauaaauuuuguaaucucucugacgcucacaagaaaaaccuguacgaucaugcccugaugagcauuaucuccacauuccaccucucuauuccgaauuuuaaccaguaugaagccaugagcugcgacuucaaugauggaaagaucuccgugcaguacaaccugagccacaccuaugcuggcgacacagccaaucauuguggcaccguugcuaacggggugcuucaaacguuuaugcgcauggccuggggaggcucuuacauugcgcuggauuccgggagaggaggcugggacugcaucaugacaagcuaccaguaucucauuauccagaacaccacaugggaggaucacugucaguucucucggcccuccccuaucggguaccugggacuucugagccaacgcaccagagacauuuauaucucucggcgcagacggggcaccuuuacauggacgcucuccgauagcgaaggcaaggacacccccgggggauacugccugacacgcuggaugcugauugaggccgagcucaaauguuucggcaauaccgcugucgccaagugcaacgaaaaacaugaugaggaauuuugcgacaugcugagacuuuucgauuuuuguaagcaggcuauccagcggcugaaagccccugcgcagauguccauucaacucaucaauaaggccgugaacgcucugaucaaugaccagcuuauuaugaagaaccaucugcgcgacaucauggggauucccuauugcaauuacucuaaauauugguaccucaaccacacagugaccggaaagacgagccugccuaaauguuggcuggucuccaauggcagcuaccucaacgagacacacuucucugaugacaucgaacagcaagccgauaauaugauuaccgagaugcugcagaaggaguauauggaaagacaggggaaaaccccgcuuggacugguugaccucuucguguuuuccaccagcuucuaccugaucucuaucuuucugcaccuugugaagauucccacacaucggcacgucgugggcaaaccuugccccaagccucaucgccucaaccacaugggcaucuguagcugcggguucuauaagcagcccggaguuccggugagauggaaacggugaggacuagucccuguucccagagcccacuuuuuuuucuuuuuuugaaauaaaauagccugucuuucagaucuaaaaaaaaaaaaaaaaaaaaaaaaaaaaaaaaaaaaaaaaaaaaaaaaaaaaaaaaaaaaaaaaaaaaaaaaaaaaaaaaaaaaaaaaaaaaaaaaaaaa

SEQ ID NO: 23876 - RNA, 1743 nt, Artificial Sequence
  mRNA product Design a-2 (A100) comprising derived and/or modified sequence from LASV(Z0947-SLE-2011;Clade IV)__AIT17840__GPCmut2 (opt5)
aggagaguccgcucagccagguugcagaagcggcuuagcguguguccuaaucuucucucugcguguagguaggccugugccgcaaacaagcuuaccaugggccagaucgugaccuucuuucaagaggucccccacguuauugaagaggugaugaacaucgugcugauugcccucagcauccuggcuguccuuaaggggcuguacaauuucgccacaugcggacucgugggccugguuacguuucuucugcucugugggagauccugcaccauuucucuguauaaaggaguguacgaacugcagacacucgagcugaacauggaaacccuuaauauguguaugccucugagcugcacaaagaacaauucccaucacuauaucauggucggcaacgagaccgggcucgagcugacacuuaccaauacgucuaucauuaaccauaaauucuguaaucugagcgacgcgcacaagaaaaaccucuacgaucaugcucugauguccaucauuucuaccuuucaccugagcaucccgaauuucaaccaguaugaagccauguccugcgacuuuaauggaggcaagauuagcgugcaguacaaccucucucacuccuaugccggcgaugcugccaaucauugugggacaguugcuaacggagugcugcaaaccuucaugcggauggccuggggcgggagcuacaucgcgcuugacucuggacgcgauagaugggacugcauuaugacauccuaccaguaucugaucauccagaacaccacgugggaggaucacugucaguuuagccggcccucuccuauuggcuaccucgggcugcuuucccaacgcacaagagacaucuauauuagccggcgcagacggggaaccuucacauggacccuguccgauucugaaggcaaggacacccccggcggguacugccucacacgcuggaugcugaucgaggccgagcugaaauguuuuggaaauacggcugucgccaagugcaacgaaaaacaugaugaggaguucugcgacaugcucagacuguuugauuucuguaagcaggcuauucagcggcuuaaagccccugcgcagaugagcauccaacugaucaauaaggccgugaacgcucucauuaaugaccagcugaucaugaagaaccaccuucgcgacauuaugggcauccccuauugcaauuacuccaaauauugguaccugaaccacaccacaaccgggaagacaagccucccuaaauguuggcuggugucuaauggauccuaccugaacgaaacccauuucagcgaugacauugaacagcaagccgauaauaugaucacggagaugcuccagaaggaguauauggaaagacagggcaaaacaccgcuggggcuugucgaccuguuuguuuucucuaccagcuuuuaccucaucuccauuuuccugcaccuggugaagauccccacccaucggcacauugugggaaaaccuugccccaagccucaucgccuuaaccacaugggcaucuguucuugcggccucuauaagcagcccggggucccggugaaauggaagagaugaggacuagucccuguucccagagcccacuuuuuuuucuuuuuuugaaauaaaauagccugucuuucagaucuaaaaaaaaaaaaaaaaaaaaaaaaaaaaaaaaaaaaaaaaaaaaaaaaaaaaaaaaaaaaaaaaaaaaaaaaaaaaaaaaaaaaaaaaaaaaaaaaaaaa

SEQ ID NO: 23877 - RNA, 1781 nt, Artificial Sequence
  mRNA product Design b-4 (hSL-A64-N5) comprising derived and/or modified sequence from LASV(Josiah;Clade IV)__NP_694870__GPCmut2 (opt1)
aggagagucccgcagucggcguccagcggcucugcuuguucgugugugugucguugcaggccuuauucaagcuuaccaugggccagaucgugaccuucuuccaggaggucccccacgugaucgaggaggugaugaacaucguccugaucgcccucagcgugcuggccgugcugaaggggcucuacaacuucgcgaccugcggccuggucgggcuggugacguuccuccugcugugcggccgcuccugcaccaccagccucuacaaggggguguacgagcugcagacccuggagcucaacauggagacgcugaacaugugcaugccgcuguccugcaccaagaacaacagccaccacuacaucauggucggcaacgagaccggccucgagcugacgcugaccaacaccuccaucaucaaccacaaguucugcaaccucagcgacgcccacaagaagaaccuguacgaccacgcccugauguccaucaucagcaccuuccaccucuccauccccaacuucaaccaguacgaggccaugagcugcgacuucaacgggggcaagaucuccgugcaguacaaccugagccacuccuacgccggggacgcggccaaccacugcggcacgguggccaacgggguccugcagaccuucaugcggauggccuggggcggcagcuacaucgcgcucgacuccgggcgcggcaacugggacugcaucaugaccagcuaccaguaccugaucauccagaacaccacgugggaggaccacugccaguucucccggcccagccccaucggguaccugggccuccugucccagcgcacccgggacaucuacaucagccgccggcgccggggcaccuucaccuggacgcugagcgacuccgaggggaaggacaccccgggcggguacugccugacccgcuggaugcucaucgaggccgagcugaagugcuucggcaacaccgccguggccaagugcaacgagaagcacgacgaggaguucugcgacaugcugcggcuguucgacuucugcaagcaggccauccagcgccugaaggcgcccgcccagaugagcauccagcugaucaacaaggccgugaacgcccucaucaacgaccagcugaucaugaagaaccaccuccgggacaucauggggauccccuacugcaacuacuccaaguacugguaccucaaccacacgaccaccggccgcaccagccugcccaagugcuggcuggucuccaacggcagcuaccucaacgagacgcacuucuccgacgacaucgagcagcaggccgacaacaugaucaccgagaugcugcagaaggaguacauggagcggcaggggaagacgccccugggccucguggaccuguucguguucagcaccuccuucuaccugaucagcaucuuccugcaccucgucaagaucccgacccaccgccacaucguggggaaguccugccccaagccccaccggcugaaccacaugggcaucugcagcugcgggcuguacaagcagcccggcgugccggucaaguggaagcgcugaggacuaguaauaaggaaacuguaugaaugucugugggcaggaagugaagagauccuucuguaaagguuuuuggaauuaugucugcugaauaauaaacuuuuuugaaauaauaaaucugguagaaaaaugagaucucaaaggcucuuuucagagccaccaaaaaaaaaaaaaaaaaaaaaaaaaaaaaaaaaaaaaaaaaaaaaaaaaaaaaaaaaaaaaaaaagaauu

SEQ ID NO: 23878 - RNA, 1778 nt, Artificial Sequence
  mRNA product Design b-4 (hSL-A64-N5) comprising derived and/or modified sequence from LASV(LP;Clade I)__AAF86701__GPCmut2 (opt1)
aggagagucccgcagucggcguccagcggcucugcuuguucgugugugugucguugcaggccuuauucaagcuuaccaugggccagaucaucaccuucuuccaggaggugccccacgucaucgaggaggugaugaacaucgugcugaucgcccucagccugcuggccauccucaaggggcuguacaacaucgcgaccugcggcaucaucgggcuggucgccuuccucuuccugugcggcaaguccugcagccugacgcucaagggcggguacgagcugcagacccuggagcucaacauggagacccugaacaugugcaugccgcuguccugcacgaagaacagcucccaccacuacauccgcgugggcaacgagaccgggcucgagcugacccugaccaacacgagcaucaucaaccacaaguucugcaaccucuccgacgcccacaagaagaaccuguacgaccacgcccugaugagcaucaucuccaccuuccaccucagcauccccaacuucaaccaguacgaggccauguccugcgacuucaacggcgggaagaucagcgugcaguacaaccugucccacagcuacgcgggcgacgccgccgagcacugcgggaccgucgccaacggcgugcugcagaccuucaugcggauggcguggggcgggcgcuacaucgcccucgacuccggcaaggggaacugggacugcaucaugacgagcuaccaguaccugaucauccagaacaccaccugggaggaccacugccaguucucccggcccagccccaucggcuaccugggccuccugucccagcgcacccgggacaucuacaucagccgccggcgccgggggacguucaccuggacccugagcgacuccgagggcaacgagacccccgggggcuacugccugacgcgcuggaugcucaucgaggccgagcugaagugcuucgggaacaccgccguggccaagugcaacgagaagcacgacgaggaguucugcgacaugcugcggcuguucgacuucugcaagcaggcgauccgccggcugaaggcccccgcccagaugagcauccagcugaucaacaaggccgucaacgcccucaucaacgaccagcugaucaugaagaaccaccuccgcgacaucaugggcauccccuacugcaacuacuccaaguacugguaccucaaccacaccagcuccggccggaccagccugcccaagugcuggcugaucuccaacgggagcuaccucaacgagacgcaguucuccgacgacaucgagcagcaggcggacaacaugaucaccgagaugcugcagaaggaguacaucgagcgccagggcaagaccccgcuggggcucguggacaucuucaucuucagcaccuccuucuaccugaucagcaucuuccugcaccugaucaagaucccgacgcaccggcacaucgugggcaagcccugccccaagccccaccgccucaaccacaugggggucugcuccugcggccuguacaagcacccgggcgugcccaccaaguggaagcggugaggacuaguaauaaggaaacuguaugaaugucugugggcaggaagugaagagauccuucuguaaagguuuuuggaauuaugucugcugaauaauaaacuuuuuugaaauaauaaaucugguagaaaaaugagaucucaaaggcucuuuucagagccaccaaaaaaaaaaaaaaaaaaaaaaaaaaaaaaaaaaaaaaaaaaaaaaaaaaaaaaaaaaaaaaaaagaauu

SEQ ID NO: 23879 - RNA, 1778 nt, Artificial Sequence
  mRNA product Design b-4 (hSL-A64-N5) comprising derived and/or modified sequence from LASV(803213;Clade II)__AAF86703__GPCmut2 (opt1)
aggagagucccgcagucggcguccagcggcucugcuuguucgugugugugucguugcaggccuuauucaagcuuaccaugggccagaucaucaccuucuuccaggaggugccccacgucaucgaggaggugaugaacaucgugcugaucgcccucagccugcuggccauccucaaggggaucuacaacgucgcgaccugcggccuguucgggcugaucuccuuccuccugcugugcggccgcagcugcuccgugacguacaaggggguguacgagcuccagacccuggagcugaacauggccaaccucaacaugugcaugccgcugagcugcaccaagaacaacucccaccacuacaucauggucggcaacgagacgggccuggagcucacccugaccaacaccagcaucaucaaccacaaguucugcaaccuguccgacgcccacaagaagaaccucuacgaccacgcccugaugagcaucaucuccacguuccaccugagcauccccaacuucaaccaguacgaggccauguccugcgacuucaacgggggcaagaucagcgugcaguacaaccucucccacagcuucgcgguggacgccgccaaccacugcgggaccaucgccaacggcguccugcagaccuucaugcggauggcguggggcggguccuacaucgcccuggacagcggcaaggggaacugggacugcaucaugaccuccuaccaguaccucaucauccagaacacgaccugggaggaccacugccaguucagccgccccucccccaucggcuaccuggggcugcucagccagcggacccgcgacaucuacaucagccggcgccgccggggcaccuucacguggacccucuccgacagcgagggcaacgaggcccccgggggcuacugccugacccgguggaugcugaucgaggccgagcucaagugcuucgggaacaccgccguggcgaagugcaacgagaagcacgacgaggaguucugcgacaugcugcgccuguucgacuucugcaagcaggccaucaagcggcucaagacgcccgcccagauguccauccagcugaucaacaaggccgugaacgcccugaucaacgaccagcucaucaugaagaaccaccuccgcgacaucaugggcauccccuacugcaacuacagccgguacugguaccugaaccacaccgucaccgggaagaccucccugccccgcugcuggcuggugagcaacggcuccuaccugaacgagacgcacuucagcgacgacaucgagcagcaggcggacaacaugaucaccgagaugcuccagaaggaguacauggaccggcagggcaagaccccgcuggggcugguggaccucuucgucuucuccaccagcuucuaccugaucuccaucuuccugcaccuggugaagaucccgacgcaccgccacaucgugggcaagcccugccccaagccccaccggcucaaccacauggggaucugcagcugcggccuguacaagcacccggggguccccgugaaguggaagcgcugaggacuaguaauaaggaaacuguaugaaugucugugggcaggaagugaagagauccuucuguaaagguuuuuggaauuaugucugcugaauaauaaacuuuuuugaaauaauaaaucugguagaaaaaugagaucucaaaggcucuuuucagagccaccaaaaaaaaaaaaaaaaaaaaaaaaaaaaaaaaaaaaaaaaaaaaaaaaaaaaaaaaaaaaaaaaagaauu

SEQ ID NO: 23880 - RNA, 1778 nt, Artificial Sequence
  mRNA product Design b-4 (hSL-A64-N5) comprising derived and/or modified sequence from LASV(GA391;Clade III)__CAA36645__GPCmut2 (opt1)
aggagagucccgcagucggcguccagcggcucugcuuguucgugugugugucguugcaggccuuauucaagcuuaccaugggccagaucgugaccuucuuccaggaggucccccacgugaucgaggaggugaugaacaucguccugaucgcccucagcauccuggccauccugaaggggcucuacaacguggcgaccugcggccugaucgggcuggugacguuccuccugcuguccggccgcagcugcucccucaucuacaaggggaccuacgagcugcagacccuggagcucaacauggagacccugaacaugugcaugccgcugagcugcaccaagaacaacucccaccacuacauccgggucggcaacgagaccggccucgagcugacccugacgaacaccagcauccucaaccacaaguucugcaaccuguccgacgcccacaagcgcaaccuguacgaccacagccucauguccaucaucagcaccuuccaccuguccauccccaacuucaaccaguacgaggccaugagcugcgacuucaacgggggcaagaucaccgugcaguacaaccugucccacagcuucgccguggacgccgcggggcacugcggcacgcucgccaacgggguccugcagaccuucaugcggauggccuggggcggcuccuacaucgcccuggacagcgggcgcggcaacugggacugcaucaugaccuccuaccaguaccucaucauccagaacaccacgugggacgaccacugccaguucagccggcccucccccaucggguaccugggccugcucagccagcgcacccgggacaucuacaucagccgccggcgccggggcaccuucaccuggacgcucuccgacagcgaggggaacgagaccccgggcggguacugccugacccgcuggaugcugaucgaggcggagcucaagugcuucggcaacaccgccguggccaagugcaacgagaagcacgacgaggaguucugcgacaugcugcggcuguucgacuucugcaagcaggccauccgccggcucaagacgcccgcccagauguccauccagcugaucaacaaggcggugaacgcccugaucaacgaccagcucaucaugaagaaccaccuccgcgacaucauggggauccccuacugcaacuacagccgguacugguaccugaaccacaccuccaccggcaagaccagccugccccgcugcuggcugaucuccaacggcagcuaccugaacgagacgaaguucuccgacgacaucgagcagcaggccgacaacaugaucaccgagaugcuccagaaggaguacaucgaccggcaggggaagacgccccugggccuggucgaccuguucguguucagcaccuccuucuaccucaucagcaucuuccugcaccuggugaagaucccgacccaccgccacaucgucgggaagcccugccccaagccccaccggcucaaccacaugggcaucugcuccugcgggcuguacaagcagccgggcgugcccgugcgcuggaagcggugaggacuaguaauaaggaaacuguaugaaugucugugggcaggaagugaagagauccuucuguaaagguuuuuggaauuaugucugcugaauaauaaacuuuuuugaaauaauaaaucugguagaaaaaugagaucucaaaggcucuuuucagagccaccaaaaaaaaaaaaaaaaaaaaaaaaaaaaaaaaaaaaaaaaaaaaaaaaaaaaaaaaaaaaaaaaagaauu

SEQ ID NO: 23881 - RNA, 1781 nt, Artificial Sequence
  mRNA product Design b-4 (hSL-A64-N5) comprising derived and/or modified sequence from LASV(AV;Clade V)__CCA30314__GPCmut2 (opt1)
aggagagucccgcagucggcguccagcggcucugcuuguucgugugugugucguugcaggccuuauucaagcuuaccaugggccagaucgugaccuucuuccaggaggucccccacgugaucgaggaggugaugaacaucguccugaucgcccucagcauccuggccgugcugaaggggcucuacaacaucgcgaccugcggccugaucgggcugaucacguuccuccugcugugcggccgcuccugcagcuccaaccucuacaaggggguguacgagcugcagagccuggaccucaacauggagacccugaacaugugcaugccgcuguccugcaccaagaacaacagccaccacuacauccgggucggcaacgacacgggccucgagcugacccugaccaacaccuccauccucaaccacaaguucugcaaccugagcgacgcccacaagaaggaccuguacgaccacgcccucauguccaucaucagcacguuccaccuguccauccccaacuucaaccaguacgaggccaugagcugcgacuucaacgggggcaagaucuccgugcaguacaaccugagccacuccuacgccaucgacgcggccaaccacugcgggaccguggccaacggcauccuccagaccuucaugcgcauggccuggggcgggagcuacaucgcgcuggacuccggccgggggaacugggacugcaucaugaccagcuaccaguaccugaucauccagaacacgaccugggagaaccacugccaguucucccgccccagccccaucggcuaccucgggcugcugagccagcggacccgcgacaucuacaucucccggcgccgccggggcaccuucacguggacccugagcgacuccgagggcaacgccacccccgggggcuacugccucacccgguggaugcugaucgaggccgagcugaagugcuucgggaacacggccgucgccaagugcaacgagaagcacgacgaggaguucugcgacaugcuccgccuguucgacuucugcaagcaggcgaucagccggcugaagucccccgcccagaugagcauccagcucaucaacaaggccgugaacgcccugaucaacgaccagcugaucaugaagaaccaccuccgcgacaucaugggcauccccuacugcaacuacuccaaguacugguaccugaaccacaccaucaccgggaagaccagccugcccaagugcuggcucguguccaacggcagcuaccugaacgagacgcacuucuccgacgacaucgagcagcaggccgacaacaugaucaccgagaugcugcagaaggaguacauggagcggcagggcaagaccccgcucgggcuggucgaccuguucguguucagcaccuccuucuaccugaucagcaucuuccuccgccuggugaagaucccgacgcaccggcacaucgucggcaagcccugccccaagccccaccgccugaaccacauggggaucugcuccugcggccucuacaagcagccgggggugcccgugcgguggaagcgcugaggacuaguaauaaggaaacuguaugaaugucugugggcaggaagugaagagauccuucuguaaagguuuuuggaauuaugucugcugaauaauaaacuuuuuugaaauaauaaaucugguagaaaaaugagaucucaaaggcucuuuucagagccaccaaaaaaaaaaaaaaaaaaaaaaaaaaaaaaaaaaaaaaaaaaaaaaaaaaaaaaaaaaaaaaaaagaauu

SEQ ID NO: 23882 - RNA, 1778 nt, Artificial Sequence
  mRNA product Design b-4 (hSL-A64-N5) comprising derived and/or modified sequence from LASV(Togo/2016/7082;Clade VI)__AMR44577__GPCmut2 (opt1)
aggagagucccgcagucggcguccagcggcucugcuuguucgugugugugucguugcaggccuuauucaagcuuaccaugggccagaucaucaccuucuuccaggaggugccccacgucaucgaggaggugaugaacaucgugcugaucgcccucagccugcuggccauccucaagggggucuacaacguggcgaccugcggcaucaucgggcuggugacguuccuguuccucugcggccgcuccugcagccugaucuacaagggguccuacgagcugcagacccucgagcugaacauggagacccugaacaugugcaugccgcucagcugcacgaagaacuccagccaccacuacauccgggucggcaacgagaccggccuggagcugacccucaccaacacguccaucaucaaccacaaguucugcaaccugagcgacgcccacaagcgcaaccuguacgaccacgcccucauguccauccugagcaccuuccaccuguccauccccaacuucaaccaguacgaggccaugagcugcgacuucaacgggggcaagaucuccgugcaguacaaccucagccacgccuacgcgguggacgccgccgagcacugcgggaccgucgccaacggcgugcugcagaccuucaugcggauggcguggggcggguccuacaucgcccuggacagcggccgcgggaacugggacugcaucaugacguccuaccaguaccucaucauccagaacaccaccugggaggaccacugccaguucagccggcccucccccaucggcuaccuggggcugcucagccagcgcacccgggacaucuacaucagccgccggcgccggggcacguucaccuggacccucuccgacagcgagggcaacgagacccccgggggcuacugccugacgcgcuggaugcugaucgaggccgagcucaagugcuucgggaacaccgccguggccaagugcaacgagaagcacgacgaggaguucugcgacaugcugcggcuguucgacuucugcaagcaggcgauccagcgccucaagucccccgcccagaugagcauccagcugaucaacaaggccgucaacgcccugaucaacgaccagcucaucaugaagaaccaccuccgggacaugaugggcauccccuacugcaacuacuccaaguacugguaccugaaccacaccagcuccgggcgcaccagccugcccaagugcuggcugguguccaacggcagcuaccugaacgagacgcacuucuccgacgacaucgagcagcaggccgacaacaugaucaccgagaugcuccagaaggaguacaucgaccggcagggcaagaccccgcuggggcugguggaccucuucgucuucagcaccuccuucuaccugaucagcaucuuccugcaccugaucaagaucccgacgcaccgccacaucgugggcaagcccugccccaagccccaccggcucaaccacauggggaucugcuccugcggccuguacaagcagccgggggugcccacccgcuggaagcggugaggacuaguaauaaggaaacuguaugaaugucugugggcaggaagugaagagauccuucuguaaagguuuuuggaauuaugucugcugaauaauaaacuuuuuugaaauaauaaaucugguagaaaaaugagaucucaaaggcucuuuucagagccaccaaaaaaaaaaaaaaaaaaaaaaaaaaaaaaaaaaaaaaaaaaaaaaaaaaaaaaaaaaaaaaaaagaauu

SEQ ID NO: 23883 - RNA, 1778 nt, Artificial Sequence
  mRNA product Design b-4 (hSL-A64-N5) comprising derived and/or modified sequence from LASV(KAK-428;Clade n.d. (VII))__ANH09740__GPCmut2 (opt1)
aggagagucccgcagucggcguccagcggcucugcuuguucgugugugugucguugcaggccuuauucaagcuuaccaugggccagaucgugaccuucuuccaggaggucccccacgugaucgaggaggugaugaacaucguccugaucgcccucagccugcuggccauccucaaggggcuguacaacuucgcgaccugcggcgugaucgggcugaucacguuccuccugcugugcggccgcuccugcagcgccaccuacaaggggcaguacgagcuccagacccuggagcugaacauggagucccucaacaugugcaugccgcugagcugcacgaagaacaacucccaccacuacauccgggccggcaacaacaccggccuggagcucacccugaccaacacgagcaucaucucccacaaguucugcaaccugagcgacgcccacaagaagaaccucuacgaccacacccugauguccaucaucaccaccuuccaccugagcauccccaacuucaaccaguacgaggccauguccugcgacuucaacgggggcaagaucagcauccaguacaaccucucccacagcuacgcgggggacgccgcccagcacugcggcacgguggccaacgggguccugcagaccuucaugcgcauggcguggggcggcuccuaccuggcccucgacagcgggcggcgcggcugggacugcaucaucuccagcuaccaguaccugaucauccagaacaccaccugggacgaccacugccaguucucccggcccagccccaucggguaccugggcuucgugagccagaagacgcgcgacaucuacaucucccggcgccgccggggcaccuucaccuggacccugagcgacuccgaggggcacgacaugccgggcggguacugccucacgcgguggaugcugaucgaggccgaccugaagugcuucggcaacaccgccguggccaagugcaacgagaagcacgacgaggaguucugcgacauguggcgccucuucgacuucugcaagcaggcgauccagcggcugaaggcccccgcccagaugaacauccagcugaucaacaaggccgucaacgcccucaucaacgaccagcugaugaugaagaaccaccuccgcgacaucauggggauccccuacugcaacuacagcaaguucugguaccugaacaacaccaccacgggccggaccucccugccccgcugcuggcugaucagcaacggcuccuaccucaacgagacccacuucagcgacgacaucgagcagcaggcggacaacaugaucaccgagaugcugcagaaggaguacauggaccggcaggggaagacgccccugggccucguggaccuguucguguucuccaccagcuucuaccugaucaccaucuuccuccaccuggucaagaucccgacccaccgccacaucguggggaagcccugccccaagccccaccggcugaaccacaugggcaucugcuccugcgggcuguacaagcagccgggcgugcccguccgcuggaagcggugaggacuaguaauaaggaaacuguaugaaugucugugggcaggaagugaagagauccuucuguaaagguuuuuggaauuaugucugcugaauaauaaacuuuuuugaaauaauaaaucugguagaaaaaugagaucucaaaggcucuuuucagagccaccaaaaaaaaaaaaaaaaaaaaaaaaaaaaaaaaaaaaaaaaaaaaaaaaaaaaaaaaaaaaaaaaagaauu

SEQ ID NO: 23884 - RNA, 1778 nt, Artificial Sequence; identical to SEQ ID NO: 23878
  mRNA product Design b-4 (hSL-A64-N5) comprising derived and/or modified sequence from LASV(Pinneo-NIG-1969;Clade I)__AIT17836__GPCmut2 (opt1)

SEQ ID NO: 23885 - RNA, 1778 nt, Artificial Sequence
  mRNA product Design b-4 (hSL-A64-N5) comprising derived and/or modified sequence from LASV(ISTH0009-NIG-2011;Clade II)__AIT17404__GPCmut2 (opt1)
aggagagucccgcagucggcguccagcggcucugcuuguucgugugugugucguugcaggccuuauucaagcuuaccaugggccagaucaucaccuucuuccaggaggugccccacgucaucgaggaggugaugaacaucgugcugaucgcccucagccugcuggccauccucaaggggaucuacaacgucgcgaccugcggccuguucgggcugguguccuuccuccugcugugcggccgcagcugcuccacgaccuacaaggggguguacgagcuccagacccuggagcuggacauggccagccucaacaugugcaugccgcuguccugcacgaagaacaacagccaccacuacaucauggucggcaacgagaccggccuggagcucacccugaccaacacguccaucaucaaccacaaguucugcaaccugagcgacgcccacaagaagaaccucuacgaccacgcccugauguccaucaucagcaccuuccaccuguccauccccaacuucaaccaguacgaggccaugagcugcgacuucaacgggggcaagaucuccgugcaguacaaccucagccacgcguacgccguggacgccgccaaccacugcgggaccaucgcgaacggcguccugcagaccuucaugcggauggccuggggcggguccuacaucgcccuggacagcggcaagggguccugggacugcaucaugacgagcuaccaguaccucaucauccagaacaccaccugggaggaccacugccaguucucccgccccagccccaucggcuaccuggggcugcucagccagcggacccgcgacaucuacaucucccggcgccgccggggcacguucaccuggacccucagcgacuccgagggcaacgagacccccgggggcuacugccugacgcgguggaugcugaucgaggccgagcucaagugcuucgggaacaccgccguggcgaagugcaacgagaagcacgacgaggaguucugcgacaugcugcgccuguucgacuucugcaagcaggccauccggcgccucaagacccccgcccagaugagcauccagcugaucaacaaggccgugaacgcccugaucaacgaccagcucaucaugaagaaccaccuccgggacaucaugggcaucccguacugcaacuacuccaaguacugguaccugaaccacaccgucacggggaagaccagccugccccgcugcuggcugguguccaacggcagcuaccugaacgagacccacuucuccgacgacaucgagcagcaggcggacaacaugaucaccgagcuccugcagaaggaguacauggaccggcagggcaagacgccccuggggcucguggaccuguucgucuucagcaccuccuucuaccugaucagcaucuuccugcaccucaucaagaucccgacccaccgccacaucaccggcaagcccugccccaagccccaccggcugaaccacauggggaucugcuccugcggccuguacaagcacccgggggugcccgugaaguggaagcgcugaggacuaguaauaaggaaacuguaugaaugucugugggcaggaagugaagagauccuucuguaaagguuuuuggaauuaugucugcugaauaauaaacuuuuuugaaauaauaaaucugguagaaaaaugagaucucaaaggcucuuuucagagccaccaaaaaaaaaaaaaaaaaaaaaaaaaaaaaaaaaaaaaaaaaaaaaaaaaaaaaaaaaaaaaaaaagaauu

SEQ ID NO: 23886 - RNA, 1778 nt, Artificial Sequence
  mRNA product Design b-4 (hSL-A64-N5) comprising derived and/or modified sequence from LASV(ISTH2010-NIG-2012;Clade II)__AIT17482__GPCmut2 (opt1)
aggagagucccgcagucggcguccagcggcucugcuuguucgugugugugucguugcaggccuuauucaagcuuaccaugggccagaucaucaccuucuuccaggaggugccccacgucaucgaggaggugaugaacaucgugcugaucgcccucagccugcuggccauccucaaggggaucuacaacgucgcgaccugcggccuguucgggcugguguccuuccuccugcugugcggccgcagcugcuccacgaccuacaaggggguguacgagcuccagacccuggagcuggacauggccagccucaacaugugcaugccgcuguccugcacgaagaacaacagccaccacuacaucauggucggcaacgagaccggccuggagcucacccugaccaacacguccaucaucaaccacaaguucugcaaccugagcgacgcccacaagaagaaccucuacgaccacgcccugauguccaucaucagcaccuuccaccuguccauccccaacuucaaccaguacgaggccaugagcugcgacuucaacgggggcaagaucuccgugcaguacaaccucagccacgcguacgccguggacgccgccaaccacugcgggaccaucgcgaacggcguccugcagaccuucaugcggauggccuggggcggguccuacaucgcccuggacagcggcaagggguccugggacugcaucaugacgagcuaccaguaccucaucauccagaacaucaccugggaggaccacugccaguucucccgccccagccccaucggcuaccuggggcugcucagccagcggacccgcgacaucuacaucucccggcgccgccggggcaccuucacguggacccucagcgacuccgagggcaacgagacccccgggggcuacugccugacccgguggaugcugaucgaggccgagcucaagugcuucgggaacacggccguggcgaagugcaacgagaagcacgacgaggaguucugcgacaugcugcgccuguucgacuucugcaagcaggccauccggcgccucaagacccccgcccagaugagcauccagcugaucaacaaggccgugaacgcccugaucaacgaccagcucaucaugaagaaccaccuccgggacaucaugggcauccccuacugcaacuacuccaaguacugguaccugaaccacaccgucaccgggaagacgagccugccccgcugcuggcugguguccaacggcagcuaccugaacgagacccacuucuccgacgacaucgagcagcaggcggacaacaugaucaccgagcuccugcagaaggaguacaucgaccggcagggcaagaccccgcuggggcucguggaccuguucgucuucagcacguccuucuaccugaucagcaucuuccugcaccucgugaagaucccgacccaccgccacguggucggcaagcccugccccaagccccaccggcugaaccacauggggaucugcuccugcggccuguacaagcacccgggggugcccgugaaguggaagcgcugaggacuaguaauaaggaaacuguaugaaugucugugggcaggaagugaagagauccuucuguaaagguuuuuggaauuaugucugcugaauaauaaacuuuuuugaaauaauaaaucugguagaaaaaugagaucucaaaggcucuuuucagagccaccaaaaaaaaaaaaaaaaaaaaaaaaaaaaaaaaaaaaaaaaaaaaaaaaaaaaaaaaaaaaaaaaagaauu

SEQ ID NO: 23887 - RNA, 1778 nt, Artificial Sequence
  mRNA product Design b-4 (hSL-A64-N5) comprising derived and/or modified sequence from LASV(Lassa virus/H.sapiens-wt/NGA/2015/ISTH_0543;Clade II)__AVO03639__GPCmut2 (opt1)
aggagagucccgcagucggcguccagcggcucugcuuguucgugugugugucguugcaggccuuauucaagcuuaccaugggccagaucaucaccuucuuccaggaggugccccacgucaucgaggaggugaugaacaucgugcugaucgcccucagccugcuggccauccucaaggggaucuacaacgucgcgaccugcggccuguucgggcugguguccuuccuccugcugugcggccgcagcugcuccacgaccuacaaggggguguacgagcuccagacccuggagcuggacauggccaaccucaacaugugcaugccgcugagcugcacgaagaacaacucccaccacuacaucauggucggcaacgagaccggccuggagcucacccugaccaacacgagcaucaucaaccacaaguucugcaaccuguccgacgcccacaagaagaaccucuacgaccacgcccugaugagcaucaucuccaccuuccaccugagcauccccaacuucaaccaguacgaggccauguccugcgacuucaacgggggcaagaucagcgugcaguacaaccucucccacaccuacgcgguggacgccgccaaccacugcgggaccaucgccaacggcguccugcagacguucaugcggauggcguggggcgggagcuacaucgcccuggacuccggcaaggggagcugggacugcaucaugaccuccuaccaguaccucgugauccagaacaccaccugggaggaccacugccaguucagccgccccucccccaucggcuaccuggggcugcucagccagcggacgcgcgacaucuacaucagccggcgccgccggggcaccuucaccuggacccucuccgacagcgagggcaacgagacgcccgggggcuacugccugacccgguggaugcugaucgaggccgagcucaagugcuucgggaacaccgccguggccaagugcaacgagaagcacgacgaggaguucugcgacaugcugcgccuguucgacuucugcaagcaggcgauccggcgccucaagacccccgcccagauguccauccagcugaucaacaaggccgucaacgcccugaucaacgaccagcucaucaugaagaaccaccuccgggacaucaugggcauccccuacugcaacuacagcaaguacugguaccugaaccacacggugaccgggaagaccucccugccccgcugcuggcuggugagcaacggcuccuaccugaacgagacccacuucagcgacgacaucgagcagcaggccgacaacaugaucacggagcuccugcagaaggaguacaucgaccggcagggcaagaccccgcuggggcucgucgaccuguucguguucuccaccagcuucuaccugaucuccaucuuccugcaccucgugaagaucccgacccaccgccacaucacgggcaagcccugccccaagccccaccggcugaaccacauggggaucugcagcugcggccuguacaagcacccggggguccccgugaaguggaagcgcugaggacuaguaauaaggaaacuguaugaaugucugugggcaggaagugaagagauccuucuguaaagguuuuuggaauuaugucugcugaauaauaaacuuuuuugaaauaauaaaucugguagaaaaaugagaucucaaaggcucuuuucagagccaccaaaaaaaaaaaaaaaaaaaaaaaaaaaaaaaaaaaaaaaaaaaaaaaaaaaaaaaaaaaaaaaaagaauu

SEQ ID NO: 23888 - RNA, 1778 nt, Artificial Sequence
  mRNA product Design b-4 (hSL-A64-N5) comprising derived and/or modified sequence from LASV(Lassa virus/H.sapiens-wt/NGA/2016/ISTH_0009;Clade II)__AVO03571__GPCmut2 (opt1)
aggagagucccgcagucggcguccagcggcucugcuuguucgugugugugucguugcaggccuuauucaagcuuaccaugggccagaucaucaccuucuuccaggaggugccccacgucaucgaggaggugaugaacaucgugcugaucgcccucagccugcuggccauccucaaggggaucuacaacgucgcgaccugcggccugcuggggcucguguccuuccugcugcucugcggccgcagcugcuccacgaccuacaaggggguguacgagcugcagacccuggagcucgacauggccagccugaacaugugcaugccgcuguccugcacgaagaacaacagccaccacuacaucauggucggcaacgagaccggccucgagcugacccugaccaacacguccaucaucaaccacaaguucugcaaccucagcgacgcccacaagaagaaccuguacgaccacgcccugauguccaucaucagcaccuuccaccucuccauccccaacuucaaccaguacgaggccaugagcugcgacuucaacgggggccggaucuccgugcaguacaaccugagccacuccuacgcgguggacgccgccaaccacugcgggaccaucgccaacggcguccugcagaccuucaugcgcauggcguggggcgggagcuacaucgcccucgacuccggcaaggggagcugggacugcaucaugacguccuaccaguaccugaucauccagaacaccaccugggaggaccacugccaguucagccggcccagccccaucggcuaccuggggcuccugucccagcgcacccgggacaucuacaucagccgccggcgccggggcacguucaccuggacccuguccgacagcgagggcaacgagacccccgggggcuacugccugacgcgcuggaugcucaucgaggccgagcugaagugcuucgggaacaccgccguggccaagugcaacgagaagcacgacgaggaguucugcgacaugcugcggcuguucgacuucugcaagcaggcgauccgccggcugaagacccccgcccagauguccauccagcugaucaacaaggccgugaacgcccucaucaacgaccagcugaucaugaagaaccaccuccgcgacaucaugggcaucccguacugcaacuacagcaaguacugguaccucaaccacaccgucacggggaagaccucccugccccggugcuggcuggugagcaacggcuccuaccucaacgagacccacuucagcgacgacaucgagcagcaggccgacaacaugaucaccgagcugcugcagaaggaguacaucgaccgccagggcaagacgccccucgggcugguggaccuguucgucuucuccaccagcuucuaccugaucuccaucuuccuccaccuggugaagaucccgacccaccggcacaucaccggcaagcccugccccaagccccaccgccugaaccacauggggaucugcagcugcggccucuacaaccacccgggggugcccgucaaguggaagcggugaggacuaguaauaaggaaacuguaugaaugucugugggcaggaagugaagagauccuucuguaaagguuuuuggaauuaugucugcugaauaauaaacuuuuuugaaauaauaaaucugguagaaaaaugagaucucaaaggcucuuuucagagccaccaaaaaaaaaaaaaaaaaaaaaaaaaaaaaaaaaaaaaaaaaaaaaaaaaaaaaaaaaaaaaaaaagaauu

SEQ ID NO: 23889 - RNA, 1778 nt, Artificial Sequence
  mRNA product Design b-4 (hSL-A64-N5) comprising derived and/or modified sequence from LASV(Lassa virus/H.sapiens-wt/NGA/2016/ISTH_0017;Clade II)__AVO03567__GPCmut2 (opt1)
aggagagucccgcagucggcguccagcggcucugcuuguucgugugugugucguugcaggccuuauucaagcuuaccaugggccagaucaucaccuucuuccaggaggugccccacgucaucgaggaggugaugaacaucgugcugaucgcccucagccugcuggccauccucaaggggaucuacaacgucgcgaccugcggccuguucgggcugguguccuuccuccugcugugcggccgcagcugcuccacgaccuacaaggggguguacgagcuccagacccuggagcuggacauggccagccucaacaugugcaugccgcuguccugcacgaagaacaacagccaccacuacaucauggucggcaacgagaccggccuggagcucacccugaccaacacguccaucaucaaccacaaguucugcaaccugagcgacgcccacaagaagaaccucuacgaccacgcccugauguccaucaucagcaccuuccaccuguccauccccaacuucaaccaguacgaggccaugagcugcgacuucaacgggggcaagaucuccgugcaguacaaccucagccacaccuacgcgaucgacgccgccaaccacugcgggaccaucgccaacggcgugcugcagacguucaugcggauggcguggggcggguccuacaucgcccuggacagcggcaagggguccugggacugcaucaugaccagcuaccaguaccucaucauccagaacaccaccugggaggaccacugccaguucucccgccccagccccaucggcuaccuggggcugcucagccagcggacgcgcgacaucuacaucucccggcgccgccggggcaccuucaccuggacccucagcgacuccgagggcaacgagacgcccgggggcuacugccugacccgguggaugcugaucgaggccgagcucaagugcuucgggaacaccgccgucgccaagugcaacgagaagcacgacgaggaguucugcgacaugcugcgccuguucgacuucugcaagcaggcgauccggcgccucaagacccccgcccagaugagcauccagcugaucaacaaggccgugaacgcccugaucaacgaccagcucaucaugaagaaccaccuccgggacaucaugggcauccccuacugcaacuacuccaaguacugguaccugaaccacacggugaccgggaagaccagccugccccgcugcuggcuggucuccaacggcagcuaccugaacgagacccacuucuccgacgacaucgagcagcaggccgacaacaugaucacggagcuccugcagaaggaguacauggaccggcagggcaagaccccgcuggggcucguggaccuguucguguucagcaccuccuucuaccugaucagcaucuuccugcaccucguccgcaucccgacccaccggcacgugaucggcaagcccugccccaagccccaccgccugaaccacauggggaucugcuccugcggccuguacaagcacccgggggugcccgucaaguggaagcggugaggacuaguaauaaggaaacuguaugaaugucugugggcaggaagugaagagauccuucuguaaagguuuuuggaauuaugucugcugaauaauaaacuuuuuugaaauaauaaaucugguagaaaaaugagaucucaaaggcucuuuucagagccaccaaaaaaaaaaaaaaaaaaaaaaaaaaaaaaaaaaaaaaaaaaaaaaaaaaaaaaaaaaaaaaaaagaauu

SEQ ID NO: 23890 - RNA, 1778 nt, Artificial Sequence
  mRNA product Design b-4 (hSL-A64-N5) comprising derived and/or modified sequence from LASV(Lassa virus/H.sapiens-wt/NGA/2018/ISTH_0959;Clade II)__AVV65099__GPCmut2 (opt1)
aggagagucccgcagucggcguccagcggcucugcuuguucgugugugugucguugcaggccuuauucaagcuuaccaugggccagaucaucaccuucuuccaggaggugccccacgucaucgaggaggugaugaacaucgugcugaucgcccucagccugcuggccauccucaaggggaucuacaacgucgugaccugcggccuguucgggcugguguccuuccuccugcugugcggccgcagcugcuccacgaccuacaagggggucuacgagcuccagacccuggagcuggacauggcgagccucaacaugugcaugccgcuguccugcacgaagaacaacagccaccacuacaucauggugggcaacgagaccggccuggagcucacccugaccaacacguccaucaucaaccacaaguucugcaaccugagcgacgcccacaagaagaaccucuacgaccacgcccugauguccaucaucagcaccuuccaccuguccauccccaacuucaaccaguacgaggccaugagcugcgacuucaacgggggcaagaucuccgugcaguacaaccucagccacgccuacgcgaucgacgccgccaaccacugcgggaccaucgccaacggcguccugcagaccuucaugcggauggcguggggcggguccuacaucgcccuggacagcggcaagggguccugggacugcaucaugacgagcuaccaguaccucaucauccagaacaccaccugggaggaccacugccaguucucccgccccagccccaucggcuaccuggggcugcucagccagcggacccgcgacaucuacaucucccggcgccgccggggcacguucaccuggacccucagcgacuccgagggcaacgagacccccgggggcuacugccugacgcgguggaugcugaucgaggccgagcucaagugcuucgggaacaccgccguggccaagugcaacgagaagcacgacgaggaguucugcgacaugcugcgccuguucgacuucugcaagcaggcgauccggcgccucaagacccccgcccagaugagcauccagcugaucaacaaggccgugaacgcccugaucaacgaccagcucaucaugaagaaccaccuccgggacaucaugggcaucccguacugcaacuacuccaaguacugguaccugaaccacaccgucacggggaagaccagccugccccgcugcuggcugguguccaacggcagcuaccugaacgagacccacuucuccgacgacaucgagcagcaggccgacaacaugaucaccgagcuccugcagaaggaguacaucgaccggcagggcaagacgccccuggggcucguggaccuguucgucuucagcaccuccuucuaccugaucagcaucuuccugcaccucgugaagaucccgacccaccgccacgugaucggcaagcccugccccaagccccaccggcugaaccacauggggaucugcuccugcggccuguacaagcacccggggguccccgugaaguggaagcgcugaggacuaguaauaaggaaacuguaugaaugucugugggcaggaagugaagagauccuucuguaaagguuuuuggaauuaugucugcugaauaauaaacuuuuuugaaauaauaaaucugguagaaaaaugagaucucaaaggcucuuuucagagccaccaaaaaaaaaaaaaaaaaaaaaaaaaaaaaaaaaaaaaaaaaaaaaaaaaaaaaaaaaaaaaaaaagaauu

SEQ ID NO: 23891 - RNA, 1778 nt, Artificial Sequence
  mRNA product Design b-4 (hSL-A64-N5) comprising derived and/or modified sequence from LASV(LASV003-NIG-2008;Clade II)__AIT17580__GPCmut2 (opt1)
aggagagucccgcagucggcguccagcggcucugcuuguucgugugugugucguugcaggccuuauucaagcuuaccaugggccagaucaucaccuucuuccaggaggugccccacgucaucgaggaggugaugaacaucgugcugaucgcccucagccugcuggccauccucaaggggaucuacaacgucgcgaccugcggccuguucgggcugguguccuuccuccugcugugcggccgcagcugcuccacgaccuacaaggggguguacgagcuccagacccuggagcuggacauggccagccucaacaugugcaugccgcuguccugcacgaagaacaacagccaccacuacaucauggucggcaacgagaccggccuggagcucacccugaccaacacguccaucaucaaccacaaguucugcaaccugagcgacgcccacaagaagaaccucuacgaccacgcccugauguccaucaucagcaccuuccaccuguccauccccaacuucaaccaguacgaggccaugagcugcgacuucaacgggggcaagaucuccgugcaguacaaccucagccacaccuacgcgguggacgccgccaaccacugcgggaccaucgccaacggcguccugcagacguucaugcggauggcguggggcggguccuacaucgcccuggacagcggcaagggguccugggacugcaucaugaccagcuaccaguaccucaucauccagaacaccaccugggaggaccacugccaguucucccgccccagccccaucggcuaccuggggcugcucagccagcggacgcgcgacaucuacaucucccggcgccgccggggcaccuucaccuggacccucagcgacuccgagagcaacgagacgccgggcggguacugccugacccgguggaugcugaucgaggccgagcucaagugcuucggcaacaccgccguggccaagugcaacgagaagcacgacgaggaguucugcgacaugcugcgccuguucgacuucugcaagcaggcgauccggcgccucaaggcccccgcccagauguccauccagcugaucaacaaggccgugaacgcccugaucaacgaccagcucaucaugaagaaccaccuccgggacaucauggggauccccuacugcaacuacagcaaguacugguaccugaaccacaccgucacgggccgcaccucccugccccggugcuggcuggugagcaacggguccuaccugaacgagacccacuucagcgacgacaucgagcagcaggcggacaacaugaucaccgagcuccugcagaaggaguacauggaccgccagggcaagacgccccugggccucguggaccuguucgucuucuccaccagcuucuaccugaucuccaucuuccugcaccucgugaagaucccgacccaccggcacgugaucgggaagcccugccccaagccccaccgccugaaccacaugggcaucugcagcugcgggcuguacaagcacccgggcguccccgugaaguggaagcggugaggacuaguaauaaggaaacuguaugaaugucugugggcaggaagugaagagauccuucuguaaagguuuuuggaauuaugucugcugaauaauaaacuuuuuugaaauaauaaaucugguagaaaaaugagaucucaaaggcucuuuucagagccaccaaaaaaaaaaaaaaaaaaaaaaaaaaaaaaaaaaaaaaaaaaaaaaaaaaaaaaaaaaaaaaaaagaauu

SEQ ID NO: 23892 - RNA, 1778 nt, Artificial Sequence
  mRNA product Design b-4 (hSL-A64-N5) comprising derived and/or modified sequence from LASV(LASV035-NIG-2009;Clade II)__AIT17588__GPCmut2 (opt1)
aggagagucccgcagucggcguccagcggcucugcuuguucgugugugugucguugcaggccuuauucaagcuuaccaugggccagaucaucaccuucuuccaggaggugccccacgucaucgaggaggugaugaacaucgugcugaucgcccucagccugcuggccauccucaaggggaucuacaacgucgcgaccugcggccuguucgggcugguguccuuccuccugcugugcggccgcagcugcuccacgaccuacaaggggguguacgagcuccagacccuggagcuggacauggccagccucaacaugugcaugccgcuguccugcacgaagaacaacagccaccacuacaucauggucggcaacgagaccggccuggagcucacccugaccaacacguccaucaucaaccacaaguucugcaaccugagcgacgcccacaagaagaaccucuacgaccacgcccugauguccaucaucagcaccuuccaccuguccauccccaacuucaaccaguacgaggccaugagcugcgacuucaacgggggcaagaucuccgugcaguacaaccucagccacgcguacgccguggacgccgccaaccacugcgggaccaucgcgaacggcguccugcagaccuucaugcggauggccuggggcggguccuacaucgcccuggacagcggcaagggguccugggacugcaucaugacgagcuaccaguaccucaucauccagaacaccaccugggaggaccacugccaguucucccgccccagccccaucggcuaccuggggcugcucagccagcggacccgcgacaucuacaucucccggcgccgccggggcacguucaccuggacccucagcgacuccgagggcaacgagacccccgggggcuacugccugacgcgguggaugcugaucgaggccgagcucaagugcuucgggaacaccgccguggcgaagugcaacgagaagcacgacgaggaguucugcgacaugcugcgccuguucgacuucugcaagcaggccauccggcgccucaaggcccccgcccagaugagcauccagcugaucaacaaggccgugaacgcgcugaucaacgaccagcucaucaugaagaaccaccuccgggacaucaugggcauccccuacugcaacuacuccaaguacugguaccugaaccacaccgucaccgggaagacgagccugccccgcugcuggcugguguccaacggcagcuaccugaacgagacccacuucuccgacgacaucgagcagcaggccgacaacaugaucaccgagcuccugcagaaggaguacaucgaccggcagggcaagaccccgcuggggcucguggaccuguucgucuucagcacguccuucuaccugaucagcaucuuccugcaccucgugaagaucccgacccaccgccacgugaucggcaagcccugccccaagccccaccggcugaaccacauggggaucugcuccugcggccuguacaagcacccggggguccccgugaaguggaagcgcugaggacuaguaauaaggaaacuguaugaaugucugugggcaggaagugaagagauccuucuguaaagguuuuuggaauuaugucugcugaauaauaaacuuuuuugaaauaauaaaucugguagaaaaaugagaucucaaaggcucuuuucagagccaccaaaaaaaaaaaaaaaaaaaaaaaaaaaaaaaaaaaaaaaaaaaaaaaaaaaaaaaaaaaaaaaaagaauu

SEQ ID NO: 23893 - RNA, 1778 nt, Artificial Sequence
  mRNA product Design b-4 (hSL-A64-N5) comprising derived and/or modified sequence from LASV(LASV1000-NIG-2009;Clade II)__AIT17782__GPCmut2 (opt1)
aggagagucccgcagucggcguccagcggcucugcuuguucgugugugugucguugcaggccuuauucaagcuuaccaugggccagaucaucaccuucuuccaggaggugccccacgucaucgaggaggugaugaacaucgugcugaucgcccucagccugcuggccauccucaaggggaucuacaacgucgcgaccugcggccuguucgggcugguguccuuccuccugcugugcggccgcagcugcuccacgaccuacaaggggguguacgagcuccagacccuggagcuggacauggccagccucaacaugugcaugccgcuguccugcacgaagaacaacagccaccacuacaucauggucggcaacgagaccggccuggagcucacccugaccaacacguccaucaucaaccacaaguucugcaaccugagcgacgcccacaagaagaaccucuacgaccacgcccugauguccaucaucagcaccuuccaccuguccauccccaacuucaaccaguacgaggccaugagcugcgacuucaacgggggcaagaucuccgugcaguacaaccucagccacaccuacgcgguggacgccgccaaccacugcgggaccaucgccaacggcguccugcagacguucaugcggauggcguggggcggguccuacaucgcccuggacagcggcaagggguccugggacugcaucaugaccagcuaccaguaccucaucauccagaacaccaccugggaggaccacugccaguucucccgccccagccccaucggcuaccuggggcugcucagccagcggacgcgcgacaucuacaucucccggcgccgccggggcaccuucaccuggacccucagcgacuccgagggcaacgagacgcccgggggcuacugccugacccgguggaugcugaucgaggccgagcucaagugcuucgggaacaccgccguggccaagugcaacgagaagcacgacgaggaguucugcgacaugcugcgccuguucgacuucugcaagcaggcgaucaagcggcucaagacccccgcccagaugagcauccagcugaucaacaaggccgugaacgcccugaucaacgaccagcucaucaugaagaaccaccuccgcgacaucaugggcauccccuacugcaacuacuccaaguacugguaccugaaccacacggucaccgggaagaccagccugccccggugcuggcugguguccaacggcagcuaccugaacgagacccacuucuccgacgacaucgagcagcaggccgacaacaugaucacggagcuccugcagaaggaguacaucgaccgccagggcaagaccccgcuggggcucguggaccuguucgucuucagcaccuccuucuaccugaucagcaucuuccugcaccucgugaagaucccgacccaccggcacguggucggcaagcccugccccaagccccaccgccugaaccacauggggaucugcuccugcggccuguacaagcacccgggggugcccgugaaguggaagcggugaggacuaguaauaaggaaacuguaugaaugucugugggcaggaagugaagagauccuucuguaaagguuuuuggaauuaugucugcugaauaauaaacuuuuuugaaauaauaaaucugguagaaaaaugagaucucaaaggcucuuuucagagccaccaaaaaaaaaaaaaaaaaaaaaaaaaaaaaaaaaaaaaaaaaaaaaaaaaaaaaaaaaaaaaaaaagaauu

SEQ ID NO: 23894 - RNA, 1778 nt, Artificial Sequence
  mRNA product Design b-4 (hSL-A64-N5) comprising derived and/or modified sequence from LASV(LASV221-NIG-2010;Clade II)__AIT17624__GPCmut2 (opt1)
aggagagucccgcagucggcguccagcggcucugcuuguucgugugugugucguugcaggccuuauucaagcuuaccaugggccagaucaucaccuucuuccaggaggugccccacgucaucgaggaggugaugaacaucgugcugaucgcccucagccugcuggccauccucaaggggaucuacaacgucgcgaccugcggccuguucgggcugguguccuuccuccugcugugcggccgcagcugcuccacgaccuacaaggggguguacgagcuccagacccuggagcuggacauggccagccucaacaugugcaugccgcuguccugcacgaagaacaacagccaccacuacaucauggucggcaacgagaccggccuggagcucacccugaccaacacguccaucaucaaccacaaguucugcaaccugagcgacgcccacaagaagaaccucuacgaccacgcccugauguccaucaucagcaccuuccaccuguccauccccaacuucaaccaguacgaggccaugagcugcgacuucaacgggggcaagaucuccgugcaguacaaccucagccacaccuacgcgaucgacgccgccaaccacugcgggaccaucgccaacggcgugcugcagacguucaugcggauggcguggggcggguccuacaucgcccuggacagcggcaagggguccugggacugcaucaugaccagcuaccaguaccucaucauccagaacaccaccugggaggaccacugccaguucucccgccccagccccaucggcuaccuggggcugcucagccagcggacgcgcgacaucuacaucucccggcgccgccggggcaccuucaccuggacccucagcgacuccgagggcaacgagacgcccgggggcuacugccugacccgguggaugcugaucgaggccgagcucaagugcuucgggaacaccgccgucgccaagugcaacgagaagcacgacgaggaguucugcgacaugcugcgccuguucgacuucugcaagcaggcgauccggcgccucaagacccccgcccagaugagcauccagcugaucaacaaggccgugaacgcccugaucaacgaccagcucaucaugaagaaccaccuccgggacaucaugggcauccccuacugcaacuacuccaaguacugguaccugaaccacacggugaccgggaagaccagccugccccgcugcuggcuggucuccaacggcagcuaccugaacgagacccacuucuccgacgacaucgagcagcaggccgacaacaugaucacggagaugcuccagaaggaguacauggaccggcagggcaagaccccgcuggggcugguggaccucuucguguucagcaccuccuucuaccugaucagcaucuuccugcaccuggucaagaucccgacccaccgccacgugaucggcaagcccugccccaagccccaccggcucaaccacauggggaucugcuccugcggccuguacaagcacccgggggugcccgucaaguggaagcgcugaggacuaguaauaaggaaacuguaugaaugucugugggcaggaagugaagagauccuucuguaaagguuuuuggaauuaugucugcugaauaauaaacuuuuuugaaauaauaaaucugguagaaaaaugagaucucaaaggcucuuuucagagccaccaaaaaaaaaaaaaaaaaaaaaaaaaaaaaaaaaaaaaaaaaaaaaaaaaaaaaaaaaaaaaaaaagaauu

SEQ ID NO: 23895 - RNA, 1778 nt, Artificial Sequence
  mRNA product Design b-4 (hSL-A64-N5) comprising derived and/or modified sequence from LASV(LASV237-NIG-2010;Clade II)__AIT17638__GPCmut2 (opt1)
aggagagucccgcagucggcguccagcggcucugcuuguucgugugugugucguugcaggccuuauucaagcuuaccaugggccagaucaucaccuucuuccaggaggugccccacgucaucgaggaggugaugaacaucgugcugaucgcccucagccugcuggccauccucaaggggaucuacaacgucgcgaccugcggccuguucgggcugguguccuuccuccugcugugcggccgcagcugcuccacgaccuacaaggggguguacgagcuccagacccuggagcuggacauggccagccucaacaugugcaugccgcuguccugcacgaagaacaacagccaccacuacaucauggucggcaacgagaccggccuggagcucacccugaccaacacguccaucaucaaccacaaguucugcaaccugagcgacgcccacaagaaggaccucuacgaccacgcccugauguccaucaucagcaccuuccaccuguccauccccaacuucaaccaguacgaggccaugagcugcgacuucaacgggggcaagaucuccgugcaguacaaccucagccacaccuacgcgguggacgccgccaaccacugcgggaccaucgccaacggcguccugcagacguucaugcggauggcguggggcggguccuacaucgcccuggacagcggcaagggguccugggacugcaucaugaccagcuaccaguaccucaucauccagaacaccaccugggaggaccacugccaguucucccgccccagccccaucggcuaccuggggcugcucagccagcggacgcgcgacaucuacaucucccggcgccgccggggcaccuucaccuggacccucagcgacuccgagggcaacgagacgcccgggggcuacugccugacccgguggaugcugaucgaggccgagcucaagugcuucgggaacaccgccguggccaagugcaacgagaagcacgacgaggaguucugcgacaugcugcgccuguucgacuucugcaagcaggcgauccggcgccucaagacccccgcccagaugagcauccagcugaucaacaaggccgugaacgcccugaucaacgaccagcucaucaugaagaaccaccuccgggacaucaugggcauccccuacugcaacuacuccaaguacugguaccugaaccacacggucaccgggaagaccagccugccccgcugcuggcugguguccaacggcagcuaccugaacgagacccacuucuccgacgacaucgagcagcaggccgacaacaugaucacggagcuccugcagaaggaguacauggaccggcagggcaagaccccgcuggggcucguggaccuguucgucuucagcaccuccuucuaccugaucagcaucuuccugcaccucaucaagaucccgacccaccgccacaucacgggcaagcccugccccaagccccaccggcugaaccacauggggaucugcuccugcggccuguacaagcacccgggggugcccgugaaguggaagcgcugaggacuaguaauaaggaaacuguaugaaugucugugggcaggaagugaagagauccuucuguaaagguuuuuggaauuaugucugcugaauaauaaacuuuuuugaaauaauaaaucugguagaaaaaugagaucucaaaggcucuuuucagagccaccaaaaaaaaaaaaaaaaaaaaaaaaaaaaaaaaaaaaaaaaaaaaaaaaaaaaaaaaaaaaaaaaagaauu

SEQ ID NO: 23896 - RNA, 1778 nt, Artificial Sequence
  mRNA product Design b-4 (hSL-A64-N5) comprising derived and/or modified sequence from LASV(LASV253-NIG-2011;Clade II)__AIT17670__GPCmut2 (opt1)
aggagagucccgcagucggcguccagcggcucugcuuguucgugugugugucguugcaggccuuauucaagcuuaccaugggccagaucaucaccuucuuccaggaggugccccacgucaucgaggaggugaugaacaucgugcugaucgcccucagccugcuggccauccucaaggggaucuacaacgucgcgaccugcggccuguucgggcugguguccuuccuccugcugugcggccgcagcugcuccacgaccuacaaggggguguacgagcuccagacccuggagcuggacauggccagccucaacaugugcaugccgcuguccugcacgaagaacaacagccaccacuacaucauggucggcaacgagaccggccuggagcucacccugaccaacacguccaucaucaaccacaaguucugcaaccugagcgacgcccacaagaagaaccucuacgaccacgcccugauguccaucaucagcaccuuccaccuguccauccccaacuucaaccaguacgaggccaugagcugcgacuucaacgggggcaagaucuccgugcaguacaaccucagccacaccuacgcgguggacgccgccaaccacugcgggaccaucgccaacggcguccugcagacguucaugcggauggcguggggcggguccuacaucgcccuggacagcggcaagggguccugggacugcaucaugaccagcuaccaguaccucaucauccagaacaccaccugggaggaccacugccaguucucccgccccagccccaucggcuaccuggggcugcucagccagcggacgcgcgacaucuacaucucccggcgccgccggggcaccuucaccuggacccucagcgacuccgagggcaacgagacgcccgggggcuacugccugacccgguggaugcugaucgaggccgagcucaagugcuucgggaacaccgccguggccaagugcaacgagaagcacgacgaggaguucugcgacaugcugcgccuguucgacuucugcaagcaggcgauccggcgccucaaggcccccgcccagaugagcauccagcugaucaacaaggccgugaacgcccugaucaacgaccagcucaucaugaagaaccaccuccgggacaucaugggcaucccguacugcaacuacuccaaguacugguaccugaaccacaccgucacggggcgcaccagccugccccggugcuggcugguguccaacggcagcuaccugaacgagacccacuucuccgacgacaucgagcagcaggcggacaacaugaucaccgagcuccugcagaaggaguacaucgaccgccagggcaagacgccccuggggcucguggaccuguucgucuucagcaccuccuucuaccugaucagcaucuuccugcaccucgugaagaucccgacccaccggcacaucaucggcaagcccugccccaagccccaccgccugaaccacauggggaucugcuccugcggccuguacaagcacccgggggugcccgucaaguggaagcggugaggacuaguaauaaggaaacuguaugaaugucugugggcaggaagugaagagauccuucuguaaagguuuuuggaauuaugucugcugaauaauaaacuuuuuugaaauaauaaaucugguagaaaaaugagaucucaaaggcucuuuucagagccaccaaaaaaaaaaaaaaaaaaaaaaaaaaaaaaaaaaaaaaaaaaaaaaaaaaaaaaaaaaaaaaaaagaauu

SEQ ID NO: 23897 - RNA, 1778 nt, Artificial Sequence
  mRNA product Design b-4 (hSL-A64-N5) comprising derived and/or modified sequence from LASV(LASV254-NIG-2011;Clade II)__AIT17674__GPCmut2 (opt1)
aggagagucccgcagucggcguccagcggcucugcuuguucgugugugugucguugcaggccuuauucaagcuuaccaugggccagaucaucaccuucuuccaggaggugccccacgucaucgaggaggugaugaacaucgugcugaucgcccucagccugcuggccauccucaaggggaucuacaacgucgcgaccugcggccuguucgggcugguguccuuccuccugcugugcggccgcagcugcuccacgaccuacaaggggguguacgagcuccagacccuggagcuggacaugaccaaccucaacaugugcaugccgcugagcugcaccaagaacaacucccaccacuacaucauggucggcaacgagaccggccuggagcucacccugacgaacaccagcaucaucaaccacaaguucugcaaccuguccgacgcccacaagaagaaccucuacaaccacgcccugaugagcaucaucuccaccuuccaccugagcauccccaacuucaaccaguacgaggccauguccugcgacuucaacgggggcaagaucagcgugcaguacaaccucucccacagcuacgccguggacgcggccaaccacugcgggaccaucgccaacggcguccugcagacguucaugcggauggccuggggcggguccuacaucgcgcuggacagcggcaaggggaacugggacugcaucaugaccuccuaccaguaccucaucauccagaacaccaccugggaggaccacugccaguucagccgccccucccccaucggcuaccuggggcugcucagccagcggacgcgcgacaucuacaucagccggcgccgccggggcaccuucaccuggacccucuccgacagcgagggcaacgagacgcccgggggcuacugccugacccgguggaugcugaucgaggccgagcucaagugcuucgggaacaccgccguggccaagugcaacgagaagcacgacgaggaguucugcgacaugcugcgccuguucgacuucugcaagcaggccauccggcgccucaagacccccgcgcaggccaacauccagcugaucaacaaggccgugaacgcccugaucaacgaccagcucaucaugaagaaccaccuccgggacaucaugggcauccccuacugcaacuacuccaaguacugguaccugaaccacacggucaccgggaagaccagccugccccgcugcuggcugguguccaacggcagcuaccugaacgagacccacuucuccgacgacaucgagcagcaggccgacaacaugaucacggagcuccugcagaaggaguacauggaccggcagggcaagaccccgcuggggcucguggaccuguucgucuucagcaccuccuucuaccugaucagcaucuuccugcaccucgugaagaucccgacccaccgccacgugaucggcaagcccugccccaagccccaccggcugaaccacauggggaucugcuccugcggccuguacaagcacccggggguccccgugaaguggaagcgcugaggacuaguaauaaggaaacuguaugaaugucugugggcaggaagugaagagauccuucuguaaagguuuuuggaauuaugucugcugaauaauaaacuuuuuugaaauaauaaaucugguagaaaaaugagaucucaaaggcucuuuucagagccaccaaaaaaaaaaaaaaaaaaaaaaaaaaaaaaaaaaaaaaaaaaaaaaaaaaaaaaaaaaaaaaaaagaauu

SEQ ID NO: 23898 - RNA, 1778 nt, Artificial Sequence
  mRNA product Design b-4 (hSL-A64-N5) comprising derived and/or modified sequence from LASV(Nig08-A19;Clade III)__ADU56618__GPCmut2 (opt1)
aggagagucccgcagucggcguccagcggcucugcuuguucgugugugugucguugcaggccuuauucaagcuuaccaugggccagaucgugaccuucuuccaggaggucccccacgugaucgaggaggugaugaacaucguccugaucgcccucagcauccuggccauccugaaggggcucuacaacaucgcgaccugcggccugaucgggcuggugacguuccuccugcuguccggccgcagcugcuccaugaccuacaaggggguguacgagcuccagacccuggagcugaacaugaacacccucaacaugugcaugccgcugagcugcaccaagaacaacucccaccacuacaucauggucggcaacgagaccggccuggagcucacccugacgaacaccagccugcuccaccacaaguucugcaaccuguccgacgcccacaagaagaaccuguacgaccacacccucaugagcaucaucuccaccuuccaccugagcauccccaacuucaaccaguacgaggccauguccugcgacuucaacgggggcaagaucacggugcaguacaaccugagccacuccuacgccaucgacgccgcgaaccacugcgggaccguggccaacggcguccuccagaccuucaugcggauggccuggggcgggagcuacaucgcccuggacuccggccgcgggaagugggacugcaucaugaccagcuaccaguaccugaucauccagaacacgaccugggaggaccacugccaguucucccggcccagccccaucggcuaccucgggcugcugucccagcgcacccgggacaucuacaucagccgccggcgccggggcaccuucacguggacccugagcgacuccgagggcaacgagacccccgggggcuacugccucacccgcuggaugcugaucgaggcggagcugaagugcuucgggaacacggccguggccaagugcaacgagaagcacgacgaggaguucugcgacaugcuccggcuguucgacuucugcaagcaggccauccgccggcugaaggcccccgcgcagaugagcauccagcucaucaacaaggccgugaacgcccugaucaacgaccagcugaucaugaagaaccaccuccgcgacaucaugggcauccccuacugcaacuacuccaaguacugguaccugaaccacaccagcaccgggcggaccucccugccccgcugcuggcucgucagcaacggcuccuaccugaacgagacgcacuucagcgacgacaucgagcagcaggccgacaacaugaucaccgagaugcugcagaaggaguaccucgaccggcagggcaagaccccgcuggggcugguggaccuguucguguucuccaccagcuucuaccucaucuccaucuuccugcaccuggucaagaucccgacgcaccgccacaucgugggcaagcccugccccaagccccaccggcucaaccacauggggaucugcagcugcggccuguacaagcagccgggggugcccguccgcuggaagcggugaggacuaguaauaaggaaacuguaugaaugucugugggcaggaagugaagagauccuucuguaaagguuuuuggaauuaugucugcugaauaauaaacuuuuuugaaauaauaaaucugguagaaaaaugagaucucaaaggcucuuuucagagccaccaaaaaaaaaaaaaaaaaaaaaaaaaaaaaaaaaaaaaaaaaaaaaaaaaaaaaaaaaaaaaaaaagaauu

SEQ ID NO: 23899 - RNA, 1781 nt, Artificial Sequence
  mRNA product Design b-4 (hSL-A64-N5) comprising derived and/or modified sequence from LASV(G1180-SLE-2010;Clade IV)__AIT17168__GPCmut2 (opt1)
aggagagucccgcagucggcguccagcggcucugcuuguucgugugugugucguugcaggccuuauucaagcuuaccaugggccagaucgugaccuucuuccaggaggucccccacgugaucgaggaggugaugaacaucguccugaucgcccucagcauccuggccgugcugaaggggcucuacaacuucgcgaccugcggccugguggggcugcucaccuuccugcugcucugcggccgcuccugcaccgccagccgguacaagggggucuacgagcugcagacccuggagcucaacauggagacccugaacaugugcaugccgcuguccugcaccaagaacaacagccaccacuacaucauggugggcaacgagaccggccucgagcugacccugacgaacaccuccaucaucaaccacaaguucugcaaccucagcgacgcccacaagaagaaccuguacgaccacgcccugauguccaucaucagcaccuuccaccucuccauccccaacuucaaccaguacgaggccaugagcugcgacuucaacgggggcaagaucuccgugcaguacaaccugagccacuccuacgcgggggacgccgccaaccacugcggcaccgucgccaacggggugcugcagacguucaugcgcauggcguggggcggcagcuacaucgcccucgacuccgggcacggcagcugggacugcaucaugaccuccuaccaguaccugaucauccagaacaccaccugggaggaccacugccaguucagccggcccucccccaucggguaccugggccuccugagccagcgcacgcgggacaucuacaucagccgccggcgccggggcaccuucaccuggacccuguccgacagcgaggggaaggacacgccgggcggguacugccugacccgcuggaugcucaucgaggccgagcugaagugcuucggcaacaccgccguggccaagugcaacgagaagcacgacgaggaguucugcgacaugcugcggcuguucgacuucugcaagcaggcgauccagcgccugaaggcccccgcccagauguccauccagcugaucaacaaggccgucaacgcccucaucaacgaccagcugaucaugaagaaccaccuccgggacaucauggggauccccuacugcaacuacagcaaguacugguaccucaaccacaccacgaccggcaagaccucccugcccaagugcuggcuggugagcaacggcuccuaccucaacgagacccacuucagcgacgacaucgagcagcaggcggacaacaugaucacggagaugcugcagaaggaguacauggagcgccaggggaagacgccccugggccucguggaccuguucgucuucuccaccagcuucuaccugaucuccaucuuccugcaccucgugaagaucccgacccaccggcacaucgugggcaagagcugccccaagccccaccgccugaaccacauggggaucugcuccugcgggcuguacaagcagcccggcgucccggugaaguggaagcggugaggacuaguaauaaggaaacuguaugaaugucugugggcaggaagugaagagauccuucuguaaagguuuuuggaauuaugucugcugaauaauaaacuuuuuugaaauaauaaaucugguagaaaaaugagaucucaaaggcucuuuucagagccaccaaaaaaaaaaaaaaaaaaaaaaaaaaaaaaaaaaaaaaaaaaaaaaaaaaaaaaaaaaaaaaaaagaauu

SEQ ID NO: 23900 - RNA, 1781 nt, Artificial Sequence
  mRNA product Design b-4 (hSL-A64-N5) comprising derived and/or modified sequence from LASV(G1442-SLE-2011;Clade IV)__AIT17180__GPCmut2 (opt1)
aggagagucccgcagucggcguccagcggcucugcuuguucgugugugugucguugcaggccuuauucaagcuuaccaugggccagaucgugaccuucuuccaggaggucccccacgugaucgaggaggugaugaacaucguccugaucgcccucagcauccuggccgugcugaaggggcucuacaacguggcgaccugcggccugaucgggcuggucacguuccuccugcugugcggccgcuccugcaccaccacccucuacaaggggguguacgagcugcagacgcuggagcucaacauggagacccugaacaugugcaugccgcugagcugcaccaagaacaacucccaccacuacauccgggugggcaacgagacgggccucgagcugacccugaccaacaccagcaucaucaaccacaaguucugcaaccucuccgacgcccacaagaagaaccuguacgaccacgcccugaugagcaucaucuccacguuccaccucagcauccccaacuucaaccaguacgaggccauguccugcgacuucaacgggggcaagaucagcguccaguacaaccugucccacagcuacgccggggacgcggccaaccacugcggcaccguggccaacggggugcugcagaccuucaugcgcauggccuggggcggcuccuacaucgcgcucgacagcgggcggggcaacugggacugcaucaugaccuccuaccaguaccugaucauccagaacacgaccugggacgaccacugccaguucagccgccccucccccaucggguaccugggccuccugagccagcggacccgcgacgucuacaucucccggcgccgccggggcaccuucacguggacccugagcgacagcgaggggaaggacaccccgggcggguacugccugacccgguggaugcucaucgaggccgagcugaagugcuucggcaacacggccguggccaagugcaacgagaagcacgacgaggaguucugcgacaugcugcgccucuucgacuucugcaagcaggccauccagcggcugaaggcgcccgcccagauguccauccagcugaucaacaaggccgugaacgcccucaucaacgaccagcugaucaugaagaaccaccuccgcgacaucauggggauccccuacugcaacuacagcaaguacugguaccugaacaacaccgccaccggcaagaccucccugcccaagugcuggcugaucagcaacggcuccuaccucaacgagacgcacuucagcgacgacaucgagcaggaggcggacaacaugaucaccgagaugcugcagaaggaguacauggagcggcaggggaagacgccccugggccucgucgaccuguucguguucuccaccagcuucuaccugaucuccaucuuccugcaccucgugaagaucccgacccaccgccacaucgucggcaagagcugccccaagccccaccggcugaaccacauggggaucugcuccugcgggcuguacaagcagcccggcgugccggugcgcuggaagcggugaggacuaguaauaaggaaacuguaugaaugucugugggcaggaagugaagagauccuucuguaaagguuuuuggaauuaugucugcugaauaauaaacuuuuuugaaauaauaaaucugguagaaaaaugagaucucaaaggcucuuuucagagccaccaaaaaaaaaaaaaaaaaaaaaaaaaaaaaaaaaaaaaaaaaaaaaaaaaaaaaaaaaaaaaaaaagaauu

SEQ ID NO: 23901 - RNA, 1781 nt, Artificial Sequence
  mRNA product Design b-4 (hSL-A64-N5) comprising derived and/or modified sequence from LASV(G3010-SLE-2013;Clade IV)__AIT17344__GPCmut2 (opt1)
aggagagucccgcagucggcguccagcggcucugcuuguucgugugugugucguugcaggccuuauucaagcuuaccaugggccagaucgugaccuucuuccaggaggucccccacgugaucgaggaggugaugaacaucguccugaucgcccucagcauccuggccgugcugaaggggcucuacaacuucgcgaccugcggccugguggggcuggucacguuccuccugcugugcggccgcuccugcaccaccagccucuacaaggggguguacgagcugcagacccuggagcucaacauggagacgcugaacaugugcaugccgcuguccugcaccaagaacaacagccaccacuacaucauggugggcaacgagaccggccucgagcugacgcugaccaacaccuccaucaucaaccacaaguucugcaaccucagcgacgcccacaagaagaaccuguacaaccacgcccugauguccaucaucagcaccuuccaccucuccauccccaacuucaaccaguacgaggccaugagcugcgacuucaacgggggcaagaucuccguccaguacaaccugagccacuccuacgccggggacgcggccagccacugcggcacgguggccaacggggugcugcagaccuucaugcggauggccuggggcggcuccuacaucgcgcucgacagcggguacggcaagugggacugcaucaugaccuccuaccaguaccugaucauccagaacaccacgugggaggaccacugccaguucagccgccccucccccaucggguaccugggccuccugagccagcggacccgcgacaucuacaucagccggcgccgccggggcaccuucaccuggacgcuguccgacagcgaggggaaggacaccccgggcggguacugccugacccgguggaugcucaucgaggccgagcugaagugcuucggcaacaccgccgucgccaagugcaacgagaagcacgacgaggaguucugcgacaugcugcgccucuucgacuucugcaagcaggccauccagcggcugaagacgcccgcgcagauguccauccagcugaucaacaaggccgugaacgcccucaucaacgaccagcugaucaugaagaaccaccuccgcgacaucauggggauccccuacugcaacuacagcaaguacugguaccugaaccacaccaccaccggcaagacgucccugcccaagugcuggcuggugagcaacggcuccuaccucaacgagacccacuucagcgacgacaucgagcagcaggccgacaacaugaucaccgagaugcugcagaaggaguacauggagcggcaggggaagacgccccugggccucgucgaccuguucguguucuccaccagcuucuaccugaucuccaucuuccugcaccucgugaagaucccgacccaccgccacaucgucggcaagagcugccccaagccccaccggcugaaccacauggggaucugcuccugcgggcuguacaagcagcccggcgugccggugcgcuggaagcggugaggacuaguaauaaggaaacuguaugaaugucugugggcaggaagugaagagauccuucuguaaagguuuuuggaauuaugucugcugaauaauaaacuuuuuugaaauaauaaaucugguagaaaaaugagaucucaaaggcucuuuucagagccaccaaaaaaaaaaaaaaaaaaaaaaaaaaaaaaaaaaaaaaaaaaaaaaaaaaaaaaaaaaaaaaaaagaauu

SEQ ID NO: 23902 - RNA, 1781 nt, Artificial Sequence
  mRNA product Design b-4 (hSL-A64-N5) comprising derived and/or modified sequence from LASV(G502-SLE-2009;Clade IV)__AIT17126__GPCmut2 (opt1)
aggagagucccgcagucggcguccagcggcucugcuuguucgugugugugucguugcaggccuuauucaagcuuaccaugggccagaucgugaccuucuuccaggaggucccccacgugaucgaggaggugaugaacaucguccugaucgcccucagcauccuggccgugcugaaggggcucuacaacuucgcgaccugcggccugguggggcugcucacguuccugcugcucugcggccgcuccugcaccaccgggcuguacaagggcgucuacgagcugcagacccucgagcugaacauggagacgcugaacaugugcaugccgcucagcugcaccaagaacaacucccaccacuacaucauggugggcaacgagaccgggcuggagcugacgcucaccaacaccagcaucaucaaccacaaguucugcaaccuguccgacgcccacaagaagaaccuguacgaccacgcccucaugagcaucaucuccaccuuccaccugagcauccccaacuucaaccaguacgaggccauguccugcgacuucaacggcgggaagaucagcgugcaguacaaccugucccacagcuacgccggcgacgcggccgaccacugcgggacggucgccaacggcgugcuccagaccuucaugcggauggccuggggcggguccuacaucgcgcuggacagcggccgcgggcggugggacugcaucaugaccuccuaccaguaccugaucauccagaacaccacgugggaggaccacugccaguucagccgccccucccccaucggcuaccucggccugcugagccagcggacccgcgacaucuacaucucccggcgccgccgggggaccuucaccuggacgcugagcgacagcgagggcaaggacacccccgggggcuacugccucacccgguggaugcugaucgaggccgagcugaagugcuucgggaacaccgccguggccaagugcaacgagaagcacgacgaggaguucugcgacaugcuccgccuguucgacuucugcaagcaggccauccagcggcugaaggcgcccgcccagauguccauccagcucaucaacaaggccgucaacgcccugaucaacgaccagcuggugaugaagaaccaccuccgcgacaucaugggcauccccuacugcaacuacagccgguacugguaccugaaccacacgaccaccggccgcaccucccugcccaagugcuggcucgugagcaacggguccuaccugaacgagacgcacuucagcgacgacaucgagcagcaggccgacaacaugaucaccgagaugcugcagaaggaguacauggagcggcagggcaagaccccgcucgggcuggucgaccuguucguguucuccaccagcuucuaccugaucuccaucuuccuccaccuggugaagaucccgacgcaccgccacaucgucggcaagagcugccccaagccccaccggcugaaccacauggggaucugcuccugcggccucuacaagcagcccggcgugccggugaaguggaagcgcugaggacuaguaauaaggaaacuguaugaaugucugugggcaggaagugaagagauccuucuguaaagguuuuuggaauuaugucugcugaauaauaaacuuuuuugaaauaauaaaucugguagaaaaaugagaucucaaaggcucuuuucagagccaccaaaaaaaaaaaaaaaaaaaaaaaaaaaaaaaaaaaaaaaaaaaaaaaaaaaaaaaaaaaaaaaaagaauu

SEQ ID NO: 23903 - RNA, 1781 nt, Artificial Sequence
  mRNA product Design b-4 (hSL-A64-N5) comprising derived and/or modified sequence from LASV(G733-SLE-2010;Clade IV)__AIT17154__GPCmut2 (opt1)
aggagagucccgcagucggcguccagcggcucugcuuguucgugugugugucguugcaggccuuauucaagcuuaccaugggccagaucgugaccuucuuccaggaggucccccacgugaucgaggaggugaugaacaucguccugaucgcccucagcauccuggccgugcugaaggggcucuacaacuucgcgaccugcggcaucguggggcuggucuccuuccugcuccugugcggccgcagcugcacgaccucccuguacaaggggguguacgagcuccagacccuggagcugaacauggagacccucaacaugugcaugccgcugagcugcaccaagaacaacucccaccacuacaucauggugggcaacgagaccggccuggagcucacccugacgaacaccagcaucaucaaccacaaguucugcaaccuguccgacgcccacaagaagaaccucuacgaccacgcccugaugagcaucaucuccaccuuccaccugagcauccccaacuucaaccaguacgaggccauguccugcgacuucaacgggggcaagaucagcguccaguacaaccucucccacagcuacgccggggacgcggccaaccacugcggcaccaucgccaacggggugcugcagacguucaugcggauggccuggggcggcuccuacaucgcgcuggacagcgggcgcgaccggugggacugcaucaugaccuccuaccaguaccucaucauccagaacaccaccugggaggaccacugccaguucagccgccccucccccaucggcuaccuggggcugcucagccagcggacgcgcgacaucuacaucagccggcgccgccggggcaccuucaccuggacccucuccgacagcgagggcaaggacacgcccgggggcuacugccugacccgguggaugcugaucgaggccgagcucaagugcuucgggaacaccgccguggccaagugcaacgagaagcacgacgaggaguucugcgacaugcugcgccuguucgacuucugcaagcaggccauccagcggcucaaggcgcccgcccagauguccauccagcugaucaacaaggccgucaacgcccugaucaacgaccagcucaucaugaagaaccaccuccgcgacaucaugggcauccccuacugcaacuacagcaaguacugguaccugaaccacaccacgaccgggaagaccucccugcccaagugcuggcuggugagcaacggcuccuaccugaacgagacccacuucagcgacgacaucgagcagcaggccgacaacaugaucacggagaugcuccagaaggaguacauggagcggcagggcaagaccccgcuggggcugguggaccucuucgucuucuccaccagcuucuaccugaucuccaucuuccugcaccuggugaagaucccgacccaccgccacguggucggcaagagcugccccaagccccaccggcucaaccacauggggaucugcuccugcggccuguacgggcagcccggcgugccggugaaguggaagcgcugaggacuaguaauaaggaaacuguaugaaugucugugggcaggaagugaagagauccuucuguaaagguuuuuggaauuaugucugcugaauaauaaacuuuuuugaaauaauaaaucugguagaaaaaugagaucucaaaggcucuuuucagagccaccaaaaaaaaaaaaaaaaaaaaaaaaaaaaaaaaaaaaaaaaaaaaaaaaaaaaaaaaaaaaaaaaagaauu

SEQ ID NO: 23904 - RNA, 1781 nt, Artificial Sequence
  mRNA product Design b-4 (hSL-A64-N5) comprising derived and/or modified sequence from MOPV/LASV reassortant(IGS-1;Clade IV)__AFY05576__GPCmut2 (opt1)
aggagagucccgcagucggcguccagcggcucugcuuguucgugugugugucguugcaggccuuauucaagcuuaccaugggccagaucgugaccuucuuccaggaggucccccacgugaucgaggaggugaugaacaucguccugaucgcccucagcgugcuggccgugcugaaggggcucuacaacuucgcgaccugcggccuggucgggcuggugacguuccuccugcugugcggccgcuccugcaccaccagccucuacaaggggguguacgagcugcagacccuggagcucaacauggagacgcugaacaugugcaugccgcuguccugcaccaagaacaacagccaccacuacaucauggucggcaacgagaccggccucgagcugacgcugaccaacaccuccaucaucaaccacaaguucugcaaccucagcgacgcccacaagaagaaccuguacgaccacgcccugauguccaucaucagcaccuuccaccucuccauccccaacuucaaccaguacgaggccaugagcugcgacuucaacgggggcaagaucuccgugcaguacaaccugagccacuccuacgccggggacgcggccaaccacugcggcacgguggccaacgggguccugcagaccuucaugcggauggccuggggcggcagcuacaucgcgcucgacuccgggcgcggcaacugggacugcaucaugaccagcuaccaguaccugaucauccagaacaccacgugggaggaccacugccaguucucccggcccagccccaucggguaccugggccuccugucccagcgcacccgggacaucuacaucagccgccggcgccggggcaccuucaccuggacgcugagcgacuccgagggggaggacaccccgggcggguacugccugacccgcuggaugcucaucgaggccgagcugaagugcuucggcaacaccgccguggccaagugcaacgagaagcacgacgaggaguucugcgacaugcugcggcuguucgacuucugcaagcaggccauccagcgccugaaggcgcccgcccagaugagcauccagcugaucaacaaggccgugaacgcccucaucaacgaccagcugaucaugaagaaccaccuccgggacaucauggggauccccuacugcaacuacuccaaguacugguaccucaaccacacgaccaccggccgcaccagccugcccaagugcuggcuggucuccaacggcagcuaccucaacgagacgcacuucuccgacgacaucgagcagcaggccgacaacaugaucaccgagaugcugcagaaggaguacauggagcggcaggggaagacgccccugggccucguggaccuguucguguucagcaccuccuucuaccugaucagcaucuuccugcaccucgucaagaucccgacccaccgccacaucguggggaaguccugccccaagccccaccggcugaaccacaugggcaucugcagcugcgggcuguacaagcagcccggcgugccggucaaguggaagcgcugaggacuaguaauaaggaaacuguaugaaugucugugggcaggaagugaagagauccuucuguaaagguuuuuggaauuaugucugcugaauaauaaacuuuuuugaaauaauaaaucugguagaaaaaugagaucucaaaggcucuuuucagagccaccaaaaaaaaaaaaaaaaaaaaaaaaaaaaaaaaaaaaaaaaaaaaaaaaaaaaaaaaaaaaaaaaagaauu

SEQ ID NO: 23905 - RNA, 1781 nt, Artificial Sequence
  mRNA product Design b-4 (hSL-A64-N5) comprising derived and/or modified sequence from LASV(LM765-SLE-2012;Clade IV)__AIT17814__GPCmut2 (opt1)
aggagagucccgcagucggcguccagcggcucugcuuguucgugugugugucguugcaggccuuauucaagcuuaccaugggccagaucgugaccuucuuccaggaggucccccacgugaucgaggaggugaugaacaucguccugaucgcccucagcauccuggccgugcugaaggggcucuacaacuucgcgaccugcggccugguggggcuggucacguuccuccugcugugcggccgcuccugcaccaccagccucuacaaggggguguacgagcugcagacccuggagcucaacauggagacgcugaacaugugcaugccgcuguccugcaccaagaacaacagccaccacuacaucauggugggcaacgagaccggccucgagcugacgcugaccaacaccuccaucaucgaccacaaguucugcaaccucagcgacgcccaccggaagaaccuguacgaccacgcccugauguccaucaucagcaccuuccaccucuccauccccaacuucaaccaguacgaggccaugagcugcgacuucaacgggggcaagaucuccguccaguacaaccugagccacuccuacgccaaggacgcggccgaccacugcgggacgguggccaacggcgugcugcagaccuucaugcgcauggccuggggcgggagcuacaucgcgcucgacuccggccgggggcgcugggacugcaucaugaccagcuaccaguaccugaucauccagaacaccacgugggaggaccacugccaguucucccggcccagccccaucggcuaccuggggcuccugucccagcgcacccgggacaucuacaucagccgccggcgccggggcaccuucaccuggacgcugagcgacuccgagggcaaggacacccccgggggcuacugccugacccgcuggaugcucaucgaggccgagcugaagugcuucgggaacaccgccgucgccaagugcaacgagaagcacgacgaggaguucugcgacaugcugcggcuguucgacuucugcaagcaggccauccagcgccugaaggcgcccgcccagaugagcauccagcugaucaacaaggccgugaacgcccucaucaacgaccagcugaucaugaagaaccaccuccgggacaucaugggcauccccuacugcaacuacuccaaguacugguaccucaaccacacgaccaccgggaagaccagccugcccaagugcuggcugguguccaacggcagcuaccucaacgagacgcacuucuccgacgacaucgagcagcaggccgacaacaugaucaccgagaugcugcagaaggaguacauggagcgccagggcaagaccccgcuggggcucgucgaccuguucguguucagcaccuccuucuaccugaucagcaucuuccugcaccucgugaagaucccgacgcaccggcacaucgucggcaagcccugccccaagccccaccgccugaaccacauggggaucugcuccugcggccuguacaagcagccgggggugcccgugaaguggaagcggugaggacuaguaauaaggaaacuguaugaaugucugugggcaggaagugaagagauccuucuguaaagguuuuuggaauuaugucugcugaauaauaaacuuuuuugaaauaauaaaucugguagaaaaaugagaucucaaaggcucuuuucagagccaccaaaaaaaaaaaaaaaaaaaaaaaaaaaaaaaaaaaaaaaaaaaaaaaaaaaaaaaaaaaaaaaaagaauu

SEQ ID NO: 23906 - RNA, 1781 nt, Artificial Sequence
  mRNA product Design b-4 (hSL-A64-N5) comprising derived and/or modified sequence from LASV(LM776-SLE-2012;Clade IV)__AIT17824__GPCmut2 (opt1)
aggagagucccgcagucggcguccagcggcucugcuuguucgugugugugucguugcaggccuuauucaagcuuaccaugggccagaucgugaccuucuuccaggaggucccccacgugaucgaggaggugaugaacaucguccugaucgcccucagcauccuggccgugcugaaggggcucuacaacuucgcgaccugcggccugguggggcuggucacguuccuccugcugugcggccgcuccugcaccaccagcguguacaaggggguguacgagcuccagacccuggagcugaacauggagacgcucaacaugugcaugccgcuguccugcaccaagaacaacagccaccacuacaucauggucggcaacgagaccggccuggagcucacgcugaccaacaccuccaucaucaaccacaaguucugcaaccugagcgacgcccacaagaagaaccucuacgaccacgcccugauguccaucaucagcaccuuccaccuguccauccccaacuucaaccaguacgaggccaugagcugcgacuucaacgggggcaagaucuccgugcaguacaaccucagccacuccuacgccggggacgcggccaaccacugcggcacgguggccaacgggguccugcagaccuucaugcggauggccuggggcggcagcuacaucgcgcuggacuccgggcacggcaagugggacugcaucaugaccagcuaccaguaccucaucauccagaacaccacgugggaggaccacugccaguucucccgccccagccccaucggguaccugggccugcucucccagcggacccgcgacaucuacaucagccggcgccgccggggcaccuucaccuggacgcucagcgacuccgaggggaaggacaccccgggcggguacugccugacccgguggaugcugaucgaggccgagcucaagugcuucggcaacaccgccguggccaagugcaacgagaagcacgacgaggaguucugcgacaugcugcgccuguucgacuucugcaagcaggccauccagcggcucaaggcgcccgcccagaugagcauccagcugaucaacaaggccgugaacgcccugaucaacgaccagcucaucaugaagaaccaccuccgcgacaucauggggauccccuacugcaacuacuccaaguacugguaccugaaccacacgaccaccggcaagaccagccugcccaagugcuggcuggucuccaacggcagcuaccugaacgagacgcacuucuccgacgacaucgagcagcaggccgacaacaugaucaccgagaugcuccagaaggaguacauggagcggcaggggaagacgccccugggccugguggaccucuucguguucagcaccuccuucuaccugaucagcaucuuccugcaccuggucaagaucccgacccaccgccacaucguggggaaguccugccccaagccccaccggcucaaccacaugggcaucugcagcugcgggcuguacaagcagcccggcgugccgguccgcuggaagcggugaggacuaguaauaaggaaacuguaugaaugucugugggcaggaagugaagagauccuucuguaaagguuuuuggaauuaugucugcugaauaauaaacuuuuuugaaauaauaaaucugguagaaaaaugagaucucaaaggcucuuuucagagccaccaaaaaaaaaaaaaaaaaaaaaaaaaaaaaaaaaaaaaaaaaaaaaaaaaaaaaaaaaaaaaaaaagaauu

SEQ ID NO: 23907 - RNA, 1781 nt, Artificial Sequence
  mRNA product Design b-4 (hSL-A64-N5) comprising derived and/or modified sequence from LASV(Mad39;Clade IV)__ANH09722__GPCmut2 (opt1)
aggagagucccgcagucggcguccagcggcucugcuuguucgugugugugucguugcaggccuuauucaagcuuaccaugggccagaucgugaccuucuuccaggaggucccccacgugaucgaggaggugaugaacaucguccugaucgcccucagcauccuggccgugcugaaggggcucuacaacguggcgaccugcggccugaucgggcuggucacguuccuccugcugugcggccgcuccugcaccaccacccucuacaaggggguguacgagcugcaggcccuggagcucaacauggagacgcugaacaugugcaugccgcugagcugcaccaagaacaacucccaccacuacauccgggugggcaacgagaccggccucgagcugacgcugaccaacaccagccucaucaaccacaaguucugcaaccuguccgacgcccacaagaagaaccuguacgaccacgcccucaugagcaucaucuccaccuuccaccugagcauccccaacuucaaccaguacgaggccauguccugcgacuucaacgacgggaagaucagcguccaguacaaccugucccacacguacgcgggcgacaccgccaaccacugcgggaccguggccaacggcgugcuccagaccuucaugcgcauggccuggggcgggagcuacaucgcgcuggacuccggccgcgggggcugggacugcaucaugacgagcuaccaguaccugaucauccagaacaccaccugggaggaccacugccaguucucccggcccagccccaucggguaccucggccugcugucccagcggacccgcgacaucuacaucagccggcgccgccggggcacguucaccuggacccuguccgacagcgaggggaaggacaccccgggcggguacugccucacgcgguggaugcugaucgaggccgagcugaagugcuucggcaacaccgccgucgccaagugcaacgagaagcacgacgaggaguucugcgacaugcuccgccuguucgacuucugcaagcaggccauccagcggcugaaggcgcccgcccagaugagcauccagcucaucaacaaggccgugaacgcccugaucaacgaccagcugaucaugaagaaccaccuccgcgacaucauggggauccccuacugcaacuacuccaaguacugguaccugaaccacaccgugaccggcaagacgagccugcccaagugcuggcucgucuccaacggcagcuaccugaacgagacccacuucuccgacgacaucgagcagcaggccgacaacaugaucaccgagaugcugcagaaggaguacauggagcggcaggggaagacgccccucggccugguggaccuguucguguucagcaccuccuucuaccugaucagcaucuuccuccaccuggucaagaucccgacccaccgccacgugguggggaagcccugccccaagccccaccggcugaaccacaugggcaucugcuccugcggguucuacaagcagccgggcguccccgugcgcuggaagcggugaggacuaguaauaaggaaacuguaugaaugucugugggcaggaagugaagagauccuucuguaaagguuuuuggaauuaugucugcugaauaauaaacuuuuuugaaauaauaaaucugguagaaaaaugagaucucaaaggcucuuuucagagccaccaaaaaaaaaaaaaaaaaaaaaaaaaaaaaaaaaaaaaaaaaaaaaaaaaaaaaaaaaaaaaaaaagaauu

SEQ ID NO: 23908 - RNA, 1781 nt, Artificial Sequence
  mRNA product Design b-4 (hSL-A64-N5) comprising derived and/or modified sequence from LASV(Z0947-SLE-2011;Clade IV)__AIT17840__GPCmut2 (opt1)
aggagagucccgcagucggcguccagcggcucugcuuguucgugugugugucguugcaggccuuauucaagcuuaccaugggccagaucgugaccuucuuccaggaggucccccacgugaucgaggaggugaugaacaucguccugaucgcccucagcauccuggccgugcugaaggggcucuacaacuucgcgaccugcggccugguggggcuggucacguuccuccugcugugcggccgcuccugcaccaucagccucuacaaggggguguacgagcugcagacccuggagcucaacauggagacccugaacaugugcaugccgcuguccugcaccaagaacaacagccaccacuacaucauggugggcaacgagaccggccucgagcugacccugacgaacaccuccaucaucaaccacaaguucugcaaccucagcgacgcccacaagaagaaccuguacgaccacgcccugauguccaucaucagcaccuuccaccucuccauccccaacuucaaccaguacgaggccaugagcugcgacuucaacgggggcaagaucuccguccaguacaaccugagccacuccuacgccggggacgcggccaaccacugcggcaccguggccaacggggugcugcagacguucaugcggauggccuggggcggcagcuacaucgcgcucgacuccgggcgcgaccggugggacugcaucaugaccagcuaccaguaccugaucauccagaacaccaccugggaggaccacugccaguucucccgccccagccccaucggcuaccuggggcuccugucccagcggacgcgcgacaucuacaucagccggcgccgccggggcaccuucaccuggacccugagcgacuccgagggcaaggacacgcccgggggcuacugccugacccgguggaugcucaucgaggccgagcugaagugcuucgggaacaccgccgucgccaagugcaacgagaagcacgacgaggaguucugcgacaugcugcgccucuucgacuucugcaagcaggccauccagcggcugaaggcgcccgcccagaugagcauccagcugaucaacaaggccgugaacgcccucaucaacgaccagcugaucaugaagaaccaccuccgcgacaucaugggcauccccuacugcaacuacuccaaguacugguaccugaaccacaccacgaccgggaagaccagccugcccaagugcuggcugguguccaacggcagcuaccucaacgagacccacuucuccgacgacaucgagcagcaggccgacaacaugaucacggagaugcugcagaaggaguacauggagcggcagggcaagaccccgcuggggcucgucgaccuguucguguucagcaccuccuucuaccugaucagcaucuuccugcaccucgugaagaucccgacccaccgccacaucgucggcaagcccugccccaagccccaccggcugaaccacauggggaucugcuccugcggccuguacaagcagccgggggugcccgugaaguggaagcgcugaggacuaguaauaaggaaacuguaugaaugucugugggcaggaagugaagagauccuucuguaaagguuuuuggaauuaugucugcugaauaauaaacuuuuuugaaauaauaaaucugguagaaaaaugagaucucaaaggcucuuuucagagccaccaaaaaaaaaaaaaaaaaaaaaaaaaaaaaaaaaaaaaaaaaaaaaaaaaaaaaaaaaaaaaaaaagaauu

SEQ ID NO: 23909 - RNA, 1781 nt, Artificial Sequence
  mRNA product Design b-4 (hSL-A64-N5) comprising derived and/or modified sequence from LASV(Josiah;Clade IV)__NP_694870__GPCmut2 (opt1)
aggagagucccgcagucggcguccagcggcucugcuuguucgugugugugucguugcaggccuuauucaagcuuaccaugggccagaucgugaccuucuuccaggaggucccccacgugaucgaggaggugaugaacaucguccugaucgcccucagcgugcuggccgugcugaaggggcucuacaacuucgcgaccugcggccuggucgggcuggugacguuccuccugcugugcggccgcuccugcaccaccagccucuacaaggggguguacgagcugcagacccuggagcucaacauggagacgcugaacaugugcaugccgcuguccugcaccaagaacaacagccaccacuacaucauggucggcaacgagaccggccucgagcugacccugacgaacaccuccaucaucaaccacaaguucugcaaccucagcgacgcccacaagaagaaccuguacgaccacgcccugauguccaucaucagcaccuuccaccucuccauccccaacuucaaccaguacgaggccaugagcugcgacuucaacgggggcaagaucuccgugcaguacaaccugagccacuccuacgccggggacgcggccaaccacugcggcaccguggccaacgggguccugcagacguucaugcggauggccuggggcggcagcuacaucgcgcucgacuccgggcgcggcaacugggacugcaucaugaccagcuaccaguaccugaucauccagaacaccaccugggaggaccacugccaguucucccggcccagccccaucggguaccugggccuccugucccagcgcacgcgggacaucuacaucagccgccggcgccggggcaccuucaccuggacccugagcgacuccgaggggaaggacacgccgggcggguacugccucacccgcuggaugcugaucgaggccgagcugaagugcuucggcaacaccgccguggccaagugcaacgagaagcacgacgaggaguucugcgacaugcuccggcuguucgacuucugcaagcaggccauccagcgccugaaggcgcccgcccagaugagcauccagcucaucaacaaggccgugaacgcccugaucaacgaccagcugaucaugaagaaccaccuccgggacaucauggggauccccuacugcaacuacuccaaguacugguaccugaaccacaccacgaccggccgcaccagccugcccaagugcuggcucgucuccaacggcagcuaccugaacgagacccacuucuccgacgacaucgagcagcaggccgacaacaugaucacggagaugcugcagaaggaguacauggagcggcaggggaagaccccgcucggccugguggaccuguucguguucagcaccuccuucuaccugaucagcaucuuccuccaccuggucaagauccccacccaccgccacaucguggggaaguccugccccaagccccaccggcugaaccacaugggcaucugcagcugcgggcucuacaagcagccgggcgugcccgucaaguggaagcgcugaggacuaguaauaaggaaacuguaugaaugucugugggcaggaagugaagagauccuucuguaaagguuuuuggaauuaugucugcugaauaauaaacuuuuuugaaauaauaaaucugguagaaaaaugagaucucaaaggcucuuuucagagccaccaaaaaaaaaaaaaaaaaaaaaaaaaaaaaaaaaaaaaaaaaaaaaaaaaaaaaaaaaaaaaaaaagaauu

SEQ ID NO: 23910 - RNA, 1778 nt, Artificial Sequence
  mRNA product Design b-4 (hSL-A64-N5) comprising derived and/or modified sequence from LASV(LP;Clade I)__AAF86701__GPCmut2 (opt1)
aggagagucccgcagucggcguccagcggcucugcuuguucgugugugugucguugcaggccuuauucaagcuuaccaugggccagaucaucaccuucuuccaggaggugccccacgucaucgaggaggugaugaacaucgugcugaucgcccucagccugcuggccauccucaaggggcuguacaacaucgcgaccugcggcaucaucgggcuggucgccuuccucuuccugugcggcaaguccugcagccugacgcucaagggcggguacgagcugcagacccuggagcucaacauggagacccugaacaugugcaugccgcuguccugcaccaagaacagcucccaccacuacauccgcgugggcaacgagacggggcucgagcugacccugaccaacaccagcaucaucaaccacaaguucugcaaccucuccgacgcccacaagaagaaccuguacgaccacgcccugaugagcaucaucuccacguuccaccucagcauccccaacuucaaccaguacgaggccauguccugcgacuucaacggcgggaagaucagcgugcaguacaaccugucccacagcuacgcgggcgacgccgccgagcacugcgggaccgucgccaacggcgugcugcagaccuucaugcggauggcguggggcgggcgcuacaucgcccucgacuccggcaaggggaacugggacugcaucaugaccagcuaccaguaccugaucauccagaacacgaccugggaggaccacugccaguucucccggcccagccccaucggcuaccugggccuccugucccagcgcacccgggacaucuacaucagccgccggcgccgggggaccuucacguggacccugagcgacuccgagggcaacgagacccccgggggcuacugccucacccgcuggaugcugaucgaggccgagcugaagugcuucgggaacacggccguggccaagugcaacgagaagcacgacgaggaguucugcgacaugcuccggcuguucgacuucugcaagcaggcgauccgccggcugaaggccccggcccagaugagcauccagcucaucaacaaggccgucaacgcccugaucaacgaccagcugaucaugaagaaccaccuccgcgacaucaugggcauccccuacugcaacuacuccaaguacugguaccugaaccacaccagcuccggccggaccagccugcccaagugcuggcucaucuccaacgggagcuaccugaacgagacccaguucuccgacgacaucgagcagcaggcggacaacaugaucacggagaugcugcagaaggaguacaucgagcgccagggcaagaccccgcucgggcugguggacaucuucaucuucagcaccuccuucuaccugaucagcaucuuccugcaccucaucaagauccccacccaccggcacaucgugggcaagcccugccccaagccgcaccgccugaaccacaugggggucugcuccugcggccuguacaagcaccccggcgugcccacgaaguggaagcggugaggacuaguaauaaggaaacuguaugaaugucugugggcaggaagugaagagauccuucuguaaagguuuuuggaauuaugucugcugaauaauaaacuuuuuugaaauaauaaaucugguagaaaaaugagaucucaaaggcucuuuucagagccaccaaaaaaaaaaaaaaaaaaaaaaaaaaaaaaaaaaaaaaaaaaaaaaaaaaaaaaaaaaaaaaaaagaauu

SEQ ID NO: 23911 - RNA, 1778 nt, Artificial Sequence
  mRNA product Design b-4 (hSL-A64-N5) comprising derived and/or modified sequence from LASV(803213;Clade II)__AAF86703__GPCmut2 (opt1)
aggagagucccgcagucggcguccagcggcucugcuuguucgugugugugucguugcaggccuuauucaagcuuaccaugggccagaucaucaccuucuuccaggaggugccccacgucaucgaggaggugaugaacaucgugcugaucgcccucagccugcuggccauccucaaggggaucuacaacgucgcgaccugcggccuguucgggcugaucuccuuccuccugcugugcggccgcagcugcuccgugacguacaaggggguguacgagcuccagacccuggagcugaacauggccaaccucaacaugugcaugccgcugagcugcaccaagaacaacucccaccacuacaucauggucggcaacgagaccggccuggagcucacgcugaccaacaccagcaucaucaaccacaaguucugcaaccuguccgacgcccacaagaagaaccucuacgaccacgcccugaugagcaucaucuccaccuuccaccugagcauccccaacuucaaccaguacgaggccauguccugcgacuucaacgggggcaagaucagcgugcaguacaaccucucccacagcuucgcgguggacgccgccaaccacugcgggacgaucgccaacggcguccugcagaccuucaugcggauggcguggggcggguccuacaucgcccuggacagcggcaaggggaacugggacugcaucaugaccuccuaccaguaccucaucauccagaacaccacgugggaggaccacugccaguucagccgccccucccccaucggcuaccuggggcugcucagccagcggacccgcgacaucuacaucagccggcgccggcgcggcaccuucaccuggacgcuguccgacagcgagggcaacgaggcccccgggggcuacugccugacccgguggaugcucaucgaggccgagcugaagugcuucgggaacaccgccguggcgaagugcaacgagaagcacgacgaggaguucugcgacaugcugcgccucuucgacuucugcaagcaggccaucaagcggcugaagaccccggcccagauguccauccagcugaucaacaaggccgugaacgcccucaucaacgaccagcugaucaugaagaaccaccuccgcgacaucaugggcauccccuacugcaacuacagccgguacugguaccugaaccacacggucaccgggaagaccucccugccccgcugcuggcuggugagcaacggcuccuaccucaacgagacccacuucagcgacgacaucgagcagcaggcggacaacaugaucacggagaugcugcagaaggaguacauggaccggcagggcaagaccccgcuggggcucguggaccuguucgucuucuccaccagcuucuaccugaucuccaucuuccugcaccucgugaagauccccacccaccgccacaucgugggcaagcccugccccaagccgcaccggcugaaccacauggggaucugcagcugcggccuguacaagcaccccgggguccccgugaaguggaagcgcugaggacuaguaauaaggaaacuguaugaaugucugugggcaggaagugaagagauccuucuguaaagguuuuuggaauuaugucugcugaauaauaaacuuuuuugaaauaauaaaucugguagaaaaaugagaucucaaaggcucuuuucagagccaccaaaaaaaaaaaaaaaaaaaaaaaaaaaaaaaaaaaaaaaaaaaaaaaaaaaaaaaaaaaaaaaaagaauu

SEQ ID NO: 23912 - RNA, 1778 nt, Artificial Sequence
  mRNA product Design b-4 (hSL-A64-N5) comprising derived and/or modified sequence from LASV(GA391;Clade III)__CAA36645__GPCmut2 (opt1)
aggagagucccgcagucggcguccagcggcucugcuuguucgugugugugucguugcaggccuuauucaagcuuaccaugggccagaucgugaccuucuuccaggaggucccccacgugaucgaggaggugaugaacaucguccugaucgcccucagcauccuggccauccugaaggggcucuacaacguggcgaccugcggccugaucgggcuggugacguuccuccugcuguccggccgcagcugcucccucaucuacaaggggaccuacgagcugcagacccuggagcucaacauggagacccugaacaugugcaugccgcugagcugcacgaagaacaacucccaccacuacauccgggucggcaacgagaccggccucgagcugacccugaccaacacgagcauccucaaccacaaguucugcaaccuguccgacgcccacaagcgcaaccuguacgaccacagccucauguccaucaucagcaccuuccaccuguccauccccaacuucaaccaguacgaggccaugagcugcgacuucaacgggggcaagaucaccgugcaguacaaccugucccacagcuucgccguggacgccgcggggcacugcggcacccucgccaacgggguccugcagacguucaugcggauggccuggggcggcuccuacaucgcccuggacagcgggcgcggcaacugggacugcaucaugaccuccuaccaguaccucaucauccagaacaccaccugggacgaccacugccaguucagccggcccucccccaucggguaccugggccugcucagccagcgcacgcgggacaucuacaucagccgccggcgccggggcaccuucaccuggacccuguccgacagcgaggggaacgagacgccgggcggguacugccugacccgcuggaugcucaucgaggcggagcugaagugcuucggcaacaccgccguggccaagugcaacgagaagcacgacgaggaguucugcgacaugcugcggcuguucgacuucugcaagcaggccauccgccggcugaagacccccgcccagauguccauccagcugaucaacaaggcggugaacgcccucaucaacgaccagcugaucaugaagaaccaccuccgcgacaucauggggauccccuacugcaacuacagccgguacugguaccucaaccacacguccaccggcaagaccagccugccccgcugcuggcugaucuccaacggcagcuaccucaacgagaccaaguucuccgacgacaucgagcagcaggccgacaacaugaucacggagaugcugcagaaggaguacaucgaccggcaggggaagaccccgcugggccuggucgaccucuucguguucagcaccuccuucuaccugaucagcaucuuccugcaccucgugaagauccccacccaccgccacaucgucgggaagcccugccccaagccgcaccggcugaaccacaugggcaucugcuccugcgggcuguacaagcagcccggcgugcccgugcgcuggaagcgcugaggacuaguaauaaggaaacuguaugaaugucugugggcaggaagugaagagauccuucuguaaagguuuuuggaauuaugucugcugaauaauaaacuuuuuugaaauaauaaaucugguagaaaaaugagaucucaaaggcucuuuucagagccaccaaaaaaaaaaaaaaaaaaaaaaaaaaaaaaaaaaaaaaaaaaaaaaaaaaaaaaaaaaaaaaaaagaauu

SEQ ID NO: 23913 - RNA, 1781 nt, Artificial Sequence
  mRNA product Design b-4 (hSL-A64-N5) comprising derived and/or modified sequence from LASV(AV;Clade V)__CCA30314__GPCmut2 (opt1)
aggagagucccgcagucggcguccagcggcucugcuuguucgugugugugucguugcaggccuuauucaagcuuaccaugggccagaucgugaccuucuuccaggaggucccccacgugaucgaggaggugaugaacaucguccugaucgcccucagcauccuggccgugcugaaggggcucuacaacaucgcgaccugcggccugaucgggcugaucacguuccuccugcugugcggccgcuccugcagcuccaaccucuacaaggggguguacgagcugcagagccuggaccucaacauggagacccugaacaugugcaugccgcuguccugcaccaagaacaacagccaccacuacauccgggucggcaacgacaccggccucgagcugacgcugaccaacaccuccauccucaaccacaaguucugcaaccugagcgacgcccacaagaaggaccuguacgaccacgcccucauguccaucaucagcaccuuccaccuguccauccccaacuucaaccaguacgaggccaugagcugcgacuucaacgggggcaagaucuccgugcaguacaaccugagccacuccuacgccaucgacgcggccaaccacugcgggacgguggccaacggcauccuccagaccuucaugcgcauggccuggggcgggagcuacaucgcgcuggacuccggccgggggaacugggacugcaucaugaccagcuaccaguaccugaucauccagaacaccacgugggagaaccacugccaguucucccgccccagccccaucggcuaccucgggcugcugagccagcggacccgcgacaucuacaucucccggcgccggcgcggcaccuucaccuggacgcucagcgacuccgagggcaacgccacccccgggggcuacugccugacccgguggaugcugaucgaggccgagcucaagugcuucgggaacaccgccgucgccaagugcaacgagaagcacgacgaggaguucugcgacaugcugcgccuguucgacuucugcaagcaggcgaucagccggcucaaguccccggcccagaugagcauccagcugaucaacaaggccgugaacgcccugaucaacgaccagcucaucaugaagaaccaccuccgcgacaucaugggcauccccuacugcaacuacuccaaguacugguaccugaaccacacgaucaccgggaagaccagccugcccaagugcuggcugguguccaacggcagcuaccugaacgagacccacuucuccgacgacaucgagcagcaggccgacaacaugaucacggagaugcuccagaaggaguacauggagcggcagggcaagaccccgcuggggcuggucgaccuguucguguucagcaccuccuucuaccucaucagcaucuuccugcgccuggugaagauccccacccaccggcacaucgucggcaagcccugccccaagccgcaccgccucaaccacauggggaucugcuccugcggccuguacaagcagcccggggugcccgugcgguggaagcgcugaggacuaguaauaaggaaacuguaugaaugucugugggcaggaagugaagagauccuucuguaaagguuuuuggaauuaugucugcugaauaauaaacuuuuuugaaauaauaaaucugguagaaaaaugagaucucaaaggcucuuuucagagccaccaaaaaaaaaaaaaaaaaaaaaaaaaaaaaaaaaaaaaaaaaaaaaaaaaaaaaaaaaaaaaaaaagaauu

SEQ ID NO: 23914 - RNA, 1778 nt, Artificial Sequence
  mRNA product Design b-4 (hSL-A64-N5) comprising derived and/or modified sequence from LASV(Togo/2016/7082;Clade VI)__AMR44577__GPCmut2 (opt1)
aggagagucccgcagucggcguccagcggcucugcuuguucgugugugugucguugcaggccuuauucaagcuuaccaugggccagaucaucaccuucuuccaggaggugccccacgucaucgaggaggugaugaacaucgugcugaucgcccucagccugcuggccauccucaagggggucuacaacguggcgaccugcggcaucaucgggcuggugacguuccuguuccucugcggccgcuccugcagccugaucuacaagggguccuacgagcugcagacccucgagcugaacauggagacccugaacaugugcaugccgcucagcugcaccaagaacuccagccaccacuacauccgggucggcaacgagacgggccuggagcugacccucaccaacaccuccaucaucaaccacaaguucugcaaccugagcgacgcccacaagcgcaaccuguacgaccacgcccucauguccauccugagcacguuccaccuguccauccccaacuucaaccaguacgaggccaugagcugcgacuucaacgggggcaagaucuccgugcaguacaaccucagccacgccuacgcgguggacgccgccgagcacugcgggaccgucgccaacggcgugcugcagaccuucaugcggauggcguggggcggguccuacaucgcccuggacagcggccgcgggaacugggacugcaucaugaccuccuaccaguaccucaucauccagaacacgaccugggaggaccacugccaguucagccggcccucccccaucggcuaccuggggcugcucagccagcgcacccgggacaucuacaucagccgccggcgccggggcaccuucacguggacccuguccgacagcgagggcaacgagacccccgggggcuacugccugacccgcuggaugcucaucgaggccgagcugaagugcuucgggaacacggccguggccaagugcaacgagaagcacgacgaggaguucugcgacaugcugcggcuguucgacuucugcaagcaggcgauccagcgccugaaguccccggcccagaugagcauccagcugaucaacaaggccgucaacgcccucaucaacgaccagcugaucaugaagaaccaccuccgggacaugaugggcauccccuacugcaacuacuccaaguacugguaccucaaccacaccagcuccgggcgcaccagccugcccaagugcuggcugguguccaacggcagcuaccucaacgagacccacuucuccgacgacaucgagcagcaggccgacaacaugaucacggagaugcugcagaaggaguacaucgaccggcagggcaagaccccgcuggggcucguggaccuguucgucuucagcaccuccuucuaccugaucagcaucuuccugcaccucaucaagauccccacccaccgccacaucgugggcaagcccugccccaagccgcaccggcugaaccacauggggaucugcuccugcggccuguacaagcagcccggggugcccacgcgcuggaagcggugaggacuaguaauaaggaaacuguaugaaugucugugggcaggaagugaagagauccuucuguaaagguuuuuggaauuaugucugcugaauaauaaacuuuuuugaaauaauaaaucugguagaaaaaugagaucucaaaggcucuuuucagagccaccaaaaaaaaaaaaaaaaaaaaaaaaaaaaaaaaaaaaaaaaaaaaaaaaaaaaaaaaaaaaaaaaagaauu

SEQ ID NO: 23915 - RNA, 1778 nt, Artificial Sequence
  mRNA product Design b-4 (hSL-A64-N5) comprising derived and/or modified sequence from LASV(KAK-428;Clade n.d. (VII))__ANH09740__GPCmut2 (opt1)
aggagagucccgcagucggcguccagcggcucugcuuguucgugugugugucguugcaggccuuauucaagcuuaccaugggccagaucgugaccuucuuccaggaggucccccacgugaucgaggaggugaugaacaucguccugaucgcccucagccugcuggccauccucaaggggcuguacaacuucgcgaccugcggcgugaucgggcugaucacguuccuccugcugugcggccgcuccugcagcgccaccuacaaggggcaguacgagcuccagacccuggagcugaacauggagucccucaacaugugcaugccgcugagcugcaccaagaacaacucccaccacuacauccgggccggcaacaacacgggccuggagcucacccugaccaacaccagcaucaucucccacaaguucugcaaccugagcgacgcccacaagaagaaccucuacgaccacacgcugauguccaucaucaccaccuuccaccugagcauccccaacuucaaccaguacgaggccauguccugcgacuucaacgggggcaagaucagcauccaguacaaccucucccacagcuacgcgggggacgccgcccagcacugcggcaccguggccaacgggguccugcagacguucaugcgcauggcguggggcggcuccuaccuggcccucgacagcgggcggcgcggcugggacugcaucaucuccagcuaccaguaccugaucauccagaacaccaccugggacgaccacugccaguucucccggcccagccccaucggguaccugggcuucgugagccagaagacccgcgacaucuacaucucccggcgccggcgcggcacguucaccuggacccucagcgacuccgaggggcacgacaugccgggcggguacugccugacccgguggaugcugaucgaggccgaccucaagugcuucggcaacacggccguggccaagugcaacgagaagcacgacgaggaguucugcgacauguggcgccuguucgacuucugcaagcaggcgauccagcggcugaaggcccccgcccagaugaacauccagcucaucaacaaggccgucaacgcccugaucaacgaccagcugaugaugaagaaccaccuccgcgacaucauggggauccccuacugcaacuacagcaaguucugguaccugaacaacaccaccaccggccggacgucccugccccgcugcuggcucaucagcaacggcuccuaccugaacgagacccacuucagcgacgacaucgagcagcaggcggacaacaugaucaccgagaugcugcagaaggaguacauggaccggcaggggaagaccccgcucggccugguggaccuguucguguucuccacgagcuucuaccucaucaccaucuuccugcaccuggucaagauccccacccaccgccacaucguggggaagcccugccccaagccgcaccggcugaaccacaugggcaucugcuccugcgggcucuacaagcagcccggcgugcccguccgcuggaagcggugaggacuaguaauaaggaaacuguaugaaugucugugggcaggaagugaagagauccuucuguaaagguuuuuggaauuaugucugcugaauaauaaacuuuuuugaaauaauaaaucugguagaaaaaugagaucucaaaggcucuuuucagagccaccaaaaaaaaaaaaaaaaaaaaaaaaaaaaaaaaaaaaaaaaaaaaaaaaaaaaaaaaaaaaaaaaagaauu

SEQ ID NO: 23916 - RNA, 1778 nt, Artificial Sequence; identical to SEQ ID NO: 23910
  mRNA product Design b-4 (hSL-A64-N5) comprising derived and/or modified sequence from LASV(Pinneo-NIG-1969;Clade I)__AIT17836__GPCmut2 (opt1)

SEQ ID NO: 23917 - RNA, 1778 nt, Artificial Sequence
  mRNA product Design b-4 (hSL-A64-N5) comprising derived and/or modified sequence from LASV(ISTH0009-NIG-2011;Clade II)__AIT17404__GPCmut2 (opt1)
aggagagucccgcagucggcguccagcggcucugcuuguucgugugugugucguugcaggccuuauucaagcuuaccaugggccagaucaucaccuucuuccaggaggugccccacgucaucgaggaggugaugaacaucgugcugaucgcccucagccugcuggccauccucaaggggaucuacaacgucgcgaccugcggccuguucgggcugguguccuuccuccugcugugcggccgcagcugcuccacgaccuacaaggggguguacgagcuccagacccuggagcuggacauggccagccucaacaugugcaugccgcuguccugcaccaagaacaacagccaccacuacaucauggucggcaacgagacgggccuggagcucacccugaccaacaccuccaucaucaaccacaaguucugcaaccugagcgacgcccacaagaagaaccucuacgaccacgcccugauguccaucaucagcacguuccaccuguccauccccaacuucaaccaguacgaggccaugagcugcgacuucaacgggggcaagaucuccgugcaguacaaccucagccacgcguacgccguggacgccgccaaccacugcgggaccaucgcgaacggcguccugcagaccuucaugcggauggccuggggcggguccuacaucgcccuggacagcggcaagggguccugggacugcaucaugaccagcuaccaguaccucaucauccagaacacgaccugggaggaccacugccaguucucccgccccagccccaucggcuaccuggggcugcucagccagcggacccgcgacaucuacaucucccggcgccggcgcggcaccuucacguggacccugagcgacuccgagggcaacgagacccccgggggcuacugccugacccgguggaugcucaucgaggccgagcugaagugcuucgggaacacggccguggcgaagugcaacgagaagcacgacgaggaguucugcgacaugcugcgccucuucgacuucugcaagcaggccauccggcgccugaagaccccggcccagaugagcauccagcugaucaacaaggccgugaacgcccucaucaacgaccagcugaucaugaagaaccaccuccgggacaucaugggcauccccuacugcaacuacuccaaguacugguaccugaaccacaccgucaccgggaagacgagccugccccgcugcuggcugguguccaacggcagcuaccucaacgagacccacuucuccgacgacaucgagcagcaggcggacaacaugaucaccgagcugcugcagaaggaguacauggaccggcagggcaagaccccgcucgggcugguggaccuguucgucuucagcacguccuucuaccugaucagcaucuuccuccaccugaucaagauccccacccaccgccacaucaccggcaagcccugccccaagccgcaccggcugaaccacauggggaucugcuccugcggccucuacaagcaccccggggugcccgugaaguggaagcgcugaggacuaguaauaaggaaacuguaugaaugucugugggcaggaagugaagagauccuucuguaaagguuuuuggaauuaugucugcugaauaauaaacuuuuuugaaauaauaaaucugguagaaaaaugagaucucaaaggcucuuuucagagccaccaaaaaaaaaaaaaaaaaaaaaaaaaaaaaaaaaaaaaaaaaaaaaaaaaaaaaaaaaaaaaaaaagaauu

SEQ ID NO: 23918 - RNA, 1778 nt, Artificial Sequence
  mRNA product Design b-4 (hSL-A64-N5) comprising derived and/or modified sequence from LASV(ISTH2010-NIG-2012;Clade II)__AIT17482__GPCmut2 (opt1)
aggagagucccgcagucggcguccagcggcucugcuuguucgugugugugucguugcaggccuuauucaagcuuaccaugggccagaucaucaccuucuuccaggaggugccccacgucaucgaggaggugaugaacaucgugcugaucgcccucagccugcuggccauccucaaggggaucuacaacgucgcgaccugcggccuguucgggcugguguccuuccuccugcugugcggccgcagcugcuccacgaccuacaaggggguguacgagcuccagacccuggagcuggacauggccagccucaacaugugcaugccgcuguccugcaccaagaacaacagccaccacuacaucauggucggcaacgagacgggccuggagcucacccugaccaacaccuccaucaucaaccacaaguucugcaaccugagcgacgcccacaagaagaaccucuacgaccacgcccugauguccaucaucagcacguuccaccuguccauccccaacuucaaccaguacgaggccaugagcugcgacuucaacgggggcaagaucuccgugcaguacaaccucagccacgcguacgccguggacgccgccaaccacugcgggaccaucgcgaacggcguccugcagaccuucaugcggauggccuggggcggguccuacaucgcccuggacagcggcaagggguccugggacugcaucaugaccagcuaccaguaccucaucauccagaacaucacgugggaggaccacugccaguucucccgccccagccccaucggcuaccuggggcugcucagccagcggacccgcgacaucuacaucucccggcgccggcgcggcaccuucaccuggacgcugagcgacuccgagggcaacgagacccccgggggcuacugccugacccgguggaugcucaucgaggccgagcugaagugcuucgggaacaccgccguggcgaagugcaacgagaagcacgacgaggaguucugcgacaugcugcgccucuucgacuucugcaagcaggccauccggcgccugaagacgccggcccagaugagcauccagcugaucaacaaggccgugaacgcccucaucaacgaccagcugaucaugaagaaccaccuccgggacaucaugggcauccccuacugcaacuacuccaaguacugguaccugaaccacaccgucaccgggaagaccagccugccccgcugcuggcugguguccaacggcagcuaccucaacgagacgcacuucuccgacgacaucgagcagcaggcggacaacaugaucaccgagcugcugcagaaggaguacaucgaccggcagggcaagaccccgcucgggcugguggaccuguucgucuucagcaccuccuucuaccugaucagcaucuuccuccaccuggugaagauccccacgcaccgccacguggucggcaagcccugccccaagccgcaccggcugaaccacauggggaucugcuccugcggccucuacaagcaccccggggugcccgugaaguggaagcgcugaggacuaguaauaaggaaacuguaugaaugucugugggcaggaagugaagagauccuucuguaaagguuuuuggaauuaugucugcugaauaauaaacuuuuuugaaauaauaaaucugguagaaaaaugagaucucaaaggcucuuuucagagccaccaaaaaaaaaaaaaaaaaaaaaaaaaaaaaaaaaaaaaaaaaaaaaaaaaaaaaaaaaaaaaaaaagaauu

SEQ ID NO: 23919 - RNA, 1778 nt, Artificial Sequence
  mRNA product Design b-4 (hSL-A64-N5) comprising derived and/or modified sequence from LASV(Lassa virus/H.sapiens-wt/NGA/2015/ISTH_0543;Clade II)__AVO03639__GPCmut2 (opt1)
aggagagucccgcagucggcguccagcggcucugcuuguucgugugugugucguugcaggccuuauucaagcuuaccaugggccagaucaucaccuucuuccaggaggugccccacgucaucgaggaggugaugaacaucgugcugaucgcccucagccugcuggccauccucaaggggaucuacaacgucgcgaccugcggccuguucgggcugguguccuuccuccugcugugcggccgcagcugcuccacgaccuacaaggggguguacgagcuccagacccuggagcuggacauggccaaccucaacaugugcaugccgcugagcugcaccaagaacaacucccaccacuacaucauggucggcaacgagacgggccuggagcucacccugaccaacaccagcaucaucaaccacaaguucugcaaccuguccgacgcccacaagaagaaccucuacgaccacgcccugaugagcaucaucuccacguuccaccugagcauccccaacuucaaccaguacgaggccauguccugcgacuucaacgggggcaagaucagcgugcaguacaaccucucccacaccuacgcgguggacgccgccaaccacugcgggaccaucgccaacggcguccugcagaccuucaugcggauggcguggggcgggagcuacaucgcccuggacuccggcaaggggagcugggacugcaucaugacguccuaccaguaccucgugauccagaacaccaccugggaggaccacugccaguucagccgccccucccccaucggcuaccuggggcugcucagccagcggacccgcgacaucuacaucagccggcgccggcgcggcacguucaccuggacccuguccgacagcgagggcaacgagacccccgggggcuacugccugacgcgguggaugcucaucgaggccgagcugaagugcuucgggaacaccgccguggccaagugcaacgagaagcacgacgaggaguucugcgacaugcugcgccucuucgacuucugcaagcaggcgauccggcgccugaagaccccggcccagauguccauccagcugaucaacaaggccgucaacgcccucaucaacgaccagcugaucaugaagaaccaccuccgggacaucaugggcauccccuacugcaacuacagcaaguacugguaccugaaccacaccgugacggggaagaccucccugccccgcugcuggcuggugagcaacggcuccuaccucaacgagacccacuucagcgacgacaucgagcagcaggccgacaacaugaucaccgagcugcugcagaaggaguacaucgaccggcagggcaagacgccgcucgggcuggucgaccuguucguguucuccaccagcuucuaccugaucuccaucuuccuccaccuggugaagauccccacccaccgccacaucaccggcaagcccugccccaagccgcaccggcugaaccacauggggaucugcagcugcggccucuacaagcaccccgggguccccgugaaguggaagcgcugaggacuaguaauaaggaaacuguaugaaugucugugggcaggaagugaagagauccuucuguaaagguuuuuggaauuaugucugcugaauaauaaacuuuuuugaaauaauaaaucugguagaaaaaugagaucucaaaggcucuuuucagagccaccaaaaaaaaaaaaaaaaaaaaaaaaaaaaaaaaaaaaaaaaaaaaaaaaaaaaaaaaaaaaaaaaagaauu

SEQ ID NO: 23920 - RNA, 1778 nt, Artificial Sequence
  mRNA product Design b-4 (hSL-A64-N5) comprising derived and/or modified sequence from LASV(Lassa virus/H.sapiens-wt/NGA/2016/ISTH_0009;Clade II)__AVO03571__GPCmut2 (opt1)
aggagagucccgcagucggcguccagcggcucugcuuguucgugugugugucguugcaggccuuauucaagcuuaccaugggccagaucaucaccuucuuccaggaggugccccacgucaucgaggaggugaugaacaucgugcugaucgcccucagccugcuggccauccucaaggggaucuacaacgucgcgaccugcggccugcuggggcucguguccuuccugcugcucugcggccgcagcugcuccacgaccuacaaggggguguacgagcugcagacccuggagcucgacauggccagccugaacaugugcaugccgcuguccugcaccaagaacaacagccaccacuacaucauggucggcaacgagacgggccucgagcugacccugaccaacaccuccaucaucaaccacaaguucugcaaccucagcgacgcccacaagaagaaccuguacgaccacgcccugauguccaucaucagcacguuccaccucuccauccccaacuucaaccaguacgaggccaugagcugcgacuucaacgggggccggaucuccgugcaguacaaccugagccacuccuacgcgguggacgccgccaaccacugcgggaccaucgccaacggcguccugcagaccuucaugcgcauggcguggggcgggagcuacaucgcccucgacuccggcaaggggagcugggacugcaucaugaccuccuaccaguaccugaucauccagaacacgaccugggaggaccacugccaguucagccggcccagccccaucggcuaccuggggcuccugucccagcgcacccgggacaucuacaucagccgccggcgccggggcaccuucacguggacccuguccgacagcgagggcaacgagacccccgggggcuacugccucacccgcuggaugcugaucgaggccgagcugaagugcuucgggaacacggccguggccaagugcaacgagaagcacgacgaggaguucugcgacaugcuccggcuguucgacuucugcaagcaggcgauccgccggcugaagaccccggcccagauguccauccagcucaucaacaaggccgugaacgcccugaucaacgaccagcugaucaugaagaaccaccuccgcgacaucaugggcauccccuacugcaacuacagcaaguacugguaccugaaccacaccgucaccgggaagacgucccugccccggugcuggcucgugagcaacggcuccuaccugaacgagacccacuucagcgacgacaucgagcagcaggccgacaacaugaucaccgagcugcuccagaaggaguacaucgaccgccagggcaagaccccgcuggggcugguggaccuguucgucuucuccacgagcuucuaccucaucuccaucuuccugcaccuggugaagauccccacccaccggcacaucaccggcaagcccugccccaagccgcaccgccucaaccacauggggaucugcagcugcggccuguacaaccaccccggggugcccgucaaguggaagcggugaggacuaguaauaaggaaacuguaugaaugucugugggcaggaagugaagagauccuucuguaaagguuuuuggaauuaugucugcugaauaauaaacuuuuuugaaauaauaaaucugguagaaaaaugagaucucaaaggcucuuuucagagccaccaaaaaaaaaaaaaaaaaaaaaaaaaaaaaaaaaaaaaaaaaaaaaaaaaaaaaaaaaaaaaaaaagaauu

SEQ ID NO: 23921 - RNA, 1778 nt, Artificial Sequence
  mRNA product Design b-4 (hSL-A64-N5) comprising derived and/or modified sequence from LASV(Lassa virus/H.sapiens-wt/NGA/2016/ISTH_0017;Clade II)__AVO03567__GPCmut2 (opt1)
aggagagucccgcagucggcguccagcggcucugcuuguucgugugugugucguugcaggccuuauucaagcuuaccaugggccagaucaucaccuucuuccaggaggugccccacgucaucgaggaggugaugaacaucgugcugaucgcccucagccugcuggccauccucaaggggaucuacaacgucgcgaccugcggccuguucgggcugguguccuuccuccugcugugcggccgcagcugcuccacgaccuacaaggggguguacgagcuccagacccuggagcuggacauggccagccucaacaugugcaugccgcuguccugcaccaagaacaacagccaccacuacaucauggucggcaacgagacgggccuggagcucacccugaccaacaccuccaucaucaaccacaaguucugcaaccugagcgacgcccacaagaagaaccucuacgaccacgcccugauguccaucaucagcacguuccaccuguccauccccaacuucaaccaguacgaggccaugagcugcgacuucaacgggggcaagaucuccgugcaguacaaccucagccacaccuacgcgaucgacgccgccaaccacugcgggaccaucgccaacggcgugcugcagaccuucaugcggauggcguggggcggguccuacaucgcccuggacagcggcaagggguccugggacugcaucaugacgagcuaccaguaccucaucauccagaacaccaccugggaggaccacugccaguucucccgccccagccccaucggcuaccuggggcugcucagccagcggacccgcgacaucuacaucucccggcgccggcgcggcacguucaccuggacccugagcgacuccgagggcaacgagacccccgggggcuacugccugacgcgguggaugcucaucgaggccgagcugaagugcuucgggaacaccgccgucgccaagugcaacgagaagcacgacgaggaguucugcgacaugcugcgccucuucgacuucugcaagcaggcgauccggcgccugaagaccccggcccagaugagcauccagcugaucaacaaggccgugaacgcccucaucaacgaccagcugaucaugaagaaccaccuccgggacaucaugggcauccccuacugcaacuacuccaaguacugguaccugaaccacaccgugacggggaagaccagccugccccgcugcuggcuggucuccaacggcagcuaccucaacgagacccacuucuccgacgacaucgagcagcaggccgacaacaugaucaccgagcugcugcagaaggaguacauggaccggcagggcaagacgccgcucgggcugguggaccuguucguguucagcaccuccuucuaccugaucagcaucuuccuccaccugguccgcauccccacccaccggcacgugaucggcaagcccugccccaagccgcaccgccugaaccacauggggaucugcuccugcggccucuacaagcaccccggggugcccgucaaguggaagcggugaggacuaguaauaaggaaacuguaugaaugucugugggcaggaagugaagagauccuucuguaaagguuuuuggaauuaugucugcugaauaauaaacuuuuuugaaauaauaaaucugguagaaaaaugagaucucaaaggcucuuuucagagccaccaaaaaaaaaaaaaaaaaaaaaaaaaaaaaaaaaaaaaaaaaaaaaaaaaaaaaaaaaaaaaaaaagaauu

SEQ ID NO: 23922 - RNA, 1778 nt, Artificial Sequence
  mRNA product Design b-4 (hSL-A64-N5) comprising derived and/or modified sequence from LASV(Lassa virus/H.sapiens-wt/NGA/2018/ISTH_0959;Clade II)__AVV65099__GPCmut2 (opt1)
aggagagucccgcagucggcguccagcggcucugcuuguucgugugugugucguugcaggccuuauucaagcuuaccaugggccagaucaucaccuucuuccaggaggugccccacgucaucgaggaggugaugaacaucgugcugaucgcccucagccugcuggccauccucaaggggaucuacaacgucgugaccugcggccuguucgggcugguguccuuccuccugcugugcggccgcagcugcuccacgaccuacaagggggucuacgagcuccagacccuggagcuggacauggcgagccucaacaugugcaugccgcuguccugcaccaagaacaacagccaccacuacaucauggugggcaacgagacgggccuggagcucacccugaccaacaccuccaucaucaaccacaaguucugcaaccugagcgacgcccacaagaagaaccucuacgaccacgcccugauguccaucaucagcacguuccaccuguccauccccaacuucaaccaguacgaggccaugagcugcgacuucaacgggggcaagaucuccgugcaguacaaccucagccacgccuacgcgaucgacgccgccaaccacugcgggaccaucgccaacggcguccugcagaccuucaugcggauggcguggggcggguccuacaucgcccuggacagcggcaagggguccugggacugcaucaugaccagcuaccaguaccucaucauccagaacacgaccugggaggaccacugccaguucucccgccccagccccaucggcuaccuggggcugcucagccagcggacccgcgacaucuacaucucccggcgccggcgcggcaccuucacguggacccugagcgacuccgagggcaacgagacccccgggggcuacugccugacccgguggaugcucaucgaggccgagcugaagugcuucgggaacacggccguggccaagugcaacgagaagcacgacgaggaguucugcgacaugcugcgccucuucgacuucugcaagcaggcgauccggcgccugaagaccccggcccagaugagcauccagcugaucaacaaggccgugaacgcccucaucaacgaccagcugaucaugaagaaccaccuccgggacaucaugggcauccccuacugcaacuacuccaaguacugguaccugaaccacaccgucaccgggaagacgagccugccccgcugcuggcugguguccaacggcagcuaccucaacgagacccacuucuccgacgacaucgagcagcaggccgacaacaugaucaccgagcugcugcagaaggaguacaucgaccggcagggcaagaccccgcucgggcugguggaccuguucgucuucagcacguccuucuaccugaucagcaucuuccuccaccuggugaagauccccacccaccgccacgugaucggcaagcccugccccaagccgcaccggcugaaccacauggggaucugcuccugcggccucuacaagcaccccgggguccccgugaaguggaagcgcugaggacuaguaauaaggaaacuguaugaaugucugugggcaggaagugaagagauccuucuguaaagguuuuuggaauuaugucugcugaauaauaaacuuuuuugaaauaauaaaucugguagaaaaaugagaucucaaaggcucuuuucagagccaccaaaaaaaaaaaaaaaaaaaaaaaaaaaaaaaaaaaaaaaaaaaaaaaaaaaaaaaaaaaaaaaaagaauu

SEQ ID NO: 23923 - RNA, 1778 nt, Artificial Sequence
  mRNA product Design b-4 (hSL-A64-N5) comprising derived and/or modified sequence from LASV(LASV003-NIG-2008;Clade II)__AIT17580__GPCmut2 (opt1)
aggagagucccgcagucggcguccagcggcucugcuuguucgugugugugucguugcaggccuuauucaagcuuaccaugggccagaucaucaccuucuuccaggaggugccccacgucaucgaggaggugaugaacaucgugcugaucgcccucagccugcuggccauccucaaggggaucuacaacgucgcgaccugcggccuguucgggcugguguccuuccuccugcugugcggccgcagcugcuccacgaccuacaaggggguguacgagcuccagacccuggagcuggacauggccagccucaacaugugcaugccgcuguccugcaccaagaacaacagccaccacuacaucauggucggcaacgagacgggccuggagcucacccugaccaacaccuccaucaucaaccacaaguucugcaaccugagcgacgcccacaagaagaaccucuacgaccacgcccugauguccaucaucagcacguuccaccuguccauccccaacuucaaccaguacgaggccaugagcugcgacuucaacgggggcaagaucuccgugcaguacaaccucagccacaccuacgcgguggacgccgccaaccacugcgggaccaucgccaacggcguccugcagaccuucaugcggauggcguggggcggguccuacaucgcccuggacagcggcaagggguccugggacugcaucaugacgagcuaccaguaccucaucauccagaacaccaccugggaggaccacugccaguucucccgccccagccccaucggcuaccuggggcugcucagccagcggacccgcgacaucuacaucucccggcgccggcgcggcacguucaccuggacccugagcgacuccgagagcaacgagaccccgggcggguacugccugacgcgguggaugcucaucgaggccgagcugaagugcuucggcaacaccgccguggccaagugcaacgagaagcacgacgaggaguucugcgacaugcugcgccucuucgacuucugcaagcaggcgauccggcgccugaaggcccccgcccagauguccauccagcugaucaacaaggccgugaacgcccucaucaacgaccagcugaucaugaagaaccaccuccgggacaucauggggauccccuacugcaacuacagcaaguacugguaccugaaccacaccgucaccggccgcacgucccugccccggugcuggcuggugagcaacggguccuaccucaacgagacccacuucagcgacgacaucgagcagcaggcggacaacaugaucaccgagcugcugcagaaggaguacauggaccgccagggcaagaccccgcucggccugguggaccuguucgucuucuccacgagcuucuaccugaucuccaucuuccuccaccuggugaagauccccacccaccggcacgugaucgggaagcccugccccaagccgcaccgccugaaccacaugggcaucugcagcugcgggcucuacaagcaccccggcguccccgugaaguggaagcggugaggacuaguaauaaggaaacuguaugaaugucugugggcaggaagugaagagauccuucuguaaagguuuuuggaauuaugucugcugaauaauaaacuuuuuugaaauaauaaaucugguagaaaaaugagaucucaaaggcucuuuucagagccaccaaaaaaaaaaaaaaaaaaaaaaaaaaaaaaaaaaaaaaaaaaaaaaaaaaaaaaaaaaaaaaaaagaauu

SEQ ID NO: 23924 - RNA, 1778 nt, Artificial Sequence
  mRNA product Design b-4 (hSL-A64-N5) comprising derived and/or modified sequence from LASV(LASV035-NIG-2009;Clade II)__AIT17588__GPCmut2 (opt1)
aggagagucccgcagucggcguccagcggcucugcuuguucgugugugugucguugcaggccuuauucaagcuuaccaugggccagaucaucaccuucuuccaggaggugccccacgucaucgaggaggugaugaacaucgugcugaucgcccucagccugcuggccauccucaaggggaucuacaacgucgcgaccugcggccuguucgggcugguguccuuccuccugcugugcggccgcagcugcuccacgaccuacaaggggguguacgagcuccagacccuggagcuggacauggccagccucaacaugugcaugccgcuguccugcaccaagaacaacagccaccacuacaucauggucggcaacgagacgggccuggagcucacccugaccaacaccuccaucaucaaccacaaguucugcaaccugagcgacgcccacaagaagaaccucuacgaccacgcccugauguccaucaucagcacguuccaccuguccauccccaacuucaaccaguacgaggccaugagcugcgacuucaacgggggcaagaucuccgugcaguacaaccucagccacgcguacgccguggacgccgccaaccacugcgggaccaucgcgaacggcguccugcagaccuucaugcggauggccuggggcggguccuacaucgcccuggacagcggcaagggguccugggacugcaucaugaccagcuaccaguaccucaucauccagaacacgaccugggaggaccacugccaguucucccgccccagccccaucggcuaccuggggcugcucagccagcggacccgcgacaucuacaucucccggcgccggcgcggcaccuucacguggacccugagcgacuccgagggcaacgagacccccgggggcuacugccugacccgguggaugcucaucgaggccgagcugaagugcuucgggaacacggccguggcgaagugcaacgagaagcacgacgaggaguucugcgacaugcugcgccucuucgacuucugcaagcaggccauccggcgccugaaggccccggcccagaugagcauccagcugaucaacaaggccgugaacgcgcucaucaacgaccagcugaucaugaagaaccaccuccgggacaucaugggcauccccuacugcaacuacuccaaguacugguaccugaaccacaccgucaccgggaagaccagccugccccgcugcuggcugguguccaacggcagcuaccucaacgagacgcacuucuccgacgacaucgagcagcaggccgacaacaugaucaccgagcugcugcagaaggaguacaucgaccggcagggcaagaccccgcucgggcugguggaccuguucgucuucagcaccuccuucuaccugaucagcaucuuccuccaccuggugaagauccccacgcaccgccacgugaucggcaagcccugccccaagccgcaccggcugaaccacauggggaucugcuccugcggccucuacaagcaccccgggguccccgugaaguggaagcgcugaggacuaguaauaaggaaacuguaugaaugucugugggcaggaagugaagagauccuucuguaaagguuuuuggaauuaugucugcugaauaauaaacuuuuuugaaauaauaaaucugguagaaaaaugagaucucaaaggcucuuuucagagccaccaaaaaaaaaaaaaaaaaaaaaaaaaaaaaaaaaaaaaaaaaaaaaaaaaaaaaaaaaaaaaaaaagaauu

SEQ ID NO: 23925 - RNA, 1778 nt, Artificial Sequence
  mRNA product Design b-4 (hSL-A64-N5) comprising derived and/or modified sequence from LASV(LASV1000-NIG-2009;Clade II)__AIT17782__GPCmut2 (opt1)
aggagagucccgcagucggcguccagcggcucugcuuguucgugugugugucguugcaggccuuauucaagcuuaccaugggccagaucaucaccuucuuccaggaggugccccacgucaucgaggaggugaugaacaucgugcugaucgcccucagccugcuggccauccucaaggggaucuacaacgucgcgaccugcggccuguucgggcugguguccuuccuccugcugugcggccgcagcugcuccacgaccuacaaggggguguacgagcuccagacccuggagcuggacauggccagccucaacaugugcaugccgcuguccugcaccaagaacaacagccaccacuacaucauggucggcaacgagacgggccuggagcucacccugaccaacaccuccaucaucaaccacaaguucugcaaccugagcgacgcccacaagaagaaccucuacgaccacgcccugauguccaucaucagcacguuccaccuguccauccccaacuucaaccaguacgaggccaugagcugcgacuucaacgggggcaagaucuccgugcaguacaaccucagccacaccuacgcgguggacgccgccaaccacugcgggaccaucgccaacggcguccugcagaccuucaugcggauggcguggggcggguccuacaucgcccuggacagcggcaagggguccugggacugcaucaugacgagcuaccaguaccucaucauccagaacaccaccugggaggaccacugccaguucucccgccccagccccaucggcuaccuggggcugcucagccagcggacccgcgacaucuacaucucccggcgccggcgcggcacguucaccuggacccugagcgacuccgagggcaacgagacccccgggggcuacugccugacgcgguggaugcucaucgaggccgagcugaagugcuucgggaacaccgccguggccaagugcaacgagaagcacgacgaggaguucugcgacaugcugcgccucuucgacuucugcaagcaggcgaucaagcggcugaagaccccggcccagaugagcauccagcugaucaacaaggccgugaacgcccucaucaacgaccagcugaucaugaagaaccaccuccgcgacaucaugggcauccccuacugcaacuacuccaaguacugguaccugaaccacaccgucacggggaagaccagccugccccggugcuggcugguguccaacggcagcuaccucaacgagacccacuucuccgacgacaucgagcagcaggccgacaacaugaucaccgagcugcugcagaaggaguacaucgaccgccagggcaagacgccgcucgggcugguggaccuguucgucuucagcaccuccuucuaccugaucagcaucuuccuccaccuggugaagauccccacccaccggcacguggucggcaagcccugccccaagccgcaccgccugaaccacauggggaucugcuccugcggccucuacaagcaccccggggugcccgugaaguggaagcggugaggacuaguaauaaggaaacuguaugaaugucugugggcaggaagugaagagauccuucuguaaagguuuuuggaauuaugucugcugaauaauaaacuuuuuugaaauaauaaaucugguagaaaaaugagaucucaaaggcucuuuucagagccaccaaaaaaaaaaaaaaaaaaaaaaaaaaaaaaaaaaaaaaaaaaaaaaaaaaaaaaaaaaaaaaaaagaauu

SEQ ID NO: 23926 - RNA, 1778 nt, Artificial Sequence
  mRNA product Design b-4 (hSL-A64-N5) comprising derived and/or modified sequence from LASV(LASV221-NIG-2010;Clade II)__AIT17624__GPCmut2 (opt1)
aggagagucccgcagucggcguccagcggcucugcuuguucgugugugugucguugcaggccuuauucaagcuuaccaugggccagaucaucaccuucuuccaggaggugccccacgucaucgaggaggugaugaacaucgugcugaucgcccucagccugcuggccauccucaaggggaucuacaacgucgcgaccugcggccuguucgggcugguguccuuccuccugcugugcggccgcagcugcuccacgaccuacaaggggguguacgagcuccagacccuggagcuggacauggccagccucaacaugugcaugccgcuguccugcaccaagaacaacagccaccacuacaucauggucggcaacgagacgggccuggagcucacccugaccaacaccuccaucaucaaccacaaguucugcaaccugagcgacgcccacaagaagaaccucuacgaccacgcccugauguccaucaucagcacguuccaccuguccauccccaacuucaaccaguacgaggccaugagcugcgacuucaacgggggcaagaucuccgugcaguacaaccucagccacaccuacgcgaucgacgccgccaaccacugcgggaccaucgccaacggcgugcugcagaccuucaugcggauggcguggggcggguccuacaucgcccuggacagcggcaagggguccugggacugcaucaugacgagcuaccaguaccucaucauccagaacaccaccugggaggaccacugccaguucucccgccccagccccaucggcuaccuggggcugcucagccagcggacccgcgacaucuacaucucccggcgccggcgcggcacguucaccuggacccugagcgacuccgagggcaacgagacccccgggggcuacugccugacgcgguggaugcucaucgaggccgagcugaagugcuucgggaacaccgccgucgccaagugcaacgagaagcacgacgaggaguucugcgacaugcugcgccucuucgacuucugcaagcaggcgauccggcgccugaagaccccggcccagaugagcauccagcugaucaacaaggccgugaacgcccucaucaacgaccagcugaucaugaagaaccaccuccgggacaucaugggcauccccuacugcaacuacuccaaguacugguaccugaaccacaccgugacggggaagaccagccugccccgcugcuggcuggucuccaacggcagcuaccucaacgagacccacuucuccgacgacaucgagcagcaggccgacaacaugaucaccgagaugcugcagaaggaguacauggaccggcagggcaagacgccgcuggggcucguggaccuguucguguucagcaccuccuucuaccugaucagcaucuuccugcaccucgucaagauccccacccaccgccacgugaucggcaagcccugccccaagccgcaccggcugaaccacauggggaucugcuccugcggccuguacaagcaccccggggugcccgucaaguggaagcgcugaggacuaguaauaaggaaacuguaugaaugucugugggcaggaagugaagagauccuucuguaaagguuuuuggaauuaugucugcugaauaauaaacuuuuuugaaauaauaaaucugguagaaaaaugagaucucaaaggcucuuuucagagccaccaaaaaaaaaaaaaaaaaaaaaaaaaaaaaaaaaaaaaaaaaaaaaaaaaaaaaaaaaaaaaaaaagaauu

SEQ ID NO: 23927 - RNA, 1778 nt, Artificial Sequence
  mRNA product Design b-4 (hSL-A64-N5) comprising derived and/or modified sequence from LASV(LASV237-NIG-2010;Clade II)__AIT17638__GPCmut2 (opt1)
aggagagucccgcagucggcguccagcggcucugcuuguucgugugugugucguugcaggccuuauucaagcuuaccaugggccagaucaucaccuucuuccaggaggugccccacgucaucgaggaggugaugaacaucgugcugaucgcccucagccugcuggccauccucaaggggaucuacaacgucgcgaccugcggccuguucgggcugguguccuuccuccugcugugcggccgcagcugcuccacgaccuacaaggggguguacgagcuccagacccuggagcuggacauggccagccucaacaugugcaugccgcuguccugcaccaagaacaacagccaccacuacaucauggucggcaacgagacgggccuggagcucacccugaccaacaccuccaucaucaaccacaaguucugcaaccugagcgacgcccacaagaaggaccucuacgaccacgcccugauguccaucaucagcacguuccaccuguccauccccaacuucaaccaguacgaggccaugagcugcgacuucaacgggggcaagaucuccgugcaguacaaccucagccacaccuacgcgguggacgccgccaaccacugcgggaccaucgccaacggcguccugcagaccuucaugcggauggcguggggcggguccuacaucgcccuggacagcggcaagggguccugggacugcaucaugacgagcuaccaguaccucaucauccagaacaccaccugggaggaccacugccaguucucccgccccagccccaucggcuaccuggggcugcucagccagcggacccgcgacaucuacaucucccggcgccggcgcggcacguucaccuggacccugagcgacuccgagggcaacgagacccccgggggcuacugccugacgcgguggaugcucaucgaggccgagcugaagugcuucgggaacaccgccguggccaagugcaacgagaagcacgacgaggaguucugcgacaugcugcgccucuucgacuucugcaagcaggcgauccggcgccugaagaccccggcccagaugagcauccagcugaucaacaaggccgugaacgcccucaucaacgaccagcugaucaugaagaaccaccuccgggacaucaugggcauccccuacugcaacuacuccaaguacugguaccugaaccacaccgucacggggaagaccagccugccccgcugcuggcugguguccaacggcagcuaccucaacgagacccacuucuccgacgacaucgagcagcaggccgacaacaugaucaccgagcugcugcagaaggaguacauggaccggcagggcaagacgccgcucgggcugguggaccuguucgucuucagcaccuccuucuaccugaucagcaucuuccuccaccugaucaagauccccacccaccgccacaucaccggcaagcccugccccaagccgcaccggcugaaccacauggggaucugcuccugcggccucuacaagcaccccggggugcccgugaaguggaagcgcugaggacuaguaauaaggaaacuguaugaaugucugugggcaggaagugaagagauccuucuguaaagguuuuuggaauuaugucugcugaauaauaaacuuuuuugaaauaauaaaucugguagaaaaaugagaucucaaaggcucuuuucagagccaccaaaaaaaaaaaaaaaaaaaaaaaaaaaaaaaaaaaaaaaaaaaaaaaaaaaaaaaaaaaaaaaaagaauu

SEQ ID NO: 23928 - RNA, 1778 nt, Artificial Sequence
  mRNA product Design b-4 (hSL-A64-N5) comprising derived and/or modified sequence from LASV(LASV253-NIG-2011;Clade II)__AIT17670__GPCmut2 (opt1)
aggagagucccgcagucggcguccagcggcucugcuuguucgugugugugucguugcaggccuuauucaagcuuaccaugggccagaucaucaccuucuuccaggaggugccccacgucaucgaggaggugaugaacaucgugcugaucgcccucagccugcuggccauccucaaggggaucuacaacgucgcgaccugcggccuguucgggcugguguccuuccuccugcugugcggccgcagcugcuccacgaccuacaaggggguguacgagcuccagacccuggagcuggacauggccagccucaacaugugcaugccgcuguccugcaccaagaacaacagccaccacuacaucauggucggcaacgagacgggccuggagcucacccugaccaacaccuccaucaucaaccacaaguucugcaaccugagcgacgcccacaagaagaaccucuacgaccacgcccugauguccaucaucagcacguuccaccuguccauccccaacuucaaccaguacgaggccaugagcugcgacuucaacgggggcaagaucuccgugcaguacaaccucagccacaccuacgcgguggacgccgccaaccacugcgggaccaucgccaacggcguccugcagaccuucaugcggauggcguggggcggguccuacaucgcccuggacagcggcaagggguccugggacugcaucaugacgagcuaccaguaccucaucauccagaacaccaccugggaggaccacugccaguucucccgccccagccccaucggcuaccuggggcugcucagccagcggacccgcgacaucuacaucucccggcgccggcgcggcacguucaccuggacccugagcgacuccgagggcaacgagacccccgggggcuacugccugacgcgguggaugcucaucgaggccgagcugaagugcuucgggaacaccgccguggccaagugcaacgagaagcacgacgaggaguucugcgacaugcugcgccucuucgacuucugcaagcaggcgauccggcgccugaaggccccggcccagaugagcauccagcugaucaacaaggccgugaacgcccucaucaacgaccagcugaucaugaagaaccaccuccgggacaucaugggcauccccuacugcaacuacuccaaguacugguaccugaaccacaccgucaccgggcgcacgagccugccccggugcuggcugguguccaacggcagcuaccucaacgagacccacuucuccgacgacaucgagcagcaggcggacaacaugaucaccgagcugcugcagaaggaguacaucgaccgccagggcaagaccccgcucgggcugguggaccuguucgucuucagcacguccuucuaccugaucagcaucuuccuccaccuggugaagauccccacccaccggcacaucaucggcaagcccugccccaagccgcaccgccugaaccacauggggaucugcuccugcggccucuacaagcaccccggggugcccgucaaguggaagcggugaggacuaguaauaaggaaacuguaugaaugucugugggcaggaagugaagagauccuucuguaaagguuuuuggaauuaugucugcugaauaauaaacuuuuuugaaauaauaaaucugguagaaaaaugagaucucaaaggcucuuuucagagccaccaaaaaaaaaaaaaaaaaaaaaaaaaaaaaaaaaaaaaaaaaaaaaaaaaaaaaaaaaaaaaaaaagaauu

SEQ ID NO: 23929 - RNA, 1778 nt, Artificial Sequence
  mRNA product Design b-4 (hSL-A64-N5) comprising derived and/or modified sequence from LASV(LASV254-NIG-2011;Clade II)__AIT17674__GPCmut2 (opt1)
aggagagucccgcagucggcguccagcggcucugcuuguucgugugugugucguugcaggccuuauucaagcuuaccaugggccagaucaucaccuucuuccaggaggugccccacgucaucgaggaggugaugaacaucgugcugaucgcccucagccugcuggccauccucaaggggaucuacaacgucgcgaccugcggccuguucgggcugguguccuuccuccugcugugcggccgcagcugcuccacgaccuacaaggggguguacgagcuccagacccuggagcuggacaugaccaaccucaacaugugcaugccgcugagcugcacgaagaacaacucccaccacuacaucauggucggcaacgagaccggccuggagcucacccugaccaacacgagcaucaucaaccacaaguucugcaaccuguccgacgcccacaagaagaaccucuacaaccacgcccugaugagcaucaucuccaccuuccaccugagcauccccaacuucaaccaguacgaggccauguccugcgacuucaacgggggcaagaucagcgugcaguacaaccucucccacagcuacgccguggacgcggccaaccacugcgggaccaucgccaacggcguccugcagaccuucaugcggauggccuggggcggguccuacaucgcgcuggacagcggcaaggggaacugggacugcaucaugacguccuaccaguaccucaucauccagaacaccaccugggaggaccacugccaguucagccgccccucccccaucggcuaccuggggcugcucagccagcggacccgcgacaucuacaucagccggcgccggcgcggcacguucaccuggacccuguccgacagcgagggcaacgagacccccgggggcuacugccugacgcgguggaugcucaucgaggccgagcugaagugcuucgggaacaccgccguggccaagugcaacgagaagcacgacgaggaguucugcgacaugcugcgccucuucgacuucugcaagcaggccauccggcgccugaagaccccggcgcaggccaacauccagcugaucaacaaggccgugaacgcccucaucaacgaccagcugaucaugaagaaccaccuccgggacaucaugggcauccccuacugcaacuacuccaaguacugguaccugaaccacaccgucacggggaagaccagccugccccgcugcuggcugguguccaacggcagcuaccucaacgagacccacuucuccgacgacaucgagcagcaggccgacaacaugaucaccgagcugcugcagaaggaguacauggaccggcagggcaagacgccgcucgggcugguggaccuguucgucuucagcaccuccuucuaccugaucagcaucuuccuccaccuggugaagauccccacccaccgccacgugaucggcaagcccugccccaagccgcaccggcugaaccacauggggaucugcuccugcggccucuacaagcaccccgggguccccgugaaguggaagcgcugaggacuaguaauaaggaaacuguaugaaugucugugggcaggaagugaagagauccuucuguaaagguuuuuggaauuaugucugcugaauaauaaacuuuuuugaaauaauaaaucugguagaaaaaugagaucucaaaggcucuuuucagagccaccaaaaaaaaaaaaaaaaaaaaaaaaaaaaaaaaaaaaaaaaaaaaaaaaaaaaaaaaaaaaaaaaagaauu

SEQ ID NO: 23930 - RNA, 1778 nt, Artificial Sequence
  mRNA product Design b-4 (hSL-A64-N5) comprising derived and/or modified sequence from LASV(Nig08-A19;Clade III)__ADU56618__GPCmut2 (opt1)
aggagagucccgcagucggcguccagcggcucugcuuguucgugugugugucguugcaggccuuauucaagcuuaccaugggccagaucgugaccuucuuccaggaggucccccacgugaucgaggaggugaugaacaucguccugaucgcccucagcauccuggccauccugaaggggcucuacaacaucgcgaccugcggccugaucgggcuggugacguuccuccugcuguccggccgcagcugcuccaugaccuacaaggggguguacgagcuccagacccuggagcugaacaugaacacccucaacaugugcaugccgcugagcugcacgaagaacaacucccaccacuacaucauggucggcaacgagaccggccuggagcucacccugaccaacacgagccugcuccaccacaaguucugcaaccuguccgacgcccacaagaagaaccuguacgaccacacccucaugagcaucaucuccaccuuccaccugagcauccccaacuucaaccaguacgaggccauguccugcgacuucaacgggggcaagaucaccgugcaguacaaccugagccacuccuacgccaucgacgccgcgaaccacugcgggacgguggccaacggcguccuccagaccuucaugcggauggccuggggcgggagcuacaucgcccuggacuccggccgcgggaagugggacugcaucaugaccagcuaccaguaccugaucauccagaacaccacgugggaggaccacugccaguucucccggcccagccccaucggcuaccucgggcugcugucccagcgcacccgggacaucuacaucagccgccggcgccggggcaccuucaccuggacgcucagcgacuccgagggcaacgagacccccgggggcuacugccugacccgcuggaugcugaucgaggcggagcucaagugcuucgggaacaccgccguggccaagugcaacgagaagcacgacgaggaguucugcgacaugcugcggcuguucgacuucugcaagcaggccauccgccggcucaaggccccggcgcagaugagcauccagcugaucaacaaggccgugaacgcccugaucaacgaccagcucaucaugaagaaccaccuccgcgacaucaugggcauccccuacugcaacuacuccaaguacugguaccugaaccacacgagcaccgggcggaccucccugccccgcugcuggcuggucagcaacggcuccuaccugaacgagacccacuucagcgacgacaucgagcagcaggccgacaacaugaucacggagaugcuccagaaggaguaccuggaccggcagggcaagaccccgcuggggcugguggaccucuucguguucuccaccagcuucuaccugaucuccaucuuccugcaccucgucaagauccccacccaccgccacaucgugggcaagcccugccccaagccgcaccggcugaaccacauggggaucugcagcugcggccuguacaagcagcccggggugcccguccgcuggaagcggugaggacuaguaauaaggaaacuguaugaaugucugugggcaggaagugaagagauccuucuguaaagguuuuuggaauuaugucugcugaauaauaaacuuuuuugaaauaauaaaucugguagaaaaaugagaucucaaaggcucuuuucagagccaccaaaaaaaaaaaaaaaaaaaaaaaaaaaaaaaaaaaaaaaaaaaaaaaaaaaaaaaaaaaaaaaaagaauu

SEQ ID NO: 23931 - RNA, 1781 nt, Artificial Sequence
  mRNA product Design b-4 (hSL-A64-N5) comprising derived and/or modified sequence from LASV(G1180-SLE-2010;Clade IV)__AIT17168__GPCmut2 (opt1)
aggagagucccgcagucggcguccagcggcucugcuuguucgugugugugucguugcaggccuuauucaagcuuaccaugggccagaucgugaccuucuuccaggaggucccccacgugaucgaggaggugaugaacaucguccugaucgcccucagcauccuggccgugcugaaggggcucuacaacuucgcgaccugcggccugguggggcugcucacguuccugcugcucugcggccgcuccugcaccgccagccgguacaagggggucuacgagcugcagacccuggagcucaacauggagacccugaacaugugcaugccgcuguccugcacgaagaacaacagccaccacuacaucauggugggcaacgagaccggccucgagcugacccugaccaacacguccaucaucaaccacaaguucugcaaccucagcgacgcccacaagaagaaccuguacgaccacgcccugauguccaucaucagcaccuuccaccucuccauccccaacuucaaccaguacgaggccaugagcugcgacuucaacgggggcaagaucuccgugcaguacaaccugagccacuccuacgcgggggacgccgccaaccacugcggcaccgucgccaacggggugcugcagaccuucaugcgcauggcguggggcggcagcuacaucgcccucgacuccgggcacggcagcugggacugcaucaugacguccuaccaguaccugaucauccagaacaccaccugggaggaccacugccaguucagccggcccucccccaucggguaccugggccuccugagccagcgcacccgggacaucuacaucagccgccggcgccggggcacguucaccuggacccuguccgacagcgaggggaaggacaccccgggcggguacugccucacgcgcuggaugcugaucgaggccgagcugaagugcuucggcaacaccgccguggccaagugcaacgagaagcacgacgaggaguucugcgacaugcuccggcuguucgacuucugcaagcaggcgauccagcgccugaaggcccccgcccagauguccauccagcucaucaacaaggccgucaacgcccugaucaacgaccagcugaucaugaagaaccaccuccgggacaucauggggauccccuacugcaacuacagcaaguacugguaccugaaccacaccaccacgggcaagaccucccugcccaagugcuggcucgugagcaacggcuccuaccugaacgagacccacuucagcgacgacaucgagcagcaggcggacaacaugaucaccgagaugcugcagaaggaguacauggagcgccaggggaagacgccgcucggccugguggaccuguucgucuucuccaccagcuucuaccugaucuccaucuuccuccaccuggugaagauccccacccaccggcacaucgugggcaagagcugccccaagccccaccgccugaaccacauggggaucugcuccugcgggcucuacaagcagccgggcguccccgugaaguggaagcggugaggacuaguaauaaggaaacuguaugaaugucugugggcaggaagugaagagauccuucuguaaagguuuuuggaauuaugucugcugaauaauaaacuuuuuugaaauaauaaaucugguagaaaaaugagaucucaaaggcucuuuucagagccaccaaaaaaaaaaaaaaaaaaaaaaaaaaaaaaaaaaaaaaaaaaaaaaaaaaaaaaaaaaaaaaaaagaauu

SEQ ID NO: 23932 - RNA, 1781 nt, Artificial Sequence
  mRNA product Design b-4 (hSL-A64-N5) comprising derived and/or modified sequence from LASV(G1442-SLE-2011;Clade IV)__AIT17180__GPCmut2 (opt1)
aggagagucccgcagucggcguccagcggcucugcuuguucgugugugugucguugcaggccuuauucaagcuuaccaugggccagaucgugaccuucuuccaggaggucccccacgugaucgaggaggugaugaacaucguccugaucgcccucagcauccuggccgugcugaaggggcucuacaacguggcgaccugcggccugaucgggcuggucacguuccuccugcugugcggccgcuccugcaccaccacccucuacaaggggguguacgagcugcagacgcuggagcucaacauggagacccugaacaugugcaugccgcugagcugcaccaagaacaacucccaccacuacauccgggugggcaacgagaccggccucgagcugacgcugaccaacaccagcaucaucaaccacaaguucugcaaccucuccgacgcccacaagaagaaccuguacgaccacgcccugaugagcaucaucuccaccuuccaccucagcauccccaacuucaaccaguacgaggccauguccugcgacuucaacgggggcaagaucagcguccaguacaaccugucccacagcuacgccggggacgcggccaaccacugcggcacgguggccaacggggugcugcagaccuucaugcgcauggccuggggcggcuccuacaucgcgcucgacagcgggcggggcaacugggacugcaucaugaccuccuaccaguaccugaucauccagaacaccacgugggacgaccacugccaguucagccgccccucccccaucggguaccugggccuccugagccagcggacccgcgacgucuacaucucccggcgccggcgcggcaccuucaccuggacgcugagcgacagcgaggggaaggacaccccgggcggguacugccucacccgguggaugcugaucgaggccgagcugaagugcuucggcaacaccgccguggccaagugcaacgagaagcacgacgaggaguucugcgacaugcuccgccuguucgacuucugcaagcaggccauccagcggcugaaggcgcccgcccagauguccauccagcucaucaacaaggccgugaacgcccugaucaacgaccagcugaucaugaagaaccaccuccgcgacaucauggggauccccuacugcaacuacagcaaguacugguaccugaacaacacggccaccggcaagaccucccugcccaagugcuggcucaucagcaacggcuccuaccugaacgagacccacuucagcgacgacaucgagcaggaggcggacaacaugaucacggagaugcugcagaaggaguacauggagcggcaggggaagaccccgcucggccuggucgaccuguucguguucuccaccagcuucuaccugaucuccaucuuccuccaccuggugaagauccccacccaccgccacaucgucggcaagagcugccccaagccccaccggcugaaccacauggggaucugcuccugcgggcucuacaagcagccgggcgugcccgugcgcuggaagcggugaggacuaguaauaaggaaacuguaugaaugucugugggcaggaagugaagagauccuucuguaaagguuuuuggaauuaugucugcugaauaauaaacuuuuuugaaauaauaaaucugguagaaaaaugagaucucaaaggcucuuuucagagccaccaaaaaaaaaaaaaaaaaaaaaaaaaaaaaaaaaaaaaaaaaaaaaaaaaaaaaaaaaaaaaaaaagaauu

SEQ ID NO: 23933 - RNA, 1781 nt, Artificial Sequence
  mRNA product Design b-4 (hSL-A64-N5) comprising derived and/or modified sequence from LASV(G3010-SLE-2013;Clade IV)__AIT17344__GPCmut2 (opt1)
aggagagucccgcagucggcguccagcggcucugcuuguucgugugugugucguugcaggccuuauucaagcuuaccaugggccagaucgugaccuucuuccaggaggucccccacgugaucgaggaggugaugaacaucguccugaucgcccucagcauccuggccgugcugaaggggcucuacaacuucgcgaccugcggccugguggggcuggucacguuccuccugcugugcggccgcuccugcaccaccagccucuacaaggggguguacgagcugcagacccuggagcucaacauggagacgcugaacaugugcaugccgcuguccugcaccaagaacaacagccaccacuacaucauggugggcaacgagaccggccucgagcugacccugacgaacaccuccaucaucaaccacaaguucugcaaccucagcgacgcccacaagaagaaccuguacaaccacgcccugauguccaucaucagcaccuuccaccucuccauccccaacuucaaccaguacgaggccaugagcugcgacuucaacgggggcaagaucuccguccaguacaaccugagccacuccuacgccggggacgcggccagccacugcggcaccguggccaacggggugcugcagacguucaugcggauggccuggggcggcuccuacaucgcgcucgacagcggguacggcaagugggacugcaucaugaccuccuaccaguaccugaucauccagaacaccaccugggaggaccacugccaguucagccgccccucccccaucggguaccugggccuccugagccagcggacgcgcgacaucuacaucagccggcgccggcgcggcaccuucaccuggacccuguccgacagcgaggggaaggacacgccgggcggguacugccucacccgguggaugcugaucgaggccgagcugaagugcuucggcaacaccgccgucgccaagugcaacgagaagcacgacgaggaguucugcgacaugcuccgccuguucgacuucugcaagcaggccauccagcggcugaagacccccgcgcagauguccauccagcucaucaacaaggccgugaacgcccugaucaacgaccagcugaucaugaagaaccaccuccgcgacaucauggggauccccuacugcaacuacagcaaguacugguaccugaaccacacgaccaccggcaagaccucccugcccaagugcuggcucgugagcaacggcuccuaccugaacgagacgcacuucagcgacgacaucgagcagcaggccgacaacaugaucaccgagaugcugcagaaggaguacauggagcggcaggggaagaccccgcucggccuggucgaccuguucguguucuccaccagcuucuaccugaucuccaucuuccuccaccuggugaagauccccacgcaccgccacaucgucggcaagagcugccccaagccccaccggcugaaccacauggggaucugcuccugcgggcucuacaagcagccgggcgugcccgugcgcuggaagcggugaggacuaguaauaaggaaacuguaugaaugucugugggcaggaagugaagagauccuucuguaaagguuuuuggaauuaugucugcugaauaauaaacuuuuuugaaauaauaaaucugguagaaaaaugagaucucaaaggcucuuuucagagccaccaaaaaaaaaaaaaaaaaaaaaaaaaaaaaaaaaaaaaaaaaaaaaaaaaaaaaaaaaaaaaaaaagaauu

SEQ ID NO: 23934 - RNA, 1781 nt, Artificial Sequence
  mRNA product Design b-4 (hSL-A64-N5) comprising derived and/or modified sequence from LASV(G502-SLE-2009;Clade IV)__AIT17126__GPCmut2 (opt1)
aggagagucccgcagucggcguccagcggcucugcuuguucgugugugugucguugcaggccuuauucaagcuuaccaugggccagaucgugaccuucuuccaggaggucccccacgugaucgaggaggugaugaacaucguccugaucgcccucagcauccuggccgugcugaaggggcucuacaacuucgcgaccugcggccugguggggcugcucacguuccugcugcucugcggccgcuccugcaccaccgggcuguacaagggcgucuacgagcugcagacccucgagcugaacauggagacgcugaacaugugcaugccgcucagcugcaccaagaacaacucccaccacuacaucauggugggcaacgagaccgggcuggagcugacccucacgaacaccagcaucaucaaccacaaguucugcaaccuguccgacgcccacaagaagaaccuguacgaccacgcccucaugagcaucaucuccaccuuccaccugagcauccccaacuucaaccaguacgaggccauguccugcgacuucaacggcgggaagaucagcgugcaguacaaccugucccacagcuacgccggcgacgcggccgaccacugcgggaccgucgccaacggcgugcuccagacguucaugcggauggccuggggcggguccuacaucgcgcuggacagcggccgcgggcggugggacugcaucaugaccuccuaccaguaccugaucauccagaacaccaccugggaggaccacugccaguucagccgccccucccccaucggcuaccucggccugcugagccagcggacgcgcgacaucuacaucucccggcgccggcgcgggaccuucaccuggacccucagcgacagcgagggcaaggacacgcccgggggcuacugccugacccgguggaugcugaucgaggccgagcucaagugcuucgggaacaccgccguggccaagugcaacgagaagcacgacgaggaguucugcgacaugcugcgccuguucgacuucugcaagcaggccauccagcggcucaaggcgccggcccagauguccauccagcugaucaacaaggccgucaacgcccugaucaacgaccagcucgugaugaagaaccaccuccgcgacaucaugggcauccccuacugcaacuacagccgguacugguaccugaaccacaccacgaccggccgcaccucccugcccaagugcuggcuggugagcaacggguccuaccugaacgagacccacuucagcgacgacaucgagcagcaggccgacaacaugaucacggagaugcuccagaaggaguacauggagcggcagggcaagaccccgcuggggcuggucgaccuguucguguucuccaccagcuucuaccucaucuccaucuuccugcaccuggugaagauccccacccaccgccacaucgucggcaagagcugccccaagccccaccggcucaaccacauggggaucugcuccugcggccuguacaagcagccgggcgugcccgugaaguggaagcgcugaggacuaguaauaaggaaacuguaugaaugucugugggcaggaagugaagagauccuucuguaaagguuuuuggaauuaugucugcugaauaauaaacuuuuuugaaauaauaaaucugguagaaaaaugagaucucaaaggcucuuuucagagccaccaaaaaaaaaaaaaaaaaaaaaaaaaaaaaaaaaaaaaaaaaaaaaaaaaaaaaaaaaaaaaaaaagaauu

SEQ ID NO: 23935 - RNA, 1781 nt, Artificial Sequence
  mRNA product Design b-4 (hSL-A64-N5) comprising derived and/or modified sequence from LASV(G733-SLE-2010;Clade IV)__AIT17154__GPCmut2 (opt1)
aggagagucccgcagucggcguccagcggcucugcuuguucgugugugugucguugcaggccuuauucaagcuuaccaugggccagaucgugaccuucuuccaggaggucccccacgugaucgaggaggugaugaacaucguccugaucgcccucagcauccuggccgugcugaaggggcucuacaacuucgcgaccugcggcaucguggggcuggucuccuuccugcuccugugcggccgcagcugcacgaccucccuguacaaggggguguacgagcuccagacccuggagcugaacauggagacccucaacaugugcaugccgcugagcugcacgaagaacaacucccaccacuacaucauggugggcaacgagaccggccuggagcucacccugaccaacacgagcaucaucaaccacaaguucugcaaccuguccgacgcccacaagaagaaccucuacgaccacgcccugaugagcaucaucuccaccuuccaccugagcauccccaacuucaaccaguacgaggccauguccugcgacuucaacgggggcaagaucagcguccaguacaaccucucccacagcuacgccggggacgcggccaaccacugcggcaccaucgccaacggggugcugcagaccuucaugcggauggccuggggcggcuccuacaucgcgcuggacagcgggcgcgaccggugggacugcaucaugacguccuaccaguaccucaucauccagaacaccaccugggaggaccacugccaguucagccgccccucccccaucggcuaccuggggcugcucagccagcggacccgcgacaucuacaucagccggcgccggcgcggcacguucaccuggacccuguccgacagcgagggcaaggacacccccgggggcuacugccugacgcgguggaugcucaucgaggccgagcugaagugcuucgggaacaccgccguggccaagugcaacgagaagcacgacgaggaguucugcgacaugcugcgccucuucgacuucugcaagcaggccauccagcggcugaaggcgccggcccagauguccauccagcugaucaacaaggccgucaacgcccucaucaacgaccagcugaucaugaagaaccaccuccgcgacaucaugggcauccccuacugcaacuacagcaaguacugguaccugaaccacaccaccacggggaagaccucccugcccaagugcuggcuggugagcaacggcuccuaccucaacgagacccacuucagcgacgacaucgagcagcaggccgacaacaugaucaccgagaugcugcagaaggaguacauggagcggcagggcaagacgccgcuggggcucguggaccuguucgucuucuccaccagcuucuaccugaucuccaucuuccugcaccucgugaagauccccacccaccgccacguggucggcaagagcugccccaagccccaccggcugaaccacauggggaucugcuccugcggccuguacgggcagccgggcgugcccgugaaguggaagcgcugaggacuaguaauaaggaaacuguaugaaugucugugggcaggaagugaagagauccuucuguaaagguuuuuggaauuaugucugcugaauaauaaacuuuuuugaaauaauaaaucugguagaaaaaugagaucucaaaggcucuuuucagagccaccaaaaaaaaaaaaaaaaaaaaaaaaaaaaaaaaaaaaaaaaaaaaaaaaaaaaaaaaaaaaaaaaagaauu

SEQ ID NO: 23936 - RNA, 1781 nt, Artificial Sequence
  mRNA product Design b-4 (hSL-A64-N5) comprising derived and/or modified sequence from MOPV/LASV reassortant(IGS-1;Clade IV)__AFY05576__GPCmut2 (opt1)
aggagagucccgcagucggcguccagcggcucugcuuguucgugugugugucguugcaggccuuauucaagcuuaccaugggccagaucgugaccuucuuccaggaggucccccacgugaucgaggaggugaugaacaucguccugaucgcccucagcgugcuggccgugcugaaggggcucuacaacuucgcgaccugcggccuggucgggcuggugacguuccuccugcugugcggccgcuccugcaccaccagccucuacaaggggguguacgagcugcagacccuggagcucaacauggagacgcugaacaugugcaugccgcuguccugcaccaagaacaacagccaccacuacaucauggucggcaacgagaccggccucgagcugacccugacgaacaccuccaucaucaaccacaaguucugcaaccucagcgacgcccacaagaagaaccuguacgaccacgcccugauguccaucaucagcaccuuccaccucuccauccccaacuucaaccaguacgaggccaugagcugcgacuucaacgggggcaagaucuccgugcaguacaaccugagccacuccuacgccggggacgcggccaaccacugcggcaccguggccaacgggguccugcagacguucaugcggauggccuggggcggcagcuacaucgcgcucgacuccgggcgcggcaacugggacugcaucaugaccagcuaccaguaccugaucauccagaacaccaccugggaggaccacugccaguucucccggcccagccccaucggguaccugggccuccugucccagcgcacgcgggacaucuacaucagccgccggcgccggggcaccuucaccuggacccugagcgacuccgagggggaggacacgccgggcggguacugccucacccgcuggaugcugaucgaggccgagcugaagugcuucggcaacaccgccguggccaagugcaacgagaagcacgacgaggaguucugcgacaugcuccggcuguucgacuucugcaagcaggccauccagcgccugaaggcgcccgcccagaugagcauccagcucaucaacaaggccgugaacgcccugaucaacgaccagcugaucaugaagaaccaccuccgggacaucauggggauccccuacugcaacuacuccaaguacugguaccugaaccacaccacgaccggccgcaccagccugcccaagugcuggcucgucuccaacggcagcuaccugaacgagacccacuucuccgacgacaucgagcagcaggccgacaacaugaucacggagaugcugcagaaggaguacauggagcggcaggggaagaccccgcucggccugguggaccuguucguguucagcaccuccuucuaccugaucagcaucuuccuccaccuggucaagauccccacccaccgccacaucguggggaaguccugccccaagccccaccggcugaaccacaugggcaucugcagcugcgggcucuacaagcagccgggcgugcccgucaaguggaagcgcugaggacuaguaauaaggaaacuguaugaaugucugugggcaggaagugaagagauccuucuguaaagguuuuuggaauuaugucugcugaauaauaaacuuuuuugaaauaauaaaucugguagaaaaaugagaucucaaaggcucuuuucagagccaccaaaaaaaaaaaaaaaaaaaaaaaaaaaaaaaaaaaaaaaaaaaaaaaaaaaaaaaaaaaaaaaaagaauu

SEQ ID NO: 23937 - RNA, 1781 nt, Artificial Sequence
  mRNA product Design b-4 (hSL-A64-N5) comprising derived and/or modified sequence from LASV(LM765-SLE-2012;Clade IV)__AIT17814__GPCmut2 (opt1)
aggagagucccgcagucggcguccagcggcucugcuuguucgugugugugucguugcaggccuuauucaagcuuaccaugggccagaucgugaccuucuuccaggaggucccccacgugaucgaggaggugaugaacaucguccugaucgcccucagcauccuggccgugcugaaggggcucuacaacuucgcgaccugcggccugguggggcuggucacguuccuccugcugugcggccgcuccugcaccaccagccucuacaaggggguguacgagcugcagacccuggagcucaacauggagacgcugaacaugugcaugccgcuguccugcaccaagaacaacagccaccacuacaucauggugggcaacgagaccggccucgagcugacccugacgaacaccuccaucaucgaccacaaguucugcaaccucagcgacgcccaccggaagaaccuguacgaccacgcccugauguccaucaucagcaccuuccaccucuccauccccaacuucaaccaguacgaggccaugagcugcgacuucaacgggggcaagaucuccguccaguacaaccugagccacuccuacgccaaggacgcggccgaccacugcgggaccguggccaacggcgugcugcagacguucaugcgcauggccuggggcgggagcuacaucgcgcucgacuccggccgggggcgcugggacugcaucaugaccagcuaccaguaccugaucauccagaacaccaccugggaggaccacugccaguucucccggcccagccccaucggcuaccuggggcuccugucccagcgcacgcgggacaucuacaucagccgccggcgccggggcaccuucaccuggacccugagcgacuccgagggcaaggacacgcccgggggcuacugccucacccgcuggaugcugaucgaggccgagcugaagugcuucgggaacaccgccgucgccaagugcaacgagaagcacgacgaggaguucugcgacaugcuccggcuguucgacuucugcaagcaggccauccagcgccugaaggcgccggcccagaugagcauccagcucaucaacaaggccgugaacgcccugaucaacgaccagcugaucaugaagaaccaccuccgggacaucaugggcauccccuacugcaacuacuccaaguacugguaccugaaccacaccacgaccgggaagaccagccugcccaagugcuggcucguguccaacggcagcuaccugaacgagacccacuucuccgacgacaucgagcagcaggccgacaacaugaucacggagaugcugcagaaggaguacauggagcgccagggcaagaccccgcucgggcuggucgaccuguucguguucagcaccuccuucuaccugaucagcaucuuccuccaccuggugaagauccccacccaccggcacaucgucggcaagcccugccccaagccgcaccgccugaaccacauggggaucugcuccugcggccucuacaagcagcccggggugcccgugaaguggaagcggugaggacuaguaauaaggaaacuguaugaaugucugugggcaggaagugaagagauccuucuguaaagguuuuuggaauuaugucugcugaauaauaaacuuuuuugaaauaauaaaucugguagaaaaaugagaucucaaaggcucuuuucagagccaccaaaaaaaaaaaaaaaaaaaaaaaaaaaaaaaaaaaaaaaaaaaaaaaaaaaaaaaaaaaaaaaaagaauu

SEQ ID NO: 23938 - RNA, 1781 nt, Artificial Sequence
  mRNA product Design b-4 (hSL-A64-N5) comprising derived and/or modified sequence from LASV(LM776-SLE-2012;Clade IV)__AIT17824__GPCmut2 (opt1)
aggagagucccgcagucggcguccagcggcucugcuuguucgugugugugucguugcaggccuuauucaagcuuaccaugggccagaucgugaccuucuuccaggaggucccccacgugaucgaggaggugaugaacaucguccugaucgcccucagcauccuggccgugcugaaggggcucuacaacuucgcgaccugcggccugguggggcuggucacguuccuccugcugugcggccgcuccugcaccaccagcguguacaaggggguguacgagcuccagacccuggagcugaacauggagacgcucaacaugugcaugccgcuguccugcaccaagaacaacagccaccacuacaucauggucggcaacgagaccggccuggagcucacccugacgaacaccuccaucaucaaccacaaguucugcaaccugagcgacgcccacaagaagaaccucuacgaccacgcccugauguccaucaucagcaccuuccaccuguccauccccaacuucaaccaguacgaggccaugagcugcgacuucaacgggggcaagaucuccgugcaguacaaccucagccacuccuacgccggggacgcggccaaccacugcggcaccguggccaacgggguccugcagacguucaugcggauggccuggggcggcagcuacaucgcgcuggacuccgggcacggcaagugggacugcaucaugaccagcuaccaguaccucaucauccagaacaccaccugggaggaccacugccaguucucccgccccagccccaucggguaccugggccugcucucccagcggacgcgcgacaucuacaucagccggcgccggcgcggcaccuucaccuggacccugagcgacuccgaggggaaggacacgccgggcggguacugccugacccgguggaugcucaucgaggccgagcugaagugcuucggcaacaccgccguggccaagugcaacgagaagcacgacgaggaguucugcgacaugcugcgccucuucgacuucugcaagcaggccauccagcggcugaaggcgcccgcccagaugagcauccagcugaucaacaaggccgugaacgcccucaucaacgaccagcugaucaugaagaaccaccuccgcgacaucauggggauccccuacugcaacuacuccaaguacugguaccugaaccacaccacgaccggcaagaccagccugcccaagugcuggcuggucuccaacggcagcuaccucaacgagacccacuucuccgacgacaucgagcagcaggccgacaacaugaucacggagaugcugcagaaggaguacauggagcggcaggggaagaccccgcugggccucguggaccuguucguguucagcaccuccuucuaccugaucagcaucuuccugcaccucgucaagauccccacccaccgccacaucguggggaaguccugccccaagccccaccggcugaaccacaugggcaucugcagcugcgggcuguacaagcagccgggcgugcccguccgcuggaagcggugaggacuaguaauaaggaaacuguaugaaugucugugggcaggaagugaagagauccuucuguaaagguuuuuggaauuaugucugcugaauaauaaacuuuuuugaaauaauaaaucugguagaaaaaugagaucucaaaggcucuuuucagagccaccaaaaaaaaaaaaaaaaaaaaaaaaaaaaaaaaaaaaaaaaaaaaaaaaaaaaaaaaaaaaaaaaagaauu

SEQ ID NO: 23939 - RNA, 1781 nt, Artificial Sequence
  mRNA product Design b-4 (hSL-A64-N5) comprising derived and/or modified sequence from LASV(Mad39;Clade IV)__ANH09722__GPCmut2 (opt1)
aggagagucccgcagucggcguccagcggcucugcuuguucgugugugugucguugcaggccuuauucaagcuuaccaugggccagaucgugaccuucuuccaggaggucccccacgugaucgaggaggugaugaacaucguccugaucgcccucagcauccuggccgugcugaaggggcucuacaacguggcgaccugcggccugaucgggcuggucacguuccuccugcugugcggccgcuccugcaccaccacccucuacaaggggguguacgagcugcaggcccuggagcucaacauggagacgcugaacaugugcaugccgcugagcugcaccaagaacaacucccaccacuacauccgggugggcaacgagaccggccucgagcugacccugacgaacaccagccucaucaaccacaaguucugcaaccuguccgacgcccacaagaagaaccuguacgaccacgcccucaugagcaucaucuccaccuuccaccugagcauccccaacuucaaccaguacgaggccauguccugcgacuucaacgacgggaagaucagcguccaguacaaccugucccacaccuacgcgggcgacacggccaaccacugcgggaccguggccaacggcgugcuccagaccuucaugcgcauggccuggggcgggagcuacaucgcgcuggacuccggccgcgggggcugggacugcaucaugaccagcuaccaguaccugaucauccagaacacgaccugggaggaccacugccaguucucccggcccagccccaucggguaccucggccugcugucccagcggacccgcgacaucuacaucagccggcgccggcgcggcaccuucacguggacccucuccgacagcgaggggaaggacaccccgggcggguacugccugacccgguggaugcugaucgaggccgagcucaagugcuucggcaacacggccgucgccaagugcaacgagaagcacgacgaggaguucugcgacaugcugcgccuguucgacuucugcaagcaggccauccagcggcucaaggcgcccgcccagaugagcauccagcugaucaacaaggccgugaacgcccugaucaacgaccagcucaucaugaagaaccaccuccgcgacaucauggggauccccuacugcaacuacuccaaguacugguaccugaaccacaccgugaccggcaagaccagccugcccaagugcuggcuggucuccaacggcagcuaccugaacgagacgcacuucuccgacgacaucgagcagcaggccgacaacaugaucaccgagaugcuccagaaggaguacauggagcggcaggggaagaccccgcugggccugguggaccuguucguguucagcaccuccuucuaccucaucagcaucuuccugcaccuggucaagauccccacgcaccgccacgugguggggaagcccugccccaagccgcaccggcucaaccacaugggcaucugcuccugcggguucuacaagcagcccggcguccccgugcgcuggaagcggugaggacuaguaauaaggaaacuguaugaaugucugugggcaggaagugaagagauccuucuguaaagguuuuuggaauuaugucugcugaauaauaaacuuuuuugaaauaauaaaucugguagaaaaaugagaucucaaaggcucuuuucagagccaccaaaaaaaaaaaaaaaaaaaaaaaaaaaaaaaaaaaaaaaaaaaaaaaaaaaaaaaaaaaaaaaaagaauu

SEQ ID NO: 23940 - RNA, 1781 nt, Artificial Sequence
  mRNA product Design b-4 (hSL-A64-N5) comprising derived and/or modified sequence from LASV(Z0947-SLE-2011;Clade IV)__AIT17840__GPCmut2 (opt1)
aggagagucccgcagucggcguccagcggcucugcuuguucgugugugugucguugcaggccuuauucaagcuuaccaugggccagaucgugaccuucuuccaggaggucccccacgugaucgaggaggugaugaacaucguccugaucgcccucagcauccuggccgugcugaaggggcucuacaacuucgcgaccugcggccugguggggcuggucacguuccuccugcugugcggccgcuccugcaccaucagccucuacaaggggguguacgagcugcagacccuggagcucaacauggagacccugaacaugugcaugccgcuguccugcacgaagaacaacagccaccacuacaucauggugggcaacgagaccggccucgagcugacccugaccaacacguccaucaucaaccacaaguucugcaaccucagcgacgcccacaagaagaaccuguacgaccacgcccugauguccaucaucagcaccuuccaccucuccauccccaacuucaaccaguacgaggccaugagcugcgacuucaacgggggcaagaucuccguccaguacaaccugagccacuccuacgccggggacgcggccaaccacugcggcaccguggccaacggggugcugcagaccuucaugcggauggccuggggcggcagcuacaucgcgcucgacuccgggcgcgaccggugggacugcaucaugacgagcuaccaguaccugaucauccagaacaccaccugggaggaccacugccaguucucccgccccagccccaucggcuaccuggggcuccugucccagcggacccgcgacaucuacaucagccggcgccggcgcggcacguucaccuggacccugagcgacuccgagggcaaggacacccccgggggcuacugccucacgcgguggaugcugaucgaggccgagcugaagugcuucgggaacaccgccgucgccaagugcaacgagaagcacgacgaggaguucugcgacaugcuccgccuguucgacuucugcaagcaggccauccagcggcugaaggcgccggcccagaugagcauccagcucaucaacaaggccgugaacgcccugaucaacgaccagcugaucaugaagaaccaccuccgcgacaucaugggcauccccuacugcaacuacuccaaguacugguaccugaaccacaccaccacggggaagaccagccugcccaagugcuggcucguguccaacggcagcuaccugaacgagacccacuucuccgacgacaucgagcagcaggccgacaacaugaucaccgagaugcugcagaaggaguacauggagcggcagggcaagacgccgcucgggcuggucgaccuguucguguucagcaccuccuucuaccugaucagcaucuuccuccaccuggugaagauccccacccaccgccacaucgucggcaagcccugccccaagccgcaccggcugaaccacauggggaucugcuccugcggccucuacaagcagcccggggugcccgugaaguggaagcgcugaggacuaguaauaaggaaacuguaugaaugucugugggcaggaagugaagagauccuucuguaaagguuuuuggaauuaugucugcugaauaauaaacuuuuuugaaauaauaaaucugguagaaaaaugagaucucaaaggcucuuuucagagccaccaaaaaaaaaaaaaaaaaaaaaaaaaaaaaaaaaaaaaaaaaaaaaaaaaaaaaaaaaaaaaaaaagaauu

SEQ ID NO: 23941 - RNA, 1781 nt, Artificial Sequence
  mRNA product Design b-4 (hSL-A64-N5) comprising derived and/or modified sequence from LASV(Josiah;Clade IV)__NP_694870__GPCmut2 (opt4)
aggagagucccgcagucggcguccagcggcucugcuuguucgugugugugucguugcaggccuuauucaagcuuaccaugggccagaucgugaccuucuuccaggaggugccccacgugaucgaggaggugaugaacaucgugcugaucgcccugagcgugcuggccgugcugaagggccuguacaacuucgccaccugcggccuggugggccuggugaccuuccugcugcugugcggcagaagcugcaccaccagccuguacaagggcguguacgagcugcagacccuggagcugaacauggagacccugaacaugugcaugccccugagcugcaccaagaacaacagccaccacuacaucauggugggcaacgagaccggccuggagcugacccugaccaacaccagcaucaucaaccacaaguucugcaaccugagcgacgcccacaagaagaaccuguacgaccacgcccugaugagcaucaucagcaccuuccaccugagcauccccaacuucaaccaguacgaggccaugagcugcgacuucaacggcggcaagaucagcgugcaguacaaccugagccacagcuacgccggcgacgccgccaaccacugcggcaccguggccaacggcgugcugcagaccuucaugagaauggccuggggcggcagcuacaucgcccuggacagcggcagaggcaacugggacugcaucaugaccagcuaccaguaccugaucauccagaacaccaccugggaggaccacugccaguucagcagacccagccccaucggcuaccugggccugcugagccagagaaccagagacaucuacaucagcagaagaagaagaggcaccuucaccuggacccugagcgacagcgagggcaaggacacccccggcggcuacugccugaccagauggaugcugaucgaggccgagcugaagugcuucggcaacaccgccguggccaagugcaacgagaagcacgacgaggaguucugcgacaugcugagacuguucgacuucugcaagcaggccauccagagacugaaggcccccgcccagaugagcauccagcugaucaacaaggccgugaacgcccugaucaacgaccagcugaucaugaagaaccaccugagagacaucaugggcauccccuacugcaacuacagcaaguacugguaccugaaccacaccaccaccggcagaaccagccugcccaagugcuggcuggugagcaacggcagcuaccugaacgagacccacuucagcgacgacaucgagcagcaggccgacaacaugaucaccgagaugcugcagaaggaguacauggagagacagggcaagaccccccugggccugguggaccuguucguguucagcaccagcuucuaccugaucagcaucuuccugcaccuggugaagauccccacccacagacacaucgugggcaagagcugccccaagccccacagacugaaccacaugggcaucugcagcugcggccuguacaagcagcccggcgugcccgugaaguggaagagaugaggacuaguaauaaggaaacuguaugaaugucugugggcaggaagugaagagauccuucuguaaagguuuuuggaauuaugucugcugaauaauaaacuuuuuugaaauaauaaaucugguagaaaaaugagaucucaaaggcucuuuucagagccaccaaaaaaaaaaaaaaaaaaaaaaaaaaaaaaaaaaaaaaaaaaaaaaaaaaaaaaaaaaaaaaaaagaauu

SEQ ID NO: 23942 - RNA, 1778 nt, Artificial Sequence
  mRNA product Design b-4 (hSL-A64-N5) comprising derived and/or modified sequence from LASV(LP;Clade I)__AAF86701__GPCmut2 (opt4)
aggagagucccgcagucggcguccagcggcucugcuuguucgugugugugucguugcaggccuuauucaagcuuaccaugggccagaucaucaccuucuuccaggaggugccccacgugaucgaggaggugaugaacaucgugcugaucgcccugagccugcuggccauccugaagggccuguacaacaucgccaccugcggcaucaucggccugguggccuuccuguuccugugcggcaagagcugcagccugacccugaagggcggcuacgagcugcagacccuggagcugaacauggagacccugaacaugugcaugccccugagcugcaccaagaacagcagccaccacuacaucagagugggcaacgagaccggccuggagcugacccugaccaacaccagcaucaucaaccacaaguucugcaaccugagcgacgcccacaagaagaaccuguacgaccacgcccugaugagcaucaucagcaccuuccaccugagcauccccaacuucaaccaguacgaggccaugagcugcgacuucaacggcggcaagaucagcgugcaguacaaccugagccacagcuacgccggcgacgccgccgagcacugcggcaccguggccaacggcgugcugcagaccuucaugagaauggccuggggcggcagauacaucgcccuggacagcggcaagggcaacugggacugcaucaugaccagcuaccaguaccugaucauccagaacaccaccugggaggaccacugccaguucagcagacccagccccaucggcuaccugggccugcugagccagagaaccagagacaucuacaucagcagaagaagaagaggcaccuucaccuggacccugagcgacagcgagggcaacgagacccccggcggcuacugccugaccagauggaugcugaucgaggccgagcugaagugcuucggcaacaccgccguggccaagugcaacgagaagcacgacgaggaguucugcgacaugcugagacuguucgacuucugcaagcaggccaucagaagacugaaggcccccgcccagaugagcauccagcugaucaacaaggccgugaacgcccugaucaacgaccagcugaucaugaagaaccaccugagagacaucaugggcauccccuacugcaacuacagcaaguacugguaccugaaccacaccagcagcggcagaaccagccugcccaagugcuggcugaucagcaacggcagcuaccugaacgagacccaguucagcgacgacaucgagcagcaggccgacaacaugaucaccgagaugcugcagaaggaguacaucgagagacagggcaagaccccccugggccugguggacaucuucaucuucagcaccagcuucuaccugaucagcaucuuccugcaccugaucaagauccccacccacagacacaucgugggcaagcccugccccaagccccacagacugaaccacaugggcgugugcagcugcggccuguacaagcaccccggcgugcccaccaaguggaagagaugaggacuaguaauaaggaaacuguaugaaugucugugggcaggaagugaagagauccuucuguaaagguuuuuggaauuaugucugcugaauaauaaacuuuuuugaaauaauaaaucugguagaaaaaugagaucucaaaggcucuuuucagagccaccaaaaaaaaaaaaaaaaaaaaaaaaaaaaaaaaaaaaaaaaaaaaaaaaaaaaaaaaaaaaaaaaagaauu

SEQ ID NO: 23943 - RNA, 1778 nt, Artificial Sequence
  mRNA product Design b-4 (hSL-A64-N5) comprising derived and/or modified sequence from LASV(803213;Clade II)__AAF86703__GPCmut2 (opt4)
aggagagucccgcagucggcguccagcggcucugcuuguucgugugugugucguugcaggccuuauucaagcuuaccaugggccagaucaucaccuucuuccaggaggugccccacgugaucgaggaggugaugaacaucgugcugaucgcccugagccugcuggccauccugaagggcaucuacaacguggccaccugcggccuguucggccugaucagcuuccugcugcugugcggcagaagcugcagcgugaccuacaagggcguguacgagcugcagacccuggagcugaacauggccaaccugaacaugugcaugccccugagcugcaccaagaacaacagccaccacuacaucauggugggcaacgagaccggccuggagcugacccugaccaacaccagcaucaucaaccacaaguucugcaaccugagcgacgcccacaagaagaaccuguacgaccacgcccugaugagcaucaucagcaccuuccaccugagcauccccaacuucaaccaguacgaggccaugagcugcgacuucaacggcggcaagaucagcgugcaguacaaccugagccacagcuucgccguggacgccgccaaccacugcggcaccaucgccaacggcgugcugcagaccuucaugagaauggccuggggcggcagcuacaucgcccuggacagcggcaagggcaacugggacugcaucaugaccagcuaccaguaccugaucauccagaacaccaccugggaggaccacugccaguucagcagacccagccccaucggcuaccugggccugcugagccagagaaccagagacaucuacaucagcagaagaagaagaggcaccuucaccuggacccugagcgacagcgagggcaacgaggcccccggcggcuacugccugaccagauggaugcugaucgaggccgagcugaagugcuucggcaacaccgccguggccaagugcaacgagaagcacgacgaggaguucugcgacaugcugagacuguucgacuucugcaagcaggccaucaagagacugaagacccccgcccagaugagcauccagcugaucaacaaggccgugaacgcccugaucaacgaccagcugaucaugaagaaccaccugagagacaucaugggcauccccuacugcaacuacagcagauacugguaccugaaccacaccgugaccggcaagaccagccugcccagaugcuggcuggugagcaacggcagcuaccugaacgagacccacuucagcgacgacaucgagcagcaggccgacaacaugaucaccgagaugcugcagaaggaguacauggacagacagggcaagaccccccugggccugguggaccuguucguguucagcaccagcuucuaccugaucagcaucuuccugcaccuggugaagauccccacccacagacacaucgugggcaagcccugccccaagccccacagacugaaccacaugggcaucugcagcugcggccuguacaagcaccccggcgugcccgugaaguggaagagaugaggacuaguaauaaggaaacuguaugaaugucugugggcaggaagugaagagauccuucuguaaagguuuuuggaauuaugucugcugaauaauaaacuuuuuugaaauaauaaaucugguagaaaaaugagaucucaaaggcucuuuucagagccaccaaaaaaaaaaaaaaaaaaaaaaaaaaaaaaaaaaaaaaaaaaaaaaaaaaaaaaaaaaaaaaaaagaauu

SEQ ID NO: 23944 - RNA, 1778 nt, Artificial Sequence
  mRNA product Design b-4 (hSL-A64-N5) comprising derived and/or modified sequence from LASV(GA391;Clade III)__CAA36645__GPCmut2 (opt4)
aggagagucccgcagucggcguccagcggcucugcuuguucgugugugugucguugcaggccuuauucaagcuuaccaugggccagaucgugaccuucuuccaggaggugccccacgugaucgaggaggugaugaacaucgugcugaucgcccugagcauccuggccauccugaagggccuguacaacguggccaccugcggccugaucggccuggugaccuuccugcugcugagcggcagaagcugcagccugaucuacaagggcaccuacgagcugcagacccuggagcugaacauggagacccugaacaugugcaugccccugagcugcaccaagaacaacagccaccacuacaucagagugggcaacgagaccggccuggagcugacccugaccaacaccagcauccugaaccacaaguucugcaaccugagcgacgcccacaagagaaaccuguacgaccacagccugaugagcaucaucagcaccuuccaccugagcauccccaacuucaaccaguacgaggccaugagcugcgacuucaacggcggcaagaucaccgugcaguacaaccugagccacagcuucgccguggacgccgccggccacugcggcacccuggccaacggcgugcugcagaccuucaugagaauggccuggggcggcagcuacaucgcccuggacagcggcagaggcaacugggacugcaucaugaccagcuaccaguaccugaucauccagaacaccaccugggacgaccacugccaguucagcagacccagccccaucggcuaccugggccugcugagccagagaaccagagacaucuacaucagcagaagaagaagaggcaccuucaccuggacccugagcgacagcgagggcaacgagacccccggcggcuacugccugaccagauggaugcugaucgaggccgagcugaagugcuucggcaacaccgccguggccaagugcaacgagaagcacgacgaggaguucugcgacaugcugagacuguucgacuucugcaagcaggccaucagaagacugaagacccccgcccagaugagcauccagcugaucaacaaggccgugaacgcccugaucaacgaccagcugaucaugaagaaccaccugagagacaucaugggcauccccuacugcaacuacagcagauacugguaccugaaccacaccagcaccggcaagaccagccugcccagaugcuggcugaucagcaacggcagcuaccugaacgagaccaaguucagcgacgacaucgagcagcaggccgacaacaugaucaccgagaugcugcagaaggaguacaucgacagacagggcaagaccccccugggccugguggaccuguucguguucagcaccagcuucuaccugaucagcaucuuccugcaccuggugaagauccccacccacagacacaucgugggcaagcccugccccaagccccacagacugaaccacaugggcaucugcagcugcggccuguacaagcagcccggcgugcccgugagauggaagagaugaggacuaguaauaaggaaacuguaugaaugucugugggcaggaagugaagagauccuucuguaaagguuuuuggaauuaugucugcugaauaauaaacuuuuuugaaauaauaaaucugguagaaaaaugagaucucaaaggcucuuuucagagccaccaaaaaaaaaaaaaaaaaaaaaaaaaaaaaaaaaaaaaaaaaaaaaaaaaaaaaaaaaaaaaaaaagaauu

SEQ ID NO: 23945 - RNA, 1781 nt, Artificial Sequence
  mRNA product Design b-4 (hSL-A64-N5) comprising derived and/or modified sequence from LASV(AV;Clade V)__CCA30314__GPCmut2 (opt4)
aggagagucccgcagucggcguccagcggcucugcuuguucgugugugugucguugcaggccuuauucaagcuuaccaugggccagaucgugaccuucuuccaggaggugccccacgugaucgaggaggugaugaacaucgugcugaucgcccugagcauccuggccgugcugaagggccuguacaacaucgccaccugcggccugaucggccugaucaccuuccugcugcugugcggcagaagcugcagcagcaaccuguacaagggcguguacgagcugcagagccuggaccugaacauggagacccugaacaugugcaugccccugagcugcaccaagaacaacagccaccacuacaucagagugggcaacgacaccggccuggagcugacccugaccaacaccagcauccugaaccacaaguucugcaaccugagcgacgcccacaagaaggaccuguacgaccacgcccugaugagcaucaucagcaccuuccaccugagcauccccaacuucaaccaguacgaggccaugagcugcgacuucaacggcggcaagaucagcgugcaguacaaccugagccacagcuacgccaucgacgccgccaaccacugcggcaccguggccaacggcauccugcagaccuucaugagaauggccuggggcggcagcuacaucgcccuggacagcggcagaggcaacugggacugcaucaugaccagcuaccaguaccugaucauccagaacaccaccugggagaaccacugccaguucagcagacccagccccaucggcuaccugggccugcugagccagagaaccagagacaucuacaucagcagaagaagaagaggcaccuucaccuggacccugagcgacagcgagggcaacgccacccccggcggcuacugccugaccagauggaugcugaucgaggccgagcugaagugcuucggcaacaccgccguggccaagugcaacgagaagcacgacgaggaguucugcgacaugcugagacuguucgacuucugcaagcaggccaucagcagacugaagagccccgcccagaugagcauccagcugaucaacaaggccgugaacgcccugaucaacgaccagcugaucaugaagaaccaccugagagacaucaugggcauccccuacugcaacuacagcaaguacugguaccugaaccacaccaucaccggcaagaccagccugcccaagugcuggcuggugagcaacggcagcuaccugaacgagacccacuucagcgacgacaucgagcagcaggccgacaacaugaucaccgagaugcugcagaaggaguacauggagagacagggcaagaccccccugggccugguggaccuguucguguucagcaccagcuucuaccugaucagcaucuuccugagacuggugaagauccccacccacagacacaucgugggcaagcccugccccaagccccacagacugaaccacaugggcaucugcagcugcggccuguacaagcagcccggcgugcccgugagauggaagagaugaggacuaguaauaaggaaacuguaugaaugucugugggcaggaagugaagagauccuucuguaaagguuuuuggaauuaugucugcugaauaauaaacuuuuuugaaauaauaaaucugguagaaaaaugagaucucaaaggcucuuuucagagccaccaaaaaaaaaaaaaaaaaaaaaaaaaaaaaaaaaaaaaaaaaaaaaaaaaaaaaaaaaaaaaaaaagaauu

SEQ ID NO: 23946 - RNA, 1778 nt, Artificial Sequence
  mRNA product Design b-4 (hSL-A64-N5) comprising derived and/or modified sequence from LASV(Togo/2016/7082;Clade VI)__AMR44577__GPCmut2 (opt4)
aggagagucccgcagucggcguccagcggcucugcuuguucgugugugugucguugcaggccuuauucaagcuuaccaugggccagaucaucaccuucuuccaggaggugccccacgugaucgaggaggugaugaacaucgugcugaucgcccugagccugcuggccauccugaagggcguguacaacguggccaccugcggcaucaucggccuggugaccuuccuguuccugugcggcagaagcugcagccugaucuacaagggcagcuacgagcugcagacccuggagcugaacauggagacccugaacaugugcaugccccugagcugcaccaagaacagcagccaccacuacaucagagugggcaacgagaccggccuggagcugacccugaccaacaccagcaucaucaaccacaaguucugcaaccugagcgacgcccacaagagaaaccuguacgaccacgcccugaugagcauccugagcaccuuccaccugagcauccccaacuucaaccaguacgaggccaugagcugcgacuucaacggcggcaagaucagcgugcaguacaaccugagccacgccuacgccguggacgccgccgagcacugcggcaccguggccaacggcgugcugcagaccuucaugagaauggccuggggcggcagcuacaucgcccuggacagcggcagaggcaacugggacugcaucaugaccagcuaccaguaccugaucauccagaacaccaccugggaggaccacugccaguucagcagacccagccccaucggcuaccugggccugcugagccagagaaccagagacaucuacaucagcagaagaagaagaggcaccuucaccuggacccugagcgacagcgagggcaacgagacccccggcggcuacugccugaccagauggaugcugaucgaggccgagcugaagugcuucggcaacaccgccguggccaagugcaacgagaagcacgacgaggaguucugcgacaugcugagacuguucgacuucugcaagcaggccauccagagacugaagagccccgcccagaugagcauccagcugaucaacaaggccgugaacgcccugaucaacgaccagcugaucaugaagaaccaccugagagacaugaugggcauccccuacugcaacuacagcaaguacugguaccugaaccacaccagcagcggcagaaccagccugcccaagugcuggcuggugagcaacggcagcuaccugaacgagacccacuucagcgacgacaucgagcagcaggccgacaacaugaucaccgagaugcugcagaaggaguacaucgacagacagggcaagaccccccugggccugguggaccuguucguguucagcaccagcuucuaccugaucagcaucuuccugcaccugaucaagauccccacccacagacacaucgugggcaagcccugccccaagccccacagacugaaccacaugggcaucugcagcugcggccuguacaagcagcccggcgugcccaccagauggaagagaugaggacuaguaauaaggaaacuguaugaaugucugugggcaggaagugaagagauccuucuguaaagguuuuuggaauuaugucugcugaauaauaaacuuuuuugaaauaauaaaucugguagaaaaaugagaucucaaaggcucuuuucagagccaccaaaaaaaaaaaaaaaaaaaaaaaaaaaaaaaaaaaaaaaaaaaaaaaaaaaaaaaaaaaaaaaaagaauu

SEQ ID NO: 23947 - RNA, 1778 nt, Artificial Sequence
  mRNA product Design b-4 (hSL-A64-N5) comprising derived and/or modified sequence from LASV(KAK-428;Clade n.d. (VII))__ANH09740__GPCmut2 (opt4)
aggagagucccgcagucggcguccagcggcucugcuuguucgugugugugucguugcaggccuuauucaagcuuaccaugggccagaucgugaccuucuuccaggaggugccccacgugaucgaggaggugaugaacaucgugcugaucgcccugagccugcuggccauccugaagggccuguacaacuucgccaccugcggcgugaucggccugaucaccuuccugcugcugugcggcagaagcugcagcgccaccuacaagggccaguacgagcugcagacccuggagcugaacauggagagccugaacaugugcaugccccugagcugcaccaagaacaacagccaccacuacaucagagccggcaacaacaccggccuggagcugacccugaccaacaccagcaucaucagccacaaguucugcaaccugagcgacgcccacaagaagaaccuguacgaccacacccugaugagcaucaucaccaccuuccaccugagcauccccaacuucaaccaguacgaggccaugagcugcgacuucaacggcggcaagaucagcauccaguacaaccugagccacagcuacgccggcgacgccgcccagcacugcggcaccguggccaacggcgugcugcagaccuucaugagaauggccuggggcggcagcuaccuggcccuggacagcggcagaagaggcugggacugcaucaucagcagcuaccaguaccugaucauccagaacaccaccugggacgaccacugccaguucagcagacccagccccaucggcuaccugggcuucgugagccagaagaccagagacaucuacaucagcagaagaagaagaggcaccuucaccuggacccugagcgacagcgagggccacgacaugcccggcggcuacugccugaccagauggaugcugaucgaggccgaccugaagugcuucggcaacaccgccguggccaagugcaacgagaagcacgacgaggaguucugcgacauguggagacuguucgacuucugcaagcaggccauccagagacugaaggcccccgcccagaugaacauccagcugaucaacaaggccgugaacgcccugaucaacgaccagcugaugaugaagaaccaccugagagacaucaugggcauccccuacugcaacuacagcaaguucugguaccugaacaacaccaccaccggcagaaccagccugcccagaugcuggcugaucagcaacggcagcuaccugaacgagacccacuucagcgacgacaucgagcagcaggccgacaacaugaucaccgagaugcugcagaaggaguacauggacagacagggcaagaccccccugggccugguggaccuguucguguucagcaccagcuucuaccugaucaccaucuuccugcaccuggugaagauccccacccacagacacaucgugggcaagcccugccccaagccccacagacugaaccacaugggcaucugcagcugcggccuguacaagcagcccggcgugcccgugagauggaagagaugaggacuaguaauaaggaaacuguaugaaugucugugggcaggaagugaagagauccuucuguaaagguuuuuggaauuaugucugcugaauaauaaacuuuuuugaaauaauaaaucugguagaaaaaugagaucucaaaggcucuuuucagagccaccaaaaaaaaaaaaaaaaaaaaaaaaaaaaaaaaaaaaaaaaaaaaaaaaaaaaaaaaaaaaaaaaagaauu

SEQ ID NO: 23948 - RNA, 1778 nt, Artificial Sequence; identical to SEQ ID NO: 23942
  mRNA product Design b-4 (hSL-A64-N5) comprising derived and/or modified sequence from LASV(Pinneo-NIG-1969;Clade I)__AIT17836__GPCmut2 (opt4)

SEQ ID NO: 23949 - RNA, 1778 nt, Artificial Sequence
  mRNA product Design b-4 (hSL-A64-N5) comprising derived and/or modified sequence from LASV(ISTH0009-NIG-2011;Clade II)__AIT17404__GPCmut2 (opt4)
aggagagucccgcagucggcguccagcggcucugcuuguucgugugugugucguugcaggccuuauucaagcuuaccaugggccagaucaucaccuucuuccaggaggugccccacgugaucgaggaggugaugaacaucgugcugaucgcccugagccugcuggccauccugaagggcaucuacaacguggccaccugcggccuguucggccuggugagcuuccugcugcugugcggcagaagcugcagcaccaccuacaagggcguguacgagcugcagacccuggagcuggacauggccagccugaacaugugcaugccccugagcugcaccaagaacaacagccaccacuacaucauggugggcaacgagaccggccuggagcugacccugaccaacaccagcaucaucaaccacaaguucugcaaccugagcgacgcccacaagaagaaccuguacgaccacgcccugaugagcaucaucagcaccuuccaccugagcauccccaacuucaaccaguacgaggccaugagcugcgacuucaacggcggcaagaucagcgugcaguacaaccugagccacgccuacgccguggacgccgccaaccacugcggcaccaucgccaacggcgugcugcagaccuucaugagaauggccuggggcggcagcuacaucgcccuggacagcggcaagggcagcugggacugcaucaugaccagcuaccaguaccugaucauccagaacaccaccugggaggaccacugccaguucagcagacccagccccaucggcuaccugggccugcugagccagagaaccagagacaucuacaucagcagaagaagaagaggcaccuucaccuggacccugagcgacagcgagggcaacgagacccccggcggcuacugccugaccagauggaugcugaucgaggccgagcugaagugcuucggcaacaccgccguggccaagugcaacgagaagcacgacgaggaguucugcgacaugcugagacuguucgacuucugcaagcaggccaucagaagacugaagacccccgcccagaugagcauccagcugaucaacaaggccgugaacgcccugaucaacgaccagcugaucaugaagaaccaccugagagacaucaugggcauccccuacugcaacuacagcaaguacugguaccugaaccacaccgugaccggcaagaccagccugcccagaugcuggcuggugagcaacggcagcuaccugaacgagacccacuucagcgacgacaucgagcagcaggccgacaacaugaucaccgagcugcugcagaaggaguacauggacagacagggcaagaccccccugggccugguggaccuguucguguucagcaccagcuucuaccugaucagcaucuuccugcaccugaucaagauccccacccacagacacaucaccggcaagcccugccccaagccccacagacugaaccacaugggcaucugcagcugcggccuguacaagcaccccggcgugcccgugaaguggaagagaugaggacuaguaauaaggaaacuguaugaaugucugugggcaggaagugaagagauccuucuguaaagguuuuuggaauuaugucugcugaauaauaaacuuuuuugaaauaauaaaucugguagaaaaaugagaucucaaaggcucuuuucagagccaccaaaaaaaaaaaaaaaaaaaaaaaaaaaaaaaaaaaaaaaaaaaaaaaaaaaaaaaaaaaaaaaaagaauu

SEQ ID NO: 23950 - RNA, 1778 nt, Artificial Sequence
  mRNA product Design b-4 (hSL-A64-N5) comprising derived and/or modified sequence from LASV(ISTH2010-NIG-2012;Clade II)__AIT17482__GPCmut2 (opt4)
aggagagucccgcagucggcguccagcggcucugcuuguucgugugugugucguugcaggccuuauucaagcuuaccaugggccagaucaucaccuucuuccaggaggugccccacgugaucgaggaggugaugaacaucgugcugaucgcccugagccugcuggccauccugaagggcaucuacaacguggccaccugcggccuguucggccuggugagcuuccugcugcugugcggcagaagcugcagcaccaccuacaagggcguguacgagcugcagacccuggagcuggacauggccagccugaacaugugcaugccccugagcugcaccaagaacaacagccaccacuacaucauggugggcaacgagaccggccuggagcugacccugaccaacaccagcaucaucaaccacaaguucugcaaccugagcgacgcccacaagaagaaccuguacgaccacgcccugaugagcaucaucagcaccuuccaccugagcauccccaacuucaaccaguacgaggccaugagcugcgacuucaacggcggcaagaucagcgugcaguacaaccugagccacgccuacgccguggacgccgccaaccacugcggcaccaucgccaacggcgugcugcagaccuucaugagaauggccuggggcggcagcuacaucgcccuggacagcggcaagggcagcugggacugcaucaugaccagcuaccaguaccugaucauccagaacaucaccugggaggaccacugccaguucagcagacccagccccaucggcuaccugggccugcugagccagagaaccagagacaucuacaucagcagaagaagaagaggcaccuucaccuggacccugagcgacagcgagggcaacgagacccccggcggcuacugccugaccagauggaugcugaucgaggccgagcugaagugcuucggcaacaccgccguggccaagugcaacgagaagcacgacgaggaguucugcgacaugcugagacuguucgacuucugcaagcaggccaucagaagacugaagacccccgcccagaugagcauccagcugaucaacaaggccgugaacgcccugaucaacgaccagcugaucaugaagaaccaccugagagacaucaugggcauccccuacugcaacuacagcaaguacugguaccugaaccacaccgugaccggcaagaccagccugcccagaugcuggcuggugagcaacggcagcuaccugaacgagacccacuucagcgacgacaucgagcagcaggccgacaacaugaucaccgagcugcugcagaaggaguacaucgacagacagggcaagaccccccugggccugguggaccuguucguguucagcaccagcuucuaccugaucagcaucuuccugcaccuggugaagauccccacccacagacacguggugggcaagcccugccccaagccccacagacugaaccacaugggcaucugcagcugcggccuguacaagcaccccggcgugcccgugaaguggaagagaugaggacuaguaauaaggaaacuguaugaaugucugugggcaggaagugaagagauccuucuguaaagguuuuuggaauuaugucugcugaauaauaaacuuuuuugaaauaauaaaucugguagaaaaaugagaucucaaaggcucuuuucagagccaccaaaaaaaaaaaaaaaaaaaaaaaaaaaaaaaaaaaaaaaaaaaaaaaaaaaaaaaaaaaaaaaaagaauu

SEQ ID NO: 23951 - RNA, 1778 nt, Artificial Sequence
  mRNA product Design b-4 (hSL-A64-N5) comprising derived and/or modified sequence from LASV(Lassa virus/H.sapiens-wt/NGA/2015/ISTH_0543;Clade II)__AVO03639__GPCmut2 (opt4)
aggagagucccgcagucggcguccagcggcucugcuuguucgugugugugucguugcaggccuuauucaagcuuaccaugggccagaucaucaccuucuuccaggaggugccccacgugaucgaggaggugaugaacaucgugcugaucgcccugagccugcuggccauccugaagggcaucuacaacguggccaccugcggccuguucggccuggugagcuuccugcugcugugcggcagaagcugcagcaccaccuacaagggcguguacgagcugcagacccuggagcuggacauggccaaccugaacaugugcaugccccugagcugcaccaagaacaacagccaccacuacaucauggugggcaacgagaccggccuggagcugacccugaccaacaccagcaucaucaaccacaaguucugcaaccugagcgacgcccacaagaagaaccuguacgaccacgcccugaugagcaucaucagcaccuuccaccugagcauccccaacuucaaccaguacgaggccaugagcugcgacuucaacggcggcaagaucagcgugcaguacaaccugagccacaccuacgccguggacgccgccaaccacugcggcaccaucgccaacggcgugcugcagaccuucaugagaauggccuggggcggcagcuacaucgcccuggacagcggcaagggcagcugggacugcaucaugaccagcuaccaguaccuggugauccagaacaccaccugggaggaccacugccaguucagcagacccagccccaucggcuaccugggccugcugagccagagaaccagagacaucuacaucagcagaagaagaagaggcaccuucaccuggacccugagcgacagcgagggcaacgagacccccggcggcuacugccugaccagauggaugcugaucgaggccgagcugaagugcuucggcaacaccgccguggccaagugcaacgagaagcacgacgaggaguucugcgacaugcugagacuguucgacuucugcaagcaggccaucagaagacugaagacccccgcccagaugagcauccagcugaucaacaaggccgugaacgcccugaucaacgaccagcugaucaugaagaaccaccugagagacaucaugggcauccccuacugcaacuacagcaaguacugguaccugaaccacaccgugaccggcaagaccagccugcccagaugcuggcuggugagcaacggcagcuaccugaacgagacccacuucagcgacgacaucgagcagcaggccgacaacaugaucaccgagcugcugcagaaggaguacaucgacagacagggcaagaccccccugggccugguggaccuguucguguucagcaccagcuucuaccugaucagcaucuuccugcaccuggugaagauccccacccacagacacaucaccggcaagcccugccccaagccccacagacugaaccacaugggcaucugcagcugcggccuguacaagcaccccggcgugcccgugaaguggaagagaugaggacuaguaauaaggaaacuguaugaaugucugugggcaggaagugaagagauccuucuguaaagguuuuuggaauuaugucugcugaauaauaaacuuuuuugaaauaauaaaucugguagaaaaaugagaucucaaaggcucuuuucagagccaccaaaaaaaaaaaaaaaaaaaaaaaaaaaaaaaaaaaaaaaaaaaaaaaaaaaaaaaaaaaaaaaaagaauu

SEQ ID NO: 23952 - RNA, 1778 nt, Artificial Sequence
  mRNA product Design b-4 (hSL-A64-N5) comprising derived and/or modified sequence from LASV(Lassa virus/H.sapiens-wt/NGA/2016/ISTH_0009;Clade II)__AVO03571__GPCmut2 (opt4)
aggagagucccgcagucggcguccagcggcucugcuuguucgugugugugucguugcaggccuuauucaagcuuaccaugggccagaucaucaccuucuuccaggaggugccccacgugaucgaggaggugaugaacaucgugcugaucgcccugagccugcuggccauccugaagggcaucuacaacguggccaccugcggccugcugggccuggugagcuuccugcugcugugcggcagaagcugcagcaccaccuacaagggcguguacgagcugcagacccuggagcuggacauggccagccugaacaugugcaugccccugagcugcaccaagaacaacagccaccacuacaucauggugggcaacgagaccggccuggagcugacccugaccaacaccagcaucaucaaccacaaguucugcaaccugagcgacgcccacaagaagaaccuguacgaccacgcccugaugagcaucaucagcaccuuccaccugagcauccccaacuucaaccaguacgaggccaugagcugcgacuucaacggcggcagaaucagcgugcaguacaaccugagccacagcuacgccguggacgccgccaaccacugcggcaccaucgccaacggcgugcugcagaccuucaugagaauggccuggggcggcagcuacaucgcccuggacagcggcaagggcagcugggacugcaucaugaccagcuaccaguaccugaucauccagaacaccaccugggaggaccacugccaguucagcagacccagccccaucggcuaccugggccugcugagccagagaaccagagacaucuacaucagcagaagaagaagaggcaccuucaccuggacccugagcgacagcgagggcaacgagacccccggcggcuacugccugaccagauggaugcugaucgaggccgagcugaagugcuucggcaacaccgccguggccaagugcaacgagaagcacgacgaggaguucugcgacaugcugagacuguucgacuucugcaagcaggccaucagaagacugaagacccccgcccagaugagcauccagcugaucaacaaggccgugaacgcccugaucaacgaccagcugaucaugaagaaccaccugagagacaucaugggcauccccuacugcaacuacagcaaguacugguaccugaaccacaccgugaccggcaagaccagccugcccagaugcuggcuggugagcaacggcagcuaccugaacgagacccacuucagcgacgacaucgagcagcaggccgacaacaugaucaccgagcugcugcagaaggaguacaucgacagacagggcaagaccccccugggccugguggaccuguucguguucagcaccagcuucuaccugaucagcaucuuccugcaccuggugaagauccccacccacagacacaucaccggcaagcccugccccaagccccacagacugaaccacaugggcaucugcagcugcggccuguacaaccaccccggcgugcccgugaaguggaagagaugaggacuaguaauaaggaaacuguaugaaugucugugggcaggaagugaagagauccuucuguaaagguuuuuggaauuaugucugcugaauaauaaacuuuuuugaaauaauaaaucugguagaaaaaugagaucucaaaggcucuuuucagagccaccaaaaaaaaaaaaaaaaaaaaaaaaaaaaaaaaaaaaaaaaaaaaaaaaaaaaaaaaaaaaaaaaagaauu

SEQ ID NO: 23953 - RNA, 1778 nt, Artificial Sequence
  mRNA product Design b-4 (hSL-A64-N5) comprising derived and/or modified sequence from LASV(Lassa virus/H.sapiens-wt/NGA/2016/ISTH_0017;Clade II)__AVO03567__GPCmut2 (opt4)
aggagagucccgcagucggcguccagcggcucugcuuguucgugugugugucguugcaggccuuauucaagcuuaccaugggccagaucaucaccuucuuccaggaggugccccacgugaucgaggaggugaugaacaucgugcugaucgcccugagccugcuggccauccugaagggcaucuacaacguggccaccugcggccuguucggccuggugagcuuccugcugcugugcggcagaagcugcagcaccaccuacaagggcguguacgagcugcagacccuggagcuggacauggccagccugaacaugugcaugccccugagcugcaccaagaacaacagccaccacuacaucauggugggcaacgagaccggccuggagcugacccugaccaacaccagcaucaucaaccacaaguucugcaaccugagcgacgcccacaagaagaaccuguacgaccacgcccugaugagcaucaucagcaccuuccaccugagcauccccaacuucaaccaguacgaggccaugagcugcgacuucaacggcggcaagaucagcgugcaguacaaccugagccacaccuacgccaucgacgccgccaaccacugcggcaccaucgccaacggcgugcugcagaccuucaugagaauggccuggggcggcagcuacaucgcccuggacagcggcaagggcagcugggacugcaucaugaccagcuaccaguaccugaucauccagaacaccaccugggaggaccacugccaguucagcagacccagccccaucggcuaccugggccugcugagccagagaaccagagacaucuacaucagcagaagaagaagaggcaccuucaccuggacccugagcgacagcgagggcaacgagacccccggcggcuacugccugaccagauggaugcugaucgaggccgagcugaagugcuucggcaacaccgccguggccaagugcaacgagaagcacgacgaggaguucugcgacaugcugagacuguucgacuucugcaagcaggccaucagaagacugaagacccccgcccagaugagcauccagcugaucaacaaggccgugaacgcccugaucaacgaccagcugaucaugaagaaccaccugagagacaucaugggcauccccuacugcaacuacagcaaguacugguaccugaaccacaccgugaccggcaagaccagccugcccagaugcuggcuggugagcaacggcagcuaccugaacgagacccacuucagcgacgacaucgagcagcaggccgacaacaugaucaccgagcugcugcagaaggaguacauggacagacagggcaagaccccccugggccugguggaccuguucguguucagcaccagcuucuaccugaucagcaucuuccugcaccuggugagaauccccacccacagacacgugaucggcaagcccugccccaagccccacagacugaaccacaugggcaucugcagcugcggccuguacaagcaccccggcgugcccgugaaguggaagagaugaggacuaguaauaaggaaacuguaugaaugucugugggcaggaagugaagagauccuucuguaaagguuuuuggaauuaugucugcugaauaauaaacuuuuuugaaauaauaaaucugguagaaaaaugagaucucaaaggcucuuuucagagccaccaaaaaaaaaaaaaaaaaaaaaaaaaaaaaaaaaaaaaaaaaaaaaaaaaaaaaaaaaaaaaaaaagaauu

SEQ ID NO: 23954 - RNA, 1778 nt, Artificial Sequence
  mRNA product Design b-4 (hSL-A64-N5) comprising derived and/or modified sequence from LASV(Lassa virus/H.sapiens-wt/NGA/2018/ISTH_0959;Clade II)__AVV65099__GPCmut2 (opt4)
aggagagucccgcagucggcguccagcggcucugcuuguucgugugugugucguugcaggccuuauucaagcuuaccaugggccagaucaucaccuucuuccaggaggugccccacgugaucgaggaggugaugaacaucgugcugaucgcccugagccugcuggccauccugaagggcaucuacaacguggugaccugcggccuguucggccuggugagcuuccugcugcugugcggcagaagcugcagcaccaccuacaagggcguguacgagcugcagacccuggagcuggacauggccagccugaacaugugcaugccccugagcugcaccaagaacaacagccaccacuacaucauggugggcaacgagaccggccuggagcugacccugaccaacaccagcaucaucaaccacaaguucugcaaccugagcgacgcccacaagaagaaccuguacgaccacgcccugaugagcaucaucagcaccuuccaccugagcauccccaacuucaaccaguacgaggccaugagcugcgacuucaacggcggcaagaucagcgugcaguacaaccugagccacgccuacgccaucgacgccgccaaccacugcggcaccaucgccaacggcgugcugcagaccuucaugagaauggccuggggcggcagcuacaucgcccuggacagcggcaagggcagcugggacugcaucaugaccagcuaccaguaccugaucauccagaacaccaccugggaggaccacugccaguucagcagacccagccccaucggcuaccugggccugcugagccagagaaccagagacaucuacaucagcagaagaagaagaggcaccuucaccuggacccugagcgacagcgagggcaacgagacccccggcggcuacugccugaccagauggaugcugaucgaggccgagcugaagugcuucggcaacaccgccguggccaagugcaacgagaagcacgacgaggaguucugcgacaugcugagacuguucgacuucugcaagcaggccaucagaagacugaagacccccgcccagaugagcauccagcugaucaacaaggccgugaacgcccugaucaacgaccagcugaucaugaagaaccaccugagagacaucaugggcauccccuacugcaacuacagcaaguacugguaccugaaccacaccgugaccggcaagaccagccugcccagaugcuggcuggugagcaacggcagcuaccugaacgagacccacuucagcgacgacaucgagcagcaggccgacaacaugaucaccgagcugcugcagaaggaguacaucgacagacagggcaagaccccccugggccugguggaccuguucguguucagcaccagcuucuaccugaucagcaucuuccugcaccuggugaagauccccacccacagacacgugaucggcaagcccugccccaagccccacagacugaaccacaugggcaucugcagcugcggccuguacaagcaccccggcgugcccgugaaguggaagagaugaggacuaguaauaaggaaacuguaugaaugucugugggcaggaagugaagagauccuucuguaaagguuuuuggaauuaugucugcugaauaauaaacuuuuuugaaauaauaaaucugguagaaaaaugagaucucaaaggcucuuuucagagccaccaaaaaaaaaaaaaaaaaaaaaaaaaaaaaaaaaaaaaaaaaaaaaaaaaaaaaaaaaaaaaaaaagaauu

SEQ ID NO: 23955 - RNA, 1778 nt, Artificial Sequence
  mRNA product Design b-4 (hSL-A64-N5) comprising derived and/or modified sequence from LASV(LASV003-NIG-2008;Clade II)__AIT17580__GPCmut2 (opt4)
aggagagucccgcagucggcguccagcggcucugcuuguucgugugugugucguugcaggccuuauucaagcuuaccaugggccagaucaucaccuucuuccaggaggugccccacgugaucgaggaggugaugaacaucgugcugaucgcccugagccugcuggccauccugaagggcaucuacaacguggccaccugcggccuguucggccuggugagcuuccugcugcugugcggcagaagcugcagcaccaccuacaagggcguguacgagcugcagacccuggagcuggacauggccagccugaacaugugcaugccccugagcugcaccaagaacaacagccaccacuacaucauggugggcaacgagaccggccuggagcugacccugaccaacaccagcaucaucaaccacaaguucugcaaccugagcgacgcccacaagaagaaccuguacgaccacgcccugaugagcaucaucagcaccuuccaccugagcauccccaacuucaaccaguacgaggccaugagcugcgacuucaacggcggcaagaucagcgugcaguacaaccugagccacaccuacgccguggacgccgccaaccacugcggcaccaucgccaacggcgugcugcagaccuucaugagaauggccuggggcggcagcuacaucgcccuggacagcggcaagggcagcugggacugcaucaugaccagcuaccaguaccugaucauccagaacaccaccugggaggaccacugccaguucagcagacccagccccaucggcuaccugggccugcugagccagagaaccagagacaucuacaucagcagaagaagaagaggcaccuucaccuggacccugagcgacagcgagagcaacgagacccccggcggcuacugccugaccagauggaugcugaucgaggccgagcugaagugcuucggcaacaccgccguggccaagugcaacgagaagcacgacgaggaguucugcgacaugcugagacuguucgacuucugcaagcaggccaucagaagacugaaggcccccgcccagaugagcauccagcugaucaacaaggccgugaacgcccugaucaacgaccagcugaucaugaagaaccaccugagagacaucaugggcauccccuacugcaacuacagcaaguacugguaccugaaccacaccgugaccggcagaaccagccugcccagaugcuggcuggugagcaacggcagcuaccugaacgagacccacuucagcgacgacaucgagcagcaggccgacaacaugaucaccgagcugcugcagaaggaguacauggacagacagggcaagaccccccugggccugguggaccuguucguguucagcaccagcuucuaccugaucagcaucuuccugcaccuggugaagauccccacccacagacacgugaucggcaagcccugccccaagccccacagacugaaccacaugggcaucugcagcugcggccuguacaagcaccccggcgugcccgugaaguggaagagaugaggacuaguaauaaggaaacuguaugaaugucugugggcaggaagugaagagauccuucuguaaagguuuuuggaauuaugucugcugaauaauaaacuuuuuugaaauaauaaaucugguagaaaaaugagaucucaaaggcucuuuucagagccaccaaaaaaaaaaaaaaaaaaaaaaaaaaaaaaaaaaaaaaaaaaaaaaaaaaaaaaaaaaaaaaaaagaauu

SEQ ID NO: 23956 - RNA, 1778 nt, Artificial Sequence
  mRNA product Design b-4 (hSL-A64-N5) comprising derived and/or modified sequence from LASV(LASV035-NIG-2009;Clade II)__AIT17588__GPCmut2 (opt4)
aggagagucccgcagucggcguccagcggcucugcuuguucgugugugugucguugcaggccuuauucaagcuuaccaugggccagaucaucaccuucuuccaggaggugccccacgugaucgaggaggugaugaacaucgugcugaucgcccugagccugcuggccauccugaagggcaucuacaacguggccaccugcggccuguucggccuggugagcuuccugcugcugugcggcagaagcugcagcaccaccuacaagggcguguacgagcugcagacccuggagcuggacauggccagccugaacaugugcaugccccugagcugcaccaagaacaacagccaccacuacaucauggugggcaacgagaccggccuggagcugacccugaccaacaccagcaucaucaaccacaaguucugcaaccugagcgacgcccacaagaagaaccuguacgaccacgcccugaugagcaucaucagcaccuuccaccugagcauccccaacuucaaccaguacgaggccaugagcugcgacuucaacggcggcaagaucagcgugcaguacaaccugagccacgccuacgccguggacgccgccaaccacugcggcaccaucgccaacggcgugcugcagaccuucaugagaauggccuggggcggcagcuacaucgcccuggacagcggcaagggcagcugggacugcaucaugaccagcuaccaguaccugaucauccagaacaccaccugggaggaccacugccaguucagcagacccagccccaucggcuaccugggccugcugagccagagaaccagagacaucuacaucagcagaagaagaagaggcaccuucaccuggacccugagcgacagcgagggcaacgagacccccggcggcuacugccugaccagauggaugcugaucgaggccgagcugaagugcuucggcaacaccgccguggccaagugcaacgagaagcacgacgaggaguucugcgacaugcugagacuguucgacuucugcaagcaggccaucagaagacugaaggcccccgcccagaugagcauccagcugaucaacaaggccgugaacgcccugaucaacgaccagcugaucaugaagaaccaccugagagacaucaugggcauccccuacugcaacuacagcaaguacugguaccugaaccacaccgugaccggcaagaccagccugcccagaugcuggcuggugagcaacggcagcuaccugaacgagacccacuucagcgacgacaucgagcagcaggccgacaacaugaucaccgagcugcugcagaaggaguacaucgacagacagggcaagaccccccugggccugguggaccuguucguguucagcaccagcuucuaccugaucagcaucuuccugcaccuggugaagauccccacccacagacacgugaucggcaagcccugccccaagccccacagacugaaccacaugggcaucugcagcugcggccuguacaagcaccccggcgugcccgugaaguggaagagaugaggacuaguaauaaggaaacuguaugaaugucugugggcaggaagugaagagauccuucuguaaagguuuuuggaauuaugucugcugaauaauaaacuuuuuugaaauaauaaaucugguagaaaaaugagaucucaaaggcucuuuucagagccaccaaaaaaaaaaaaaaaaaaaaaaaaaaaaaaaaaaaaaaaaaaaaaaaaaaaaaaaaaaaaaaaaagaauu

SEQ ID NO: 23957 - RNA, 1778 nt, Artificial Sequence
  mRNA product Design b-4 (hSL-A64-N5) comprising derived and/or modified sequence from LASV(LASV1000-NIG-2009;Clade II)__AIT17782__GPCmut2 (opt4)
aggagagucccgcagucggcguccagcggcucugcuuguucgugugugugucguugcaggccuuauucaagcuuaccaugggccagaucaucaccuucuuccaggaggugccccacgugaucgaggaggugaugaacaucgugcugaucgcccugagccugcuggccauccugaagggcaucuacaacguggccaccugcggccuguucggccuggugagcuuccugcugcugugcggcagaagcugcagcaccaccuacaagggcguguacgagcugcagacccuggagcuggacauggccagccugaacaugugcaugccccugagcugcaccaagaacaacagccaccacuacaucauggugggcaacgagaccggccuggagcugacccugaccaacaccagcaucaucaaccacaaguucugcaaccugagcgacgcccacaagaagaaccuguacgaccacgcccugaugagcaucaucagcaccuuccaccugagcauccccaacuucaaccaguacgaggccaugagcugcgacuucaacggcggcaagaucagcgugcaguacaaccugagccacaccuacgccguggacgccgccaaccacugcggcaccaucgccaacggcgugcugcagaccuucaugagaauggccuggggcggcagcuacaucgcccuggacagcggcaagggcagcugggacugcaucaugaccagcuaccaguaccugaucauccagaacaccaccugggaggaccacugccaguucagcagacccagccccaucggcuaccugggccugcugagccagagaaccagagacaucuacaucagcagaagaagaagaggcaccuucaccuggacccugagcgacagcgagggcaacgagacccccggcggcuacugccugaccagauggaugcugaucgaggccgagcugaagugcuucggcaacaccgccguggccaagugcaacgagaagcacgacgaggaguucugcgacaugcugagacuguucgacuucugcaagcaggccaucaagagacugaagacccccgcccagaugagcauccagcugaucaacaaggccgugaacgcccugaucaacgaccagcugaucaugaagaaccaccugagagacaucaugggcauccccuacugcaacuacagcaaguacugguaccugaaccacaccgugaccggcaagaccagccugcccagaugcuggcuggugagcaacggcagcuaccugaacgagacccacuucagcgacgacaucgagcagcaggccgacaacaugaucaccgagcugcugcagaaggaguacaucgacagacagggcaagaccccccugggccugguggaccuguucguguucagcaccagcuucuaccugaucagcaucuuccugcaccuggugaagauccccacccacagacacguggugggcaagcccugccccaagccccacagacugaaccacaugggcaucugcagcugcggccuguacaagcaccccggcgugcccgugaaguggaagagaugaggacuaguaauaaggaaacuguaugaaugucugugggcaggaagugaagagauccuucuguaaagguuuuuggaauuaugucugcugaauaauaaacuuuuuugaaauaauaaaucugguagaaaaaugagaucucaaaggcucuuuucagagccaccaaaaaaaaaaaaaaaaaaaaaaaaaaaaaaaaaaaaaaaaaaaaaaaaaaaaaaaaaaaaaaaaagaauu

SEQ ID NO: 23958 - RNA, 1778 nt, Artificial Sequence
  mRNA product Design b-4 (hSL-A64-N5) comprising derived and/or modified sequence from LASV(LASV221-NIG-2010;Clade II)__AIT17624__GPCmut2 (opt4)
aggagagucccgcagucggcguccagcggcucugcuuguucgugugugugucguugcaggccuuauucaagcuuaccaugggccagaucaucaccuucuuccaggaggugccccacgugaucgaggaggugaugaacaucgugcugaucgcccugagccugcuggccauccugaagggcaucuacaacguggccaccugcggccuguucggccuggugagcuuccugcugcugugcggcagaagcugcagcaccaccuacaagggcguguacgagcugcagacccuggagcuggacauggccagccugaacaugugcaugccccugagcugcaccaagaacaacagccaccacuacaucauggugggcaacgagaccggccuggagcugacccugaccaacaccagcaucaucaaccacaaguucugcaaccugagcgacgcccacaagaagaaccuguacgaccacgcccugaugagcaucaucagcaccuuccaccugagcauccccaacuucaaccaguacgaggccaugagcugcgacuucaacggcggcaagaucagcgugcaguacaaccugagccacaccuacgccaucgacgccgccaaccacugcggcaccaucgccaacggcgugcugcagaccuucaugagaauggccuggggcggcagcuacaucgcccuggacagcggcaagggcagcugggacugcaucaugaccagcuaccaguaccugaucauccagaacaccaccugggaggaccacugccaguucagcagacccagccccaucggcuaccugggccugcugagccagagaaccagagacaucuacaucagcagaagaagaagaggcaccuucaccuggacccugagcgacagcgagggcaacgagacccccggcggcuacugccugaccagauggaugcugaucgaggccgagcugaagugcuucggcaacaccgccguggccaagugcaacgagaagcacgacgaggaguucugcgacaugcugagacuguucgacuucugcaagcaggccaucagaagacugaagacccccgcccagaugagcauccagcugaucaacaaggccgugaacgcccugaucaacgaccagcugaucaugaagaaccaccugagagacaucaugggcauccccuacugcaacuacagcaaguacugguaccugaaccacaccgugaccggcaagaccagccugcccagaugcuggcuggugagcaacggcagcuaccugaacgagacccacuucagcgacgacaucgagcagcaggccgacaacaugaucaccgagaugcugcagaaggaguacauggacagacagggcaagaccccccugggccugguggaccuguucguguucagcaccagcuucuaccugaucagcaucuuccugcaccuggugaagauccccacccacagacacgugaucggcaagcccugccccaagccccacagacugaaccacaugggcaucugcagcugcggccuguacaagcaccccggcgugcccgugaaguggaagagaugaggacuaguaauaaggaaacuguaugaaugucugugggcaggaagugaagagauccuucuguaaagguuuuuggaauuaugucugcugaauaauaaacuuuuuugaaauaauaaaucugguagaaaaaugagaucucaaaggcucuuuucagagccaccaaaaaaaaaaaaaaaaaaaaaaaaaaaaaaaaaaaaaaaaaaaaaaaaaaaaaaaaaaaaaaaaagaauu

SEQ ID NO: 23959 - RNA, 1778 nt, Artificial Sequence
  mRNA product Design b-4 (hSL-A64-N5) comprising derived and/or modified sequence from LASV(LASV237-NIG-2010;Clade II)__AIT17638__GPCmut2 (opt4)
aggagagucccgcagucggcguccagcggcucugcuuguucgugugugugucguugcaggccuuauucaagcuuaccaugggccagaucaucaccuucuuccaggaggugccccacgugaucgaggaggugaugaacaucgugcugaucgcccugagccugcuggccauccugaagggcaucuacaacguggccaccugcggccuguucggccuggugagcuuccugcugcugugcggcagaagcugcagcaccaccuacaagggcguguacgagcugcagacccuggagcuggacauggccagccugaacaugugcaugccccugagcugcaccaagaacaacagccaccacuacaucauggugggcaacgagaccggccuggagcugacccugaccaacaccagcaucaucaaccacaaguucugcaaccugagcgacgcccacaagaaggaccuguacgaccacgcccugaugagcaucaucagcaccuuccaccugagcauccccaacuucaaccaguacgaggccaugagcugcgacuucaacggcggcaagaucagcgugcaguacaaccugagccacaccuacgccguggacgccgccaaccacugcggcaccaucgccaacggcgugcugcagaccuucaugagaauggccuggggcggcagcuacaucgcccuggacagcggcaagggcagcugggacugcaucaugaccagcuaccaguaccugaucauccagaacaccaccugggaggaccacugccaguucagcagacccagccccaucggcuaccugggccugcugagccagagaaccagagacaucuacaucagcagaagaagaagaggcaccuucaccuggacccugagcgacagcgagggcaacgagacccccggcggcuacugccugaccagauggaugcugaucgaggccgagcugaagugcuucggcaacaccgccguggccaagugcaacgagaagcacgacgaggaguucugcgacaugcugagacuguucgacuucugcaagcaggccaucagaagacugaagacccccgcccagaugagcauccagcugaucaacaaggccgugaacgcccugaucaacgaccagcugaucaugaagaaccaccugagagacaucaugggcauccccuacugcaacuacagcaaguacugguaccugaaccacaccgugaccggcaagaccagccugcccagaugcuggcuggugagcaacggcagcuaccugaacgagacccacuucagcgacgacaucgagcagcaggccgacaacaugaucaccgagcugcugcagaaggaguacauggacagacagggcaagaccccccugggccugguggaccuguucguguucagcaccagcuucuaccugaucagcaucuuccugcaccugaucaagauccccacccacagacacaucaccggcaagcccugccccaagccccacagacugaaccacaugggcaucugcagcugcggccuguacaagcaccccggcgugcccgugaaguggaagagaugaggacuaguaauaaggaaacuguaugaaugucugugggcaggaagugaagagauccuucuguaaagguuuuuggaauuaugucugcugaauaauaaacuuuuuugaaauaauaaaucugguagaaaaaugagaucucaaaggcucuuuucagagccaccaaaaaaaaaaaaaaaaaaaaaaaaaaaaaaaaaaaaaaaaaaaaaaaaaaaaaaaaaaaaaaaaagaauu

SEQ ID NO: 23960 - RNA, 1778 nt, Artificial Sequence
  mRNA product Design b-4 (hSL-A64-N5) comprising derived and/or modified sequence from LASV(LASV253-NIG-2011;Clade II)__AIT17670__GPCmut2 (opt4)
aggagagucccgcagucggcguccagcggcucugcuuguucgugugugugucguugcaggccuuauucaagcuuaccaugggccagaucaucaccuucuuccaggaggugccccacgugaucgaggaggugaugaacaucgugcugaucgcccugagccugcuggccauccugaagggcaucuacaacguggccaccugcggccuguucggccuggugagcuuccugcugcugugcggcagaagcugcagcaccaccuacaagggcguguacgagcugcagacccuggagcuggacauggccagccugaacaugugcaugccccugagcugcaccaagaacaacagccaccacuacaucauggugggcaacgagaccggccuggagcugacccugaccaacaccagcaucaucaaccacaaguucugcaaccugagcgacgcccacaagaagaaccuguacgaccacgcccugaugagcaucaucagcaccuuccaccugagcauccccaacuucaaccaguacgaggccaugagcugcgacuucaacggcggcaagaucagcgugcaguacaaccugagccacaccuacgccguggacgccgccaaccacugcggcaccaucgccaacggcgugcugcagaccuucaugagaauggccuggggcggcagcuacaucgcccuggacagcggcaagggcagcugggacugcaucaugaccagcuaccaguaccugaucauccagaacaccaccugggaggaccacugccaguucagcagacccagccccaucggcuaccugggccugcugagccagagaaccagagacaucuacaucagcagaagaagaagaggcaccuucaccuggacccugagcgacagcgagggcaacgagacccccggcggcuacugccugaccagauggaugcugaucgaggccgagcugaagugcuucggcaacaccgccguggccaagugcaacgagaagcacgacgaggaguucugcgacaugcugagacuguucgacuucugcaagcaggccaucagaagacugaaggcccccgcccagaugagcauccagcugaucaacaaggccgugaacgcccugaucaacgaccagcugaucaugaagaaccaccugagagacaucaugggcauccccuacugcaacuacagcaaguacugguaccugaaccacaccgugaccggcagaaccagccugcccagaugcuggcuggugagcaacggcagcuaccugaacgagacccacuucagcgacgacaucgagcagcaggccgacaacaugaucaccgagcugcugcagaaggaguacaucgacagacagggcaagaccccccugggccugguggaccuguucguguucagcaccagcuucuaccugaucagcaucuuccugcaccuggugaagauccccacccacagacacaucaucggcaagcccugccccaagccccacagacugaaccacaugggcaucugcagcugcggccuguacaagcaccccggcgugcccgugaaguggaagagaugaggacuaguaauaaggaaacuguaugaaugucugugggcaggaagugaagagauccuucuguaaagguuuuuggaauuaugucugcugaauaauaaacuuuuuugaaauaauaaaucugguagaaaaaugagaucucaaaggcucuuuucagagccaccaaaaaaaaaaaaaaaaaaaaaaaaaaaaaaaaaaaaaaaaaaaaaaaaaaaaaaaaaaaaaaaaagaauu

SEQ ID NO: 23961 - RNA, 1778 nt, Artificial Sequence
  mRNA product Design b-4 (hSL-A64-N5) comprising derived and/or modified sequence from LASV(LASV254-NIG-2011;Clade II)__AIT17674__GPCmut2 (opt4)
aggagagucccgcagucggcguccagcggcucugcuuguucgugugugugucguugcaggccuuauucaagcuuaccaugggccagaucaucaccuucuuccaggaggugccccacgugaucgaggaggugaugaacaucgugcugaucgcccugagccugcuggccauccugaagggcaucuacaacguggccaccugcggccuguucggccuggugagcuuccugcugcugugcggcagaagcugcagcaccaccuacaagggcguguacgagcugcagacccuggagcuggacaugaccaaccugaacaugugcaugccccugagcugcaccaagaacaacagccaccacuacaucauggugggcaacgagaccggccuggagcugacccugaccaacaccagcaucaucaaccacaaguucugcaaccugagcgacgcccacaagaagaaccuguacaaccacgcccugaugagcaucaucagcaccuuccaccugagcauccccaacuucaaccaguacgaggccaugagcugcgacuucaacggcggcaagaucagcgugcaguacaaccugagccacagcuacgccguggacgccgccaaccacugcggcaccaucgccaacggcgugcugcagaccuucaugagaauggccuggggcggcagcuacaucgcccuggacagcggcaagggcaacugggacugcaucaugaccagcuaccaguaccugaucauccagaacaccaccugggaggaccacugccaguucagcagacccagccccaucggcuaccugggccugcugagccagagaaccagagacaucuacaucagcagaagaagaagaggcaccuucaccuggacccugagcgacagcgagggcaacgagacccccggcggcuacugccugaccagauggaugcugaucgaggccgagcugaagugcuucggcaacaccgccguggccaagugcaacgagaagcacgacgaggaguucugcgacaugcugagacuguucgacuucugcaagcaggccaucagaagacugaagacccccgcccaggccaacauccagcugaucaacaaggccgugaacgcccugaucaacgaccagcugaucaugaagaaccaccugagagacaucaugggcauccccuacugcaacuacagcaaguacugguaccugaaccacaccgugaccggcaagaccagccugcccagaugcuggcuggugagcaacggcagcuaccugaacgagacccacuucagcgacgacaucgagcagcaggccgacaacaugaucaccgagcugcugcagaaggaguacauggacagacagggcaagaccccccugggccugguggaccuguucguguucagcaccagcuucuaccugaucagcaucuuccugcaccuggugaagauccccacccacagacacgugaucggcaagcccugccccaagccccacagacugaaccacaugggcaucugcagcugcggccuguacaagcaccccggcgugcccgugaaguggaagagaugaggacuaguaauaaggaaacuguaugaaugucugugggcaggaagugaagagauccuucuguaaagguuuuuggaauuaugucugcugaauaauaaacuuuuuugaaauaauaaaucugguagaaaaaugagaucucaaaggcucuuuucagagccaccaaaaaaaaaaaaaaaaaaaaaaaaaaaaaaaaaaaaaaaaaaaaaaaaaaaaaaaaaaaaaaaaagaauu

SEQ ID NO: 23962 - RNA, 1778 nt, Artificial Sequence
  mRNA product Design b-4 (hSL-A64-N5) comprising derived and/or modified sequence from LASV(Nig08-A19;Clade III)__ADU56618__GPCmut2 (opt4)
aggagagucccgcagucggcguccagcggcucugcuuguucgugugugugucguugcaggccuuauucaagcuuaccaugggccagaucgugaccuucuuccaggaggugccccacgugaucgaggaggugaugaacaucgugcugaucgcccugagcauccuggccauccugaagggccuguacaacaucgccaccugcggccugaucggccuggugaccuuccugcugcugagcggcagaagcugcagcaugaccuacaagggcguguacgagcugcagacccuggagcugaacaugaacacccugaacaugugcaugccccugagcugcaccaagaacaacagccaccacuacaucauggugggcaacgagaccggccuggagcugacccugaccaacaccagccugcugcaccacaaguucugcaaccugagcgacgcccacaagaagaaccuguacgaccacacccugaugagcaucaucagcaccuuccaccugagcauccccaacuucaaccaguacgaggccaugagcugcgacuucaacggcggcaagaucaccgugcaguacaaccugagccacagcuacgccaucgacgccgccaaccacugcggcaccguggccaacggcgugcugcagaccuucaugagaauggccuggggcggcagcuacaucgcccuggacagcggcagaggcaagugggacugcaucaugaccagcuaccaguaccugaucauccagaacaccaccugggaggaccacugccaguucagcagacccagccccaucggcuaccugggccugcugagccagagaaccagagacaucuacaucagcagaagaagaagaggcaccuucaccuggacccugagcgacagcgagggcaacgagacccccggcggcuacugccugaccagauggaugcugaucgaggccgagcugaagugcuucggcaacaccgccguggccaagugcaacgagaagcacgacgaggaguucugcgacaugcugagacuguucgacuucugcaagcaggccaucagaagacugaaggcccccgcccagaugagcauccagcugaucaacaaggccgugaacgcccugaucaacgaccagcugaucaugaagaaccaccugagagacaucaugggcauccccuacugcaacuacagcaaguacugguaccugaaccacaccagcaccggcagaaccagccugcccagaugcuggcuggugagcaacggcagcuaccugaacgagacccacuucagcgacgacaucgagcagcaggccgacaacaugaucaccgagaugcugcagaaggaguaccuggacagacagggcaagaccccccugggccugguggaccuguucguguucagcaccagcuucuaccugaucagcaucuuccugcaccuggugaagauccccacccacagacacaucgugggcaagcccugccccaagccccacagacugaaccacaugggcaucugcagcugcggccuguacaagcagcccggcgugcccgugagauggaagagaugaggacuaguaauaaggaaacuguaugaaugucugugggcaggaagugaagagauccuucuguaaagguuuuuggaauuaugucugcugaauaauaaacuuuuuugaaauaauaaaucugguagaaaaaugagaucucaaaggcucuuuucagagccaccaaaaaaaaaaaaaaaaaaaaaaaaaaaaaaaaaaaaaaaaaaaaaaaaaaaaaaaaaaaaaaaaagaauu

SEQ ID NO: 23963 - RNA, 1781 nt, Artificial Sequence
  mRNA product Design b-4 (hSL-A64-N5) comprising derived and/or modified sequence from LASV(G1180-SLE-2010;Clade IV)__AIT17168__GPCmut2 (opt4)
aggagagucccgcagucggcguccagcggcucugcuuguucgugugugugucguugcaggccuuauucaagcuuaccaugggccagaucgugaccuucuuccaggaggugccccacgugaucgaggaggugaugaacaucgugcugaucgcccugagcauccuggccgugcugaagggccuguacaacuucgccaccugcggccuggugggccugcugaccuuccugcugcugugcggcagaagcugcaccgccagcagauacaagggcguguacgagcugcagacccuggagcugaacauggagacccugaacaugugcaugccccugagcugcaccaagaacaacagccaccacuacaucauggugggcaacgagaccggccuggagcugacccugaccaacaccagcaucaucaaccacaaguucugcaaccugagcgacgcccacaagaagaaccuguacgaccacgcccugaugagcaucaucagcaccuuccaccugagcauccccaacuucaaccaguacgaggccaugagcugcgacuucaacggcggcaagaucagcgugcaguacaaccugagccacagcuacgccggcgacgccgccaaccacugcggcaccguggccaacggcgugcugcagaccuucaugagaauggccuggggcggcagcuacaucgcccuggacagcggccacggcagcugggacugcaucaugaccagcuaccaguaccugaucauccagaacaccaccugggaggaccacugccaguucagcagacccagccccaucggcuaccugggccugcugagccagagaaccagagacaucuacaucagcagaagaagaagaggcaccuucaccuggacccugagcgacagcgagggcaaggacacccccggcggcuacugccugaccagauggaugcugaucgaggccgagcugaagugcuucggcaacaccgccguggccaagugcaacgagaagcacgacgaggaguucugcgacaugcugagacuguucgacuucugcaagcaggccauccagagacugaaggcccccgcccagaugagcauccagcugaucaacaaggccgugaacgcccugaucaacgaccagcugaucaugaagaaccaccugagagacaucaugggcauccccuacugcaacuacagcaaguacugguaccugaaccacaccaccaccggcaagaccagccugcccaagugcuggcuggugagcaacggcagcuaccugaacgagacccacuucagcgacgacaucgagcagcaggccgacaacaugaucaccgagaugcugcagaaggaguacauggagagacagggcaagaccccccugggccugguggaccuguucguguucagcaccagcuucuaccugaucagcaucuuccugcaccuggugaagauccccacccacagacacaucgugggcaagagcugccccaagccccacagacugaaccacaugggcaucugcagcugcggccuguacaagcagcccggcgugcccgugaaguggaagagaugaggacuaguaauaaggaaacuguaugaaugucugugggcaggaagugaagagauccuucuguaaagguuuuuggaauuaugucugcugaauaauaaacuuuuuugaaauaauaaaucugguagaaaaaugagaucucaaaggcucuuuucagagccaccaaaaaaaaaaaaaaaaaaaaaaaaaaaaaaaaaaaaaaaaaaaaaaaaaaaaaaaaaaaaaaaaagaauu

SEQ ID NO: 23964 - RNA, 1781 nt, Artificial Sequence
  mRNA product Design b-4 (hSL-A64-N5) comprising derived and/or modified sequence from LASV(G1442-SLE-2011;Clade IV)__AIT17180__GPCmut2 (opt4)
aggagagucccgcagucggcguccagcggcucugcuuguucgugugugugucguugcaggccuuauucaagcuuaccaugggccagaucgugaccuucuuccaggaggugccccacgugaucgaggaggugaugaacaucgugcugaucgcccugagcauccuggccgugcugaagggccuguacaacguggccaccugcggccugaucggccuggugaccuuccugcugcugugcggcagaagcugcaccaccacccuguacaagggcguguacgagcugcagacccuggagcugaacauggagacccugaacaugugcaugccccugagcugcaccaagaacaacagccaccacuacaucagagugggcaacgagaccggccuggagcugacccugaccaacaccagcaucaucaaccacaaguucugcaaccugagcgacgcccacaagaagaaccuguacgaccacgcccugaugagcaucaucagcaccuuccaccugagcauccccaacuucaaccaguacgaggccaugagcugcgacuucaacggcggcaagaucagcgugcaguacaaccugagccacagcuacgccggcgacgccgccaaccacugcggcaccguggccaacggcgugcugcagaccuucaugagaauggccuggggcggcagcuacaucgcccuggacagcggcagaggcaacugggacugcaucaugaccagcuaccaguaccugaucauccagaacaccaccugggacgaccacugccaguucagcagacccagccccaucggcuaccugggccugcugagccagagaaccagagacguguacaucagcagaagaagaagaggcaccuucaccuggacccugagcgacagcgagggcaaggacacccccggcggcuacugccugaccagauggaugcugaucgaggccgagcugaagugcuucggcaacaccgccguggccaagugcaacgagaagcacgacgaggaguucugcgacaugcugagacuguucgacuucugcaagcaggccauccagagacugaaggcccccgcccagaugagcauccagcugaucaacaaggccgugaacgcccugaucaacgaccagcugaucaugaagaaccaccugagagacaucaugggcauccccuacugcaacuacagcaaguacugguaccugaacaacaccgccaccggcaagaccagccugcccaagugcuggcugaucagcaacggcagcuaccugaacgagacccacuucagcgacgacaucgagcaggaggccgacaacaugaucaccgagaugcugcagaaggaguacauggagagacagggcaagaccccccugggccugguggaccuguucguguucagcaccagcuucuaccugaucagcaucuuccugcaccuggugaagauccccacccacagacacaucgugggcaagagcugccccaagccccacagacugaaccacaugggcaucugcagcugcggccuguacaagcagcccggcgugcccgugagauggaagagaugaggacuaguaauaaggaaacuguaugaaugucugugggcaggaagugaagagauccuucuguaaagguuuuuggaauuaugucugcugaauaauaaacuuuuuugaaauaauaaaucugguagaaaaaugagaucucaaaggcucuuuucagagccaccaaaaaaaaaaaaaaaaaaaaaaaaaaaaaaaaaaaaaaaaaaaaaaaaaaaaaaaaaaaaaaaaagaauu

SEQ ID NO: 23965 - RNA, 1781 nt, Artificial Sequence
  mRNA product Design b-4 (hSL-A64-N5) comprising derived and/or modified sequence from LASV(G3010-SLE-2013;Clade IV)__AIT17344__GPCmut2 (opt4)
aggagagucccgcagucggcguccagcggcucugcuuguucgugugugugucguugcaggccuuauucaagcuuaccaugggccagaucgugaccuucuuccaggaggugccccacgugaucgaggaggugaugaacaucgugcugaucgcccugagcauccuggccgugcugaagggccuguacaacuucgccaccugcggccuggugggccuggugaccuuccugcugcugugcggcagaagcugcaccaccagccuguacaagggcguguacgagcugcagacccuggagcugaacauggagacccugaacaugugcaugccccugagcugcaccaagaacaacagccaccacuacaucauggugggcaacgagaccggccuggagcugacccugaccaacaccagcaucaucaaccacaaguucugcaaccugagcgacgcccacaagaagaaccuguacaaccacgcccugaugagcaucaucagcaccuuccaccugagcauccccaacuucaaccaguacgaggccaugagcugcgacuucaacggcggcaagaucagcgugcaguacaaccugagccacagcuacgccggcgacgccgccagccacugcggcaccguggccaacggcgugcugcagaccuucaugagaauggccuggggcggcagcuacaucgcccuggacagcggcuacggcaagugggacugcaucaugaccagcuaccaguaccugaucauccagaacaccaccugggaggaccacugccaguucagcagacccagccccaucggcuaccugggccugcugagccagagaaccagagacaucuacaucagcagaagaagaagaggcaccuucaccuggacccugagcgacagcgagggcaaggacacccccggcggcuacugccugaccagauggaugcugaucgaggccgagcugaagugcuucggcaacaccgccguggccaagugcaacgagaagcacgacgaggaguucugcgacaugcugagacuguucgacuucugcaagcaggccauccagagacugaagacccccgcccagaugagcauccagcugaucaacaaggccgugaacgcccugaucaacgaccagcugaucaugaagaaccaccugagagacaucaugggcauccccuacugcaacuacagcaaguacugguaccugaaccacaccaccaccggcaagaccagccugcccaagugcuggcuggugagcaacggcagcuaccugaacgagacccacuucagcgacgacaucgagcagcaggccgacaacaugaucaccgagaugcugcagaaggaguacauggagagacagggcaagaccccccugggccugguggaccuguucguguucagcaccagcuucuaccugaucagcaucuuccugcaccuggugaagauccccacccacagacacaucgugggcaagagcugccccaagccccacagacugaaccacaugggcaucugcagcugcggccuguacaagcagcccggcgugcccgugagauggaagagaugaggacuaguaauaaggaaacuguaugaaugucugugggcaggaagugaagagauccuucuguaaagguuuuuggaauuaugucugcugaauaauaaacuuuuuugaaauaauaaaucugguagaaaaaugagaucucaaaggcucuuuucagagccaccaaaaaaaaaaaaaaaaaaaaaaaaaaaaaaaaaaaaaaaaaaaaaaaaaaaaaaaaaaaaaaaaagaauu

SEQ ID NO: 23966 - RNA, 1781 nt, Artificial Sequence
  mRNA product Design b-4 (hSL-A64-N5) comprising derived and/or modified sequence from LASV(G502-SLE-2009;Clade IV)__AIT17126__GPCmut2 (opt4)
aggagagucccgcagucggcguccagcggcucugcuuguucgugugugugucguugcaggccuuauucaagcuuaccaugggccagaucgugaccuucuuccaggaggugccccacgugaucgaggaggugaugaacaucgugcugaucgcccugagcauccuggccgugcugaagggccuguacaacuucgccaccugcggccuggugggccugcugaccuuccugcugcugugcggcagaagcugcaccaccggccuguacaagggcguguacgagcugcagacccuggagcugaacauggagacccugaacaugugcaugccccugagcugcaccaagaacaacagccaccacuacaucauggugggcaacgagaccggccuggagcugacccugaccaacaccagcaucaucaaccacaaguucugcaaccugagcgacgcccacaagaagaaccuguacgaccacgcccugaugagcaucaucagcaccuuccaccugagcauccccaacuucaaccaguacgaggccaugagcugcgacuucaacggcggcaagaucagcgugcaguacaaccugagccacagcuacgccggcgacgccgccgaccacugcggcaccguggccaacggcgugcugcagaccuucaugagaauggccuggggcggcagcuacaucgcccuggacagcggcagaggcagaugggacugcaucaugaccagcuaccaguaccugaucauccagaacaccaccugggaggaccacugccaguucagcagacccagccccaucggcuaccugggccugcugagccagagaaccagagacaucuacaucagcagaagaagaagaggcaccuucaccuggacccugagcgacagcgagggcaaggacacccccggcggcuacugccugaccagauggaugcugaucgaggccgagcugaagugcuucggcaacaccgccguggccaagugcaacgagaagcacgacgaggaguucugcgacaugcugagacuguucgacuucugcaagcaggccauccagagacugaaggcccccgcccagaugagcauccagcugaucaacaaggccgugaacgcccugaucaacgaccagcuggugaugaagaaccaccugagagacaucaugggcauccccuacugcaacuacagcagauacugguaccugaaccacaccaccaccggcagaaccagccugcccaagugcuggcuggugagcaacggcagcuaccugaacgagacccacuucagcgacgacaucgagcagcaggccgacaacaugaucaccgagaugcugcagaaggaguacauggagagacagggcaagaccccccugggccugguggaccuguucguguucagcaccagcuucuaccugaucagcaucuuccugcaccuggugaagauccccacccacagacacaucgugggcaagagcugccccaagccccacagacugaaccacaugggcaucugcagcugcggccuguacaagcagcccggcgugcccgugaaguggaagagaugaggacuaguaauaaggaaacuguaugaaugucugugggcaggaagugaagagauccuucuguaaagguuuuuggaauuaugucugcugaauaauaaacuuuuuugaaauaauaaaucugguagaaaaaugagaucucaaaggcucuuuucagagccaccaaaaaaaaaaaaaaaaaaaaaaaaaaaaaaaaaaaaaaaaaaaaaaaaaaaaaaaaaaaaaaaaagaauu

SEQ ID NO: 23967 - RNA, 1781 nt, Artificial Sequence
  mRNA product Design b-4 (hSL-A64-N5) comprising derived and/or modified sequence from LASV(G733-SLE-2010;Clade IV)__AIT17154__GPCmut2 (opt4)
aggagagucccgcagucggcguccagcggcucugcuuguucgugugugugucguugcaggccuuauucaagcuuaccaugggccagaucgugaccuucuuccaggaggugccccacgugaucgaggaggugaugaacaucgugcugaucgcccugagcauccuggccgugcugaagggccuguacaacuucgccaccugcggcaucgugggccuggugagcuuccugcugcugugcggcagaagcugcaccaccagccuguacaagggcguguacgagcugcagacccuggagcugaacauggagacccugaacaugugcaugccccugagcugcaccaagaacaacagccaccacuacaucauggugggcaacgagaccggccuggagcugacccugaccaacaccagcaucaucaaccacaaguucugcaaccugagcgacgcccacaagaagaaccuguacgaccacgcccugaugagcaucaucagcaccuuccaccugagcauccccaacuucaaccaguacgaggccaugagcugcgacuucaacggcggcaagaucagcgugcaguacaaccugagccacagcuacgccggcgacgccgccaaccacugcggcaccaucgccaacggcgugcugcagaccuucaugagaauggccuggggcggcagcuacaucgcccuggacagcggcagagacagaugggacugcaucaugaccagcuaccaguaccugaucauccagaacaccaccugggaggaccacugccaguucagcagacccagccccaucggcuaccugggccugcugagccagagaaccagagacaucuacaucagcagaagaagaagaggcaccuucaccuggacccugagcgacagcgagggcaaggacacccccggcggcuacugccugaccagauggaugcugaucgaggccgagcugaagugcuucggcaacaccgccguggccaagugcaacgagaagcacgacgaggaguucugcgacaugcugagacuguucgacuucugcaagcaggccauccagagacugaaggcccccgcccagaugagcauccagcugaucaacaaggccgugaacgcccugaucaacgaccagcugaucaugaagaaccaccugagagacaucaugggcauccccuacugcaacuacagcaaguacugguaccugaaccacaccaccaccggcaagaccagccugcccaagugcuggcuggugagcaacggcagcuaccugaacgagacccacuucagcgacgacaucgagcagcaggccgacaacaugaucaccgagaugcugcagaaggaguacauggagagacagggcaagaccccccugggccugguggaccuguucguguucagcaccagcuucuaccugaucagcaucuuccugcaccuggugaagauccccacccacagacacguggugggcaagagcugccccaagccccacagacugaaccacaugggcaucugcagcugcggccuguacggccagcccggcgugcccgugaaguggaagagaugaggacuaguaauaaggaaacuguaugaaugucugugggcaggaagugaagagauccuucuguaaagguuuuuggaauuaugucugcugaauaauaaacuuuuuugaaauaauaaaucugguagaaaaaugagaucucaaaggcucuuuucagagccaccaaaaaaaaaaaaaaaaaaaaaaaaaaaaaaaaaaaaaaaaaaaaaaaaaaaaaaaaaaaaaaaaagaauu

SEQ ID NO: 23968 - RNA, 1781 nt, Artificial Sequence
  mRNA product Design b-4 (hSL-A64-N5) comprising derived and/or modified sequence from MOPV/LASV reassortant(IGS-1;Clade IV)__AFY05576__GPCmut2 (opt4)
aggagagucccgcagucggcguccagcggcucugcuuguucgugugugugucguugcaggccuuauucaagcuuaccaugggccagaucgugaccuucuuccaggaggugccccacgugaucgaggaggugaugaacaucgugcugaucgcccugagcgugcuggccgugcugaagggccuguacaacuucgccaccugcggccuggugggccuggugaccuuccugcugcugugcggcagaagcugcaccaccagccuguacaagggcguguacgagcugcagacccuggagcugaacauggagacccugaacaugugcaugccccugagcugcaccaagaacaacagccaccacuacaucauggugggcaacgagaccggccuggagcugacccugaccaacaccagcaucaucaaccacaaguucugcaaccugagcgacgcccacaagaagaaccuguacgaccacgcccugaugagcaucaucagcaccuuccaccugagcauccccaacuucaaccaguacgaggccaugagcugcgacuucaacggcggcaagaucagcgugcaguacaaccugagccacagcuacgccggcgacgccgccaaccacugcggcaccguggccaacggcgugcugcagaccuucaugagaauggccuggggcggcagcuacaucgcccuggacagcggcagaggcaacugggacugcaucaugaccagcuaccaguaccugaucauccagaacaccaccugggaggaccacugccaguucagcagacccagccccaucggcuaccugggccugcugagccagagaaccagagacaucuacaucagcagaagaagaagaggcaccuucaccuggacccugagcgacagcgagggcgaggacacccccggcggcuacugccugaccagauggaugcugaucgaggccgagcugaagugcuucggcaacaccgccguggccaagugcaacgagaagcacgacgaggaguucugcgacaugcugagacuguucgacuucugcaagcaggccauccagagacugaaggcccccgcccagaugagcauccagcugaucaacaaggccgugaacgcccugaucaacgaccagcugaucaugaagaaccaccugagagacaucaugggcauccccuacugcaacuacagcaaguacugguaccugaaccacaccaccaccggcagaaccagccugcccaagugcuggcuggugagcaacggcagcuaccugaacgagacccacuucagcgacgacaucgagcagcaggccgacaacaugaucaccgagaugcugcagaaggaguacauggagagacagggcaagaccccccugggccugguggaccuguucguguucagcaccagcuucuaccugaucagcaucuuccugcaccuggugaagauccccacccacagacacaucgugggcaagagcugccccaagccccacagacugaaccacaugggcaucugcagcugcggccuguacaagcagcccggcgugcccgugaaguggaagagaugaggacuaguaauaaggaaacuguaugaaugucugugggcaggaagugaagagauccuucuguaaagguuuuuggaauuaugucugcugaauaauaaacuuuuuugaaauaauaaaucugguagaaaaaugagaucucaaaggcucuuuucagagccaccaaaaaaaaaaaaaaaaaaaaaaaaaaaaaaaaaaaaaaaaaaaaaaaaaaaaaaaaaaaaaaaaagaauu

SEQ ID NO: 23969 - RNA, 1781 nt, Artificial Sequence
  mRNA product Design b-4 (hSL-A64-N5) comprising derived and/or modified sequence from LASV(LM765-SLE-2012;Clade IV)__AIT17814__GPCmut2 (opt4)
aggagagucccgcagucggcguccagcggcucugcuuguucgugugugugucguugcaggccuuauucaagcuuaccaugggccagaucgugaccuucuuccaggaggugccccacgugaucgaggaggugaugaacaucgugcugaucgcccugagcauccuggccgugcugaagggccuguacaacuucgccaccugcggccuggugggccuggugaccuuccugcugcugugcggcagaagcugcaccaccagccuguacaagggcguguacgagcugcagacccuggagcugaacauggagacccugaacaugugcaugccccugagcugcaccaagaacaacagccaccacuacaucauggugggcaacgagaccggccuggagcugacccugaccaacaccagcaucaucgaccacaaguucugcaaccugagcgacgcccacagaaagaaccuguacgaccacgcccugaugagcaucaucagcaccuuccaccugagcauccccaacuucaaccaguacgaggccaugagcugcgacuucaacggcggcaagaucagcgugcaguacaaccugagccacagcuacgccaaggacgccgccgaccacugcggcaccguggccaacggcgugcugcagaccuucaugagaauggccuggggcggcagcuacaucgcccuggacagcggcagaggcagaugggacugcaucaugaccagcuaccaguaccugaucauccagaacaccaccugggaggaccacugccaguucagcagacccagccccaucggcuaccugggccugcugagccagagaaccagagacaucuacaucagcagaagaagaagaggcaccuucaccuggacccugagcgacagcgagggcaaggacacccccggcggcuacugccugaccagauggaugcugaucgaggccgagcugaagugcuucggcaacaccgccguggccaagugcaacgagaagcacgacgaggaguucugcgacaugcugagacuguucgacuucugcaagcaggccauccagagacugaaggcccccgcccagaugagcauccagcugaucaacaaggccgugaacgcccugaucaacgaccagcugaucaugaagaaccaccugagagacaucaugggcauccccuacugcaacuacagcaaguacugguaccugaaccacaccaccaccggcaagaccagccugcccaagugcuggcuggugagcaacggcagcuaccugaacgagacccacuucagcgacgacaucgagcagcaggccgacaacaugaucaccgagaugcugcagaaggaguacauggagagacagggcaagaccccccugggccugguggaccuguucguguucagcaccagcuucuaccugaucagcaucuuccugcaccuggugaagauccccacccacagacacaucgugggcaagcccugccccaagccccacagacugaaccacaugggcaucugcagcugcggccuguacaagcagcccggcgugcccgugaaguggaagagaugaggacuaguaauaaggaaacuguaugaaugucugugggcaggaagugaagagauccuucuguaaagguuuuuggaauuaugucugcugaauaauaaacuuuuuugaaauaauaaaucugguagaaaaaugagaucucaaaggcucuuuucagagccaccaaaaaaaaaaaaaaaaaaaaaaaaaaaaaaaaaaaaaaaaaaaaaaaaaaaaaaaaaaaaaaaaagaauu

SEQ ID NO: 23970 - RNA, 1781 nt, Artificial Sequence
  mRNA product Design b-4 (hSL-A64-N5) comprising derived and/or modified sequence from LASV(LM776-SLE-2012;Clade IV)__AIT17824__GPCmut2 (opt4)
aggagagucccgcagucggcguccagcggcucugcuuguucgugugugugucguugcaggccuuauucaagcuuaccaugggccagaucgugaccuucuuccaggaggugccccacgugaucgaggaggugaugaacaucgugcugaucgcccugagcauccuggccgugcugaagggccuguacaacuucgccaccugcggccuggugggccuggugaccuuccugcugcugugcggcagaagcugcaccaccagcguguacaagggcguguacgagcugcagacccuggagcugaacauggagacccugaacaugugcaugccccugagcugcaccaagaacaacagccaccacuacaucauggugggcaacgagaccggccuggagcugacccugaccaacaccagcaucaucaaccacaaguucugcaaccugagcgacgcccacaagaagaaccuguacgaccacgcccugaugagcaucaucagcaccuuccaccugagcauccccaacuucaaccaguacgaggccaugagcugcgacuucaacggcggcaagaucagcgugcaguacaaccugagccacagcuacgccggcgacgccgccaaccacugcggcaccguggccaacggcgugcugcagaccuucaugagaauggccuggggcggcagcuacaucgcccuggacagcggccacggcaagugggacugcaucaugaccagcuaccaguaccugaucauccagaacaccaccugggaggaccacugccaguucagcagacccagccccaucggcuaccugggccugcugagccagagaaccagagacaucuacaucagcagaagaagaagaggcaccuucaccuggacccugagcgacagcgagggcaaggacacccccggcggcuacugccugaccagauggaugcugaucgaggccgagcugaagugcuucggcaacaccgccguggccaagugcaacgagaagcacgacgaggaguucugcgacaugcugagacuguucgacuucugcaagcaggccauccagagacugaaggcccccgcccagaugagcauccagcugaucaacaaggccgugaacgcccugaucaacgaccagcugaucaugaagaaccaccugagagacaucaugggcauccccuacugcaacuacagcaaguacugguaccugaaccacaccaccaccggcaagaccagccugcccaagugcuggcuggugagcaacggcagcuaccugaacgagacccacuucagcgacgacaucgagcagcaggccgacaacaugaucaccgagaugcugcagaaggaguacauggagagacagggcaagaccccccugggccugguggaccuguucguguucagcaccagcuucuaccugaucagcaucuuccugcaccuggugaagauccccacccacagacacaucgugggcaagagcugccccaagccccacagacugaaccacaugggcaucugcagcugcggccuguacaagcagcccggcgugcccgugagauggaagagaugaggacuaguaauaaggaaacuguaugaaugucugugggcaggaagugaagagauccuucuguaaagguuuuuggaauuaugucugcugaauaauaaacuuuuuugaaauaauaaaucugguagaaaaaugagaucucaaaggcucuuuucagagccaccaaaaaaaaaaaaaaaaaaaaaaaaaaaaaaaaaaaaaaaaaaaaaaaaaaaaaaaaaaaaaaaaagaauu

SEQ ID NO: 23971 - RNA, 1781 nt, Artificial Sequence
  mRNA product Design b-4 (hSL-A64-N5) comprising derived and/or modified sequence from LASV(Mad39;Clade IV)__ANH09722__GPCmut2 (opt4)
aggagagucccgcagucggcguccagcggcucugcuuguucgugugugugucguugcaggccuuauucaagcuuaccaugggccagaucgugaccuucuuccaggaggugccccacgugaucgaggaggugaugaacaucgugcugaucgcccugagcauccuggccgugcugaagggccuguacaacguggccaccugcggccugaucggccuggugaccuuccugcugcugugcggcagaagcugcaccaccacccuguacaagggcguguacgagcugcaggcccuggagcugaacauggagacccugaacaugugcaugccccugagcugcaccaagaacaacagccaccacuacaucagagugggcaacgagaccggccuggagcugacccugaccaacaccagccugaucaaccacaaguucugcaaccugagcgacgcccacaagaagaaccuguacgaccacgcccugaugagcaucaucagcaccuuccaccugagcauccccaacuucaaccaguacgaggccaugagcugcgacuucaacgacggcaagaucagcgugcaguacaaccugagccacaccuacgccggcgacaccgccaaccacugcggcaccguggccaacggcgugcugcagaccuucaugagaauggccuggggcggcagcuacaucgcccuggacagcggcagaggcggcugggacugcaucaugaccagcuaccaguaccugaucauccagaacaccaccugggaggaccacugccaguucagcagacccagccccaucggcuaccugggccugcugagccagagaaccagagacaucuacaucagcagaagaagaagaggcaccuucaccuggacccugagcgacagcgagggcaaggacacccccggcggcuacugccugaccagauggaugcugaucgaggccgagcugaagugcuucggcaacaccgccguggccaagugcaacgagaagcacgacgaggaguucugcgacaugcugagacuguucgacuucugcaagcaggccauccagagacugaaggcccccgcccagaugagcauccagcugaucaacaaggccgugaacgcccugaucaacgaccagcugaucaugaagaaccaccugagagacaucaugggcauccccuacugcaacuacagcaaguacugguaccugaaccacaccgugaccggcaagaccagccugcccaagugcuggcuggugagcaacggcagcuaccugaacgagacccacuucagcgacgacaucgagcagcaggccgacaacaugaucaccgagaugcugcagaaggaguacauggagagacagggcaagaccccccugggccugguggaccuguucguguucagcaccagcuucuaccugaucagcaucuuccugcaccuggugaagauccccacccacagacacguggugggcaagcccugccccaagccccacagacugaaccacaugggcaucugcagcugcggcuucuacaagcagcccggcgugcccgugagauggaagagaugaggacuaguaauaaggaaacuguaugaaugucugugggcaggaagugaagagauccuucuguaaagguuuuuggaauuaugucugcugaauaauaaacuuuuuugaaauaauaaaucugguagaaaaaugagaucucaaaggcucuuuucagagccaccaaaaaaaaaaaaaaaaaaaaaaaaaaaaaaaaaaaaaaaaaaaaaaaaaaaaaaaaaaaaaaaaagaauu

SEQ ID NO: 23972 - RNA, 1781 nt, Artificial Sequence
  mRNA product Design b-4 (hSL-A64-N5) comprising derived and/or modified sequence from LASV(Z0947-SLE-2011;Clade IV)__AIT17840__GPCmut2 (opt4)
aggagagucccgcagucggcguccagcggcucugcuuguucgugugugugucguugcaggccuuauucaagcuuaccaugggccagaucgugaccuucuuccaggaggugccccacgugaucgaggaggugaugaacaucgugcugaucgcccugagcauccuggccgugcugaagggccuguacaacuucgccaccugcggccuggugggccuggugaccuuccugcugcugugcggcagaagcugcaccaucagccuguacaagggcguguacgagcugcagacccuggagcugaacauggagacccugaacaugugcaugccccugagcugcaccaagaacaacagccaccacuacaucauggugggcaacgagaccggccuggagcugacccugaccaacaccagcaucaucaaccacaaguucugcaaccugagcgacgcccacaagaagaaccuguacgaccacgcccugaugagcaucaucagcaccuuccaccugagcauccccaacuucaaccaguacgaggccaugagcugcgacuucaacggcggcaagaucagcgugcaguacaaccugagccacagcuacgccggcgacgccgccaaccacugcggcaccguggccaacggcgugcugcagaccuucaugagaauggccuggggcggcagcuacaucgcccuggacagcggcagagacagaugggacugcaucaugaccagcuaccaguaccugaucauccagaacaccaccugggaggaccacugccaguucagcagacccagccccaucggcuaccugggccugcugagccagagaaccagagacaucuacaucagcagaagaagaagaggcaccuucaccuggacccugagcgacagcgagggcaaggacacccccggcggcuacugccugaccagauggaugcugaucgaggccgagcugaagugcuucggcaacaccgccguggccaagugcaacgagaagcacgacgaggaguucugcgacaugcugagacuguucgacuucugcaagcaggccauccagagacugaaggcccccgcccagaugagcauccagcugaucaacaaggccgugaacgcccugaucaacgaccagcugaucaugaagaaccaccugagagacaucaugggcauccccuacugcaacuacagcaaguacugguaccugaaccacaccaccaccggcaagaccagccugcccaagugcuggcuggugagcaacggcagcuaccugaacgagacccacuucagcgacgacaucgagcagcaggccgacaacaugaucaccgagaugcugcagaaggaguacauggagagacagggcaagaccccccugggccugguggaccuguucguguucagcaccagcuucuaccugaucagcaucuuccugcaccuggugaagauccccacccacagacacaucgugggcaagcccugccccaagccccacagacugaaccacaugggcaucugcagcugcggccuguacaagcagcccggcgugcccgugaaguggaagagaugaggacuaguaauaaggaaacuguaugaaugucugugggcaggaagugaagagauccuucuguaaagguuuuuggaauuaugucugcugaauaauaaacuuuuuugaaauaauaaaucugguagaaaaaugagaucucaaaggcucuuuucagagccaccaaaaaaaaaaaaaaaaaaaaaaaaaaaaaaaaaaaaaaaaaaaaaaaaaaaaaaaaaaaaaaaaagaauu

SEQ ID NO: 23973 - RNA, 1781 nt, Artificial Sequence
  mRNA product Design b-4 (hSL-A64-N5) comprising derived and/or modified sequence from LASV(Josiah;Clade IV)__NP_694870__GPCmut2 (opt5)
aggagagucccgcagucggcguccagcggcucugcuuguucgugugugugucguugcaggccuuauucaagcuuaccaugggccagaucgugaccuucuuucaagaggucccccacguuauugaagaggugaugaacaucgugcugauugcccucagcguccuggcugugcuuaaggggcuguacaauuucgccacaugcggacucguuggccuggugacguuucuucugcucugugggagauccugcaccacaucucuguauaaaggagucuacgaacugcagacccucgagcugaacauggaaacacuuaauauguguaugccucugagcugcaccaagaacaauucccaucacuauaucauggugggcaacgagacagggcucgagcugacccuuacgaauaccucuauuaucaaccauaaauucuguaaucugagcgacgcgcacaagaaaaaccucuacgaucaugcucugauguccaucauuucuacauuucaccugagcaucccgaauuucaaccaguaugaagccauguccugcgacuuuaauggaggcaagauuagcguucaguacaaccucucucacuccuaugccggcgaugcugccaaucauugugggaccguggcuaacggaguccugcaaacauucaugcggauggccuggggcgggagcuacaucgcgcuugacucuggacgcggcaacugggauugcauuaugaccuccuaccaguaucugaucauucagaauacgacaugggaggaccacugucaguuuagcagacccucuccuaucggguaccucggacugcuuucccaacggacccgcgauaucuauauuagcagacggcgcagaggcacauucaccuggacccuguccgacucugaaggcaaggauacacccgggggauacugccucacgcgguggaugcugaucgaggccgagcugaaauguuuuggcaacaccgcuguggccaagugcaaugaaaaacaugacgaggaguucugcgauaugcuccgccuguuugacuucuguaagcaggcuauucagagacuuaaagccccugcgcagaugagcauccaacugauuaacaaggccgugaaugcucucaucaacgaucagcugaucaugaagaaucaccuucgggacauuauggggauccccuauugcaacuacuccaaauauugguaccugaaucacacaaccacaggacgcaccagccucccuaaguguuggcuggucucuaacggcuccuaccugaaugaaacgcauuucagcgacgauauugaacagcaagccgacaacaugaucacagagaugcuccagaaagaguauauggaaagacaggggaagaccccgcugggacuuguugaucuguuuguguucucuaccagcuuuuaccucauuuccaucuuccugcaccuggugaaaauccccacacaucggcacauugucggcaagucuugcccuaaaccccaucgccuuaaucacaugggcaucuguagcugcgggcucuauaagcagccuggagugcccguuaaguggaaaagaugaggacuaguaauaaggaaacuguaugaaugucugugggcaggaagugaagagauccuucuguaaagguuuuuggaauuaugucugcugaauaauaaacuuuuuugaaauaauaaaucugguagaaaaaugagaucucaaaggcucuuuucagagccaccaaaaaaaaaaaaaaaaaaaaaaaaaaaaaaaaaaaaaaaaaaaaaaaaaaaaaaaaaaaaaaaaagaauu

SEQ ID NO: 23974 - RNA, 1778 nt, Artificial Sequence
  mRNA product Design b-4 (hSL-A64-N5) comprising derived and/or modified sequence from LASV(LP;Clade I)__AAF86701__GPCmut2 (opt5)
aggagagucccgcagucggcguccagcggcucugcuuguucgugugugugucguugcaggccuuauucaagcuuaccaugggccagaucauuaccuucuuucaagaggugccccacgucaucgaagagguuaugaacauugugcugaucgcccucagccugcuugcuauucugaaggggcucuacaauaucgccacaugcggaaucauuggccugguggcguuccuuuuucugugugggaaauccugcucucucacgcugaagggaggcuaugaacugcagacccucgagcugaacauggaaacacuuaauauguguaugccucugagcugcaccaaaaacuccucucaucacuacaucagagucgggaaugagacaggacucgagcugacccuuacaaacaccagcauuaucaaucauaaguucuguaaccuguccgacgcucacaaaaagaaucucuaugaucaugcccugaugucuauuaucagcacguuucaccuguccauuccgaacuucaaucaguacgaagccaugagcugcgacuuuaacggcggcaagaucucugugcaguauaaucucucccacagcuacgcuggggaugccgcugagcauuguggaaccguugccaacggcgugcugcaaacauucaugcggauggcguggggagggcgcuauaucgcccuugacucuggcaaagggaauugggauugcauuaugaccuccuaccaguaccugaucauucagaacacaaccugggaagaccacugucaguuuagcagacccucuccuaucggauaucucggccugcuuucccaacggacgcgcgauauuuacaucagcagacggcgcagaggcacauucaccuggacacuguccgacucugaggggaacgagacccccggaggcuauugccucacccgguggaugcugaucgaagcugagcugaaguguuuugggaauacagccgucgcuaaaugcaacgaaaagcaugaugaggaguucugcgacaugcuccgccuguuugauuucuguaaacaggccauuagacggcuuaaggcgccugcccagaugagcauccagcugauuaauaaggcugugaacgcccucaucaaugaccaacugauuaugaaaaaccaccuucgcgauaucaugggaauccccuacugcaauuauuccaaguacugguaucugaaccacacgagcucuggcagaaccucccucccuaaauguuggcugauuagcaaugggucuuaccugaacgaaacacaguucagcgacgacaucgagcagcaagcugauaauaugauuaccgaaaugcuccagaaggaguacaucgaacggcagggaaaaacaccgcugggccuuguugacauuuuuaucuucuccaccucuuuuuaucugauuagcaucuuccuccaucugaucaagauucccacgcaccgccauaucgugggcaaaccuugccccaagccucacagacugaaccauaugggggucuguuccugcggacuuuacaagcaccccggcgugccgacaaaauggaagcggugaggacuaguaauaaggaaacuguaugaaugucugugggcaggaagugaagagauccuucuguaaagguuuuuggaauuaugucugcugaauaauaaacuuuuuugaaauaauaaaucugguagaaaaaugagaucucaaaggcucuuuucagagccaccaaaaaaaaaaaaaaaaaaaaaaaaaaaaaaaaaaaaaaaaaaaaaaaaaaaaaaaaaaaaaaaaagaauu

SEQ ID NO: 23975 - RNA, 1778 nt, Artificial Sequence
  mRNA product Design b-4 (hSL-A64-N5) comprising derived and/or modified sequence from LASV(803213;Clade II)__AAF86703__GPCmut2 (opt5)
aggagagucccgcagucggcguccagcggcucugcuuguucgugugugugucguugcaggccuuauucaagcuuaccaugggccagaucauuaccuucuuucaagaggugccccacgucaucgaagagguuaugaacauugugcugaucgcccucagccugcuugcuauucugaaggggaucuacaauguggccacaugcggacucuucggccugaucuccuuucuucugcucugugggagaucuugcagcgucacguauaaaggaguguacgaacugcagacccuggagcucaacauggcgaaucugaacauguguaugccucuuuccugcacaaagaauaacucucaucacuauauuaugguuggcaaugaaaccgggcuggagcucacacugaccaacacaagcaucauuaaucauaaauucuguaaccuuuccgacgcucacaagaaaaaucuguacgaucaugcccucaugucuaucauuagcaccuuucaccuguccaucccgaacuucaaucaguaugaggccaugagcugcgacuuuaacggaggcaagauuucugugcaguacaaucugucccacagcuucgcugucgaugccgcuaaccauuguggcacgaucgccaacggggugcuccaaaccuuuaugcggauggcguggggaggcucuuauaucgcccuggacuccgggaagggaaauugggauugcauuaugacaagcuaccaguaccuuaucauucagaacaccacaugggaagaccacugucaguucucucgccccuccccuaucggcuaucuggggcuccugagccaaagaacccgggauauuuacaucucccgcagacggcgcggaacguuuacauggacccuuucugacagcgagggcaaugaagcucccggcggguauugccugacaagauggaugcucaucgaggccgagcugaaauguuucggaaacaccgcuguugccaagugcaaugaaaaacaugaugaggaauuuugcgacaugcugcgccucuucgauuucuguaagcaggcgauuaaacggcugaagaccccugcccagauguccauccagcuuauuaacaaggcugugaaugcccugaucaacgaccaacucauuaugaaaaaucaccugagagauaucaugggcauccccuacugcaacuauagccgguacugguaucuuaaucacacagucacggggaagaccucucugccucgcuguuggcucguguccaacggaagcuaccugaaugagacacauuuuucugacgacauugaacagcaggcugauaacaugaucaccgagaugcugcaaaaagaguacauggacagacagggcaagacaccgcucgggcugguggaucuuuucgucuuuagcaccuccuucuaucugauuucuaucuuucuccaccugguuaaaauucccacgcaucggcacaucgugggaaagccuugccccaaaccucaucgccugaaucacaugggcauuuguagcugcggccuuuacaagcaccccggggugccggucaaguggaaaagaugaggacuaguaauaaggaaacuguaugaaugucugugggcaggaagugaagagauccuucuguaaagguuuuuggaauuaugucugcugaauaauaaacuuuuuugaaauaauaaaucugguagaaaaaugagaucucaaaggcucuuuucagagccaccaaaaaaaaaaaaaaaaaaaaaaaaaaaaaaaaaaaaaaaaaaaaaaaaaaaaaaaaaaaaaaaaagaauu

SEQ ID NO: 23976 - RNA, 1778 nt, Artificial Sequence
  mRNA product Design b-4 (hSL-A64-N5) comprising derived and/or modified sequence from LASV(GA391;Clade III)__CAA36645__GPCmut2 (opt5)
aggagagucccgcagucggcguccagcggcucugcuuguucgugugugugucguugcaggccuuauucaagcuuaccaugggccagaucgugaccuucuuucaagaggucccccacguuauugaagaggugaugaacaucgugcugauugcccucagcauccuggcuauucuuaaggggcuguacaaugucgccacaugcggacucaucggccuggugacguuccuucugcucuccgggagaucuuguagccugaucuauaaaggaaccuacgaacugcagacacucgagcugaacauggaaacccuuaauaugugcaugccucuguccuguacaaagaacaauucucaucacuauauucggguuggcaacgagaccgggcucgagcugacacuuaccaauacgagcauccugaaccauaaauuuugcaaucucuccgacgcgcacaagcgcaaccuguacgaucauucucugaugagcauuaucuccaccuuccaccucagcauuccgaauuuuaaccaguaugaagcuaugucuugugacuucaauggaggcaaaaucacagugcaguacaaccugucccacagcuuugccgucgaugccgcuggccauugcgggacccuugccaauggagugcugcaaacauucaugagaauggcuuggggcgggucuuauauugcccucgacuccggacggggcaacugggauuguaucaugaccagcuaccaguaccugaucauucagaacacgacaugggacgaucacugccaguuuucucgccccuccccuaucggguaucuuggacugcucagccaaagaacccgggacauuuacaucucccgcagacggcgcggcacauucaccuggacccugucugauagcgagggcaaugaaacacccgggggauauugucugacgagauggaugcucauugaggcggagcugaagugcuuuggcaacaccgccguugcuaaguguaaugaaaaacaugacgaggaguucugcgauaugcuucggcuguuugacuucugcaagcaggccauccgcagacucaaaaccccugcucagauguccauccagcugauuaacaaggccgugaaugcgcuuaucaacgaucaacugauuaugaaaaaucaccuccgggacaucauggggauucccuacuguaacuauagccgcuacugguaucugaaucacacaucuacaggaaagaccucccugccuagaugcuggcucaucagcaacggcucuuaccugaaugaaacgaaguucagcgacgauaucgaacagcaggccgacaacaugauuacagagaugcuucaaaaagaguacaucgaucggcaggggaagaccccgcugggacucgucgaccuguuuguguucuccaccucuuuuuaucugauuagcaucuuccuucaucucgugaaaauucccacacacagacauaucgucggcaagccuugucccaaaccucaccgccugaaucauaugggcauuugcuccugugggcuguacaagcagcccggaguuccggugcgguggaaaagaugaggacuaguaauaaggaaacuguaugaaugucugugggcaggaagugaagagauccuucuguaaagguuuuuggaauuaugucugcugaauaauaaacuuuuuugaaauaauaaaucugguagaaaaaugagaucucaaaggcucuuuucagagccaccaaaaaaaaaaaaaaaaaaaaaaaaaaaaaaaaaaaaaaaaaaaaaaaaaaaaaaaaaaaaaaaaagaauu

SEQ ID NO: 23977 - RNA, 1781 nt, Artificial Sequence
  mRNA product Design b-4 (hSL-A64-N5) comprising derived and/or modified sequence from LASV(AV;Clade V)__CCA30314__GPCmut2 (opt5)
aggagagucccgcagucggcguccagcggcucugcuuguucgugugugugucguugcaggccuuauucaagcuuaccaugggccagaucgugaccuucuuucaagaggucccccacguuauugaagaggugaugaacaucgugcugauugcccucagcauccuggcuguccuuaaggggcuguacaauauugccacaugcggacucaucggccugaucacguuccuucugcucugugggagauccugcucuagcaaccuguauaaaggaguguacgaacugcagucccucgaccugaauauggagacccuuaacauguguaugccucugucuugcacaaagaauaacagccaucacuauauucggguuggcaaugauaccgggcucgaacugacacuuaccaacacauccauccugaaucauaaauuuuguaaccucucugacgcgcacaagaaagaucuguacgaccaugcucugaugagcauuaucuccaccuuccaccucagcauuccgaauuuuaaccaguaugaggccaugucuugcgauuucaauggaggcaagaucuccgugcaguacaaccugagccacucuuaugccauugacgcugccaaucauuguggcacggucgcuaacgggauccuucaaaccuuuaugcgcauggccuggggaggcuccuacaucgcgcuggauagcgggagaggaaacugggacugcauuaugacaucuuaccaguaucucaucauucagaauaccacaugggagaaccacugucaguucucccggcccagcccuaucggcuaccuggggcuucugucccaacgcaccagagauauuuauaucucucggcgcagacggggaacguuuacauggacccucagcgacuccgaaggcaaugccacacccggcggguacugccugacccgcuggaugcugaucgaggcugaacucaaguguuucggaaacaccgccguggcuaaaugcaaugagaagcaugaugaggaauuuugcgacaugcugagacuuuucgauuuuuguaaacaggccauuagccggcugaagucuccugcgcagauguccauccagcucauuaacaaagccguuaaugcucugaucaacgaccaacuuauuaugaagaaucaucugcgcgacaucaugggcauccccuauugcaacuacagcaaguauugguaccucaaucacacaauuacggggaaaaccucucugccuaaguguuggcuggugagcaacggauccuaccucaaugagacacacuucucugaugacaucgaacagcaggccgauaacaugauuaccgagaugcugcaaaaagaauauauggagagacagggcaagacaccgcuugggcuggucgaccucuucguguuuagcaccuccuucuaccugaucagcauuuuucugcggcuugugaaaauccccacgcaccgccauauugucggaaagccuugccccaaaccucacagacucaaucauaugggcaucuguucuugcggccuguauaagcagcccgggguuccggugcgguggaagagaugaggacuaguaauaaggaaacuguaugaaugucugugggcaggaagugaagagauccuucuguaaagguuuuuggaauuaugucugcugaauaauaaacuuuuuugaaauaauaaaucugguagaaaaaugagaucucaaaggcucuuuucagagccaccaaaaaaaaaaaaaaaaaaaaaaaaaaaaaaaaaaaaaaaaaaaaaaaaaaaaaaaaaaaaaaaaagaauu

SEQ ID NO: 23978 - RNA, 1778 nt, Artificial Sequence
  mRNA product Design b-4 (hSL-A64-N5) comprising derived and/or modified sequence from LASV(Togo/2016/7082;Clade VI)__AMR44577__GPCmut2 (opt5)
aggagagucccgcagucggcguccagcggcucugcuuguucgugugugugucguugcaggccuuauucaagcuuaccaugggccagaucauuaccuucuuucaagaggugccccacgucaucgaagagguuaugaacauugugcugaucgcccucagccugcuugcuauucugaaggggguguacaaugucgccacaugcggaaucaucggccucgugacguuccuguuucuuugugggagauccugcucucugauuuauaaaggaagcuacgaacuccagacccuggagcugaacauggaaacacucaauauguguaugccucuguccugcaccaagaacucuagccaucacuauauccggguuggcaaugagacagggcuugagcugacccucacaaacaccuccauuaucaaucauaaauucuguaaccugucugacgcgcacaagcgcaaucuuuacgaucaugcucugaugagcauucucuccacguuucaccugagcaucccgaacuucaaucaguaugaagccaugucuugcgacuuuaacggaggcaaaauuuccgugcaguacaaucugagccacgccuaugcugucgaugccgcugagcauuguggcaccguggccaacgggguucuccaaacauucaugagaauggcguggggaggcucuuacaucgcccuggacuccgggcggggaaauugggauugcaucaugaccagcuaccaguaucuuauuauccagaacacaaccugggaagaccacugucaguuuucucgccccuccccuauuggcuaccuggggcuccugagccaaagaacgcgggauaucuauauuucccgcagacggcgcggaacauucaccuggacacuuucugacagcgagggcaacgagacccccggcggguacugccugaccagauggaugcucaucgaagcugagcugaaguguuuuggaaauacagccguggcuaagugcaacgaaaaacaugaugaggaguucugcgacaugcugcggcucuuugauuucuguaagcaggccauccagcgccugaaauccccugcgcagaugagcauucaacuuaucaauaaggccgucaacgcucugauuaaugaccagcucaucaugaaaaaccaccugagagauaugaugggcauucccuauugcaauuacucuaaguauugguaccuuaaccacacguccagcgggcggaccucucugccuaaguguuggcucgugagcaauggauccuaccugaacgaaacacauuucucugacgacaucgagcagcaagccgauaauaugaucaccgaaaugcugcagaaagaguauauugaccgccagggcaagacaccgcucgggcugguggaucuuuuugucuucagcaccuccuuuuaccugaucagcauuuuccuccaccugaucaaaauucccacgcauagacacaucguuggaaagccuugccccaaaccucaucggcugaaccacaugggcauuuguucuugcggccuuuauaagcagcccggggugccgacaagauggaaacgcugaggacuaguaauaaggaaacuguaugaaugucugugggcaggaagugaagagauccuucuguaaagguuuuuggaauuaugucugcugaauaauaaacuuuuuugaaauaauaaaucugguagaaaaaugagaucucaaaggcucuuuucagagccaccaaaaaaaaaaaaaaaaaaaaaaaaaaaaaaaaaaaaaaaaaaaaaaaaaaaaaaaaaaaaaaaaagaauu

SEQ ID NO: 23979 - RNA, 1778 nt, Artificial Sequence
  mRNA product Design b-4 (hSL-A64-N5) comprising derived and/or modified sequence from LASV(KAK-428;Clade n.d. (VII))__ANH09740__GPCmut2 (opt5)
aggagagucccgcagucggcguccagcggcucugcuuguucgugugugugucguugcaggccuuauucaagcuuaccaugggccagaucgugaccuucuuucaagaggucccccacguuauugaagaggugaugaacaucgugcugauugcccucagccugcuugcuauccugaaggggcucuacaauuucgccacaugcggagucauuggccugaucacguuucuucugcucugugggagauccugcucugcgaccuauaaaggacaguacgaacugcagacacuggagcucaacauggaaagccugaauauguguaugccucuuuccugcaccaagaacaauucucaucacuauauccgggcuggcaacaauacagggcuggagcucacccugacaaacaccagcauuaucucccauaaauucuguaaucuuucugacgcccacaagaaaaaccuguacgaucauacgcucaugagcauuaucaccacauuucaccuguccauuccgaauuucaaccaguaugaggccaugagcugcgacuuuaauggaggcaagaucucuauucaauacaaccugucccacagcuaugcuggcgaugccgcucagcauugugggaccguggccaauggaguucuccagacauucaugcgcauggcguggggcgggucuuaccuggcccuugacuccggaagacggggcugggauugcaucaucagcucuuaccaguaucugauuauccaaaacaccacgugggacgaucacugucaguuuucccgccccagcccuauuggguaccucggauucgugucccagaagacaagagacaucuauauuucucggcgcagacggggcaccuuuacauggacccugagcgauuccgaaggccaugacaugcccgggggauacugccuuacccgcuggaugcugaucgaggcugaucucaaauguuucggcaacacagccgucgcuaagugcaaugaaaaacacgacgaggaguuuugcgauauguggagacuguucgacuucuguaagcaggccauccaacggcugaaagcgccugcccagaugaacauucagcucaucaauaaggcugugaacgcccugauuaaugaccaacuuaugaugaagaaccaucugcgcgauaucauggggauucccuauugcaauuacagcaaauuuugguaucucaacaauacgaccacaggaagaaccucucugccucgguguuggcuuaucuccaacggcagcuaccugaaugaaacacacuucucugacgauaucgagcagcaggcugacaacaugauuaccgaaaugcuccagaaggaguacauggaucgccaagggaaaacgccgcugggacugguugaccucuuuguguucagcacauccuuuuaucugaucaccauuuuccuucaccuggucaagauccccacccauagacacauugugggcaaaccuugccccaagccucaucggcucaaucacaugggcaucuguucuugcgggcuguacaaacagcccggagugccggucagauggaagcgcugaggacuaguaauaaggaaacuguaugaaugucugugggcaggaagugaagagauccuucuguaaagguuuuuggaauuaugucugcugaauaauaaacuuuuuugaaauaauaaaucugguagaaaaaugagaucucaaaggcucuuuucagagccaccaaaaaaaaaaaaaaaaaaaaaaaaaaaaaaaaaaaaaaaaaaaaaaaaaaaaaaaaaaaaaaaaagaauu

SEQ ID NO: 23980 - RNA, 1778 nt, Artificial Sequence; identical to SEQ ID NO: 23974
  mRNA product Design b-4 (hSL-A64-N5) comprising derived and/or modified sequence from LASV(Pinneo-NIG-1969;Clade I)__AIT17836__GPCmut2 (opt5)

SEQ ID NO: 23981 - RNA, 1778 nt, Artificial Sequence
  mRNA product Design b-4 (hSL-A64-N5) comprising derived and/or modified sequence from LASV(ISTH0009-NIG-2011;Clade II)__AIT17404__GPCmut2 (opt5)
aggagagucccgcagucggcguccagcggcucugcuuguucgugugugugucguugcaggccuuauucaagcuuaccaugggccagaucauuaccuucuuucaagaggugccccacgucaucgaagagguuaugaacauugugcugaucgcccucagccugcuugcuauucugaaggggaucuacaauguggccacaugcggacucuucggccuggucuccuuucuucugcucugugggagaucuugcagcacgaccuauaaaggaguguacgaacugcagacacuggagcucgacauggcgucccugaacauguguaugccucuuucuugcaccaagaauaacagccaucacuauaucaugguuggcaaugaaacagggcuggagcucacccugacaaacaccuccauuaucaaucauaaauucuguaaccuuucugaugcucacaagaaaaaucuguacgaccaugcccucaugagcauuaucuccacguuucaccugagcauuccgaacuucaaucaguaugaggccaugucuugcgauuuuaacggaggcaagaucuccgugcaguacaaucugagccacgcuuaugccgucgacgcugccaaccauuguggcaccauugcgaauggggugcuccaaacauucaugcggauggccuggggaggcucuuacaucgcucuggauuccgggaagggaagcugggacugcaucaugaccucuuaccaguaucuuauuauccagaacacaaccugggaagaucacugucaguuuucccgccccagcccuauuggcuaccuggggcuccugucccaaagaacgcgggacaucuauauuucucgcagacggcgcggaacauucaccuggacacuuagcgauuccgagggcaacgaaacccccggcggguacugccugaccagauggaugcucaucgaggccgagcugaaauguuuuggaaauacagcuguugccaagugcaacgaaaaacaugacgaggaguucugcgauaugcugcggcucuuugacuucuguaagcaggcgauccgcagacugaaaacgccugcccagaugagcauucagcuuaucaauaaggcugugaacgcccugauuaaugaucaacucaucaugaagaaccaucugcgggacauuaugggcauccccuauugcaauuacucuaaauauugguaccuuaaccacaccgucacagggaagaccucccugccucgcuguuggcucgugagcaauggaucuuaccugaacgaaacacacuucagcgacgauaucgaacagcaggcugacaauaugauuaccgagcugcuccaaaaagaguauauggauagacagggcaagacgccgcuggggcuuguggaccuguuugucuucuccacaucuuuuuaccucaucagcauuuuccugcaccugaucaaaauucccacccaucggcacaucaccggaaagccuugccccaaaccucaucgccuuaaccacaugggcauuuguuccugcggccucuauaagcaccccgggguuccggugaaguggaaaagaugaggacuaguaauaaggaaacuguaugaaugucugugggcaggaagugaagagauccuucuguaaagguuuuuggaauuaugucugcugaauaauaaacuuuuuugaaauaauaaaucugguagaaaaaugagaucucaaaggcucuuuucagagccaccaaaaaaaaaaaaaaaaaaaaaaaaaaaaaaaaaaaaaaaaaaaaaaaaaaaaaaaaaaaaaaaaagaauu

SEQ ID NO: 23982 - RNA, 1778 nt, Artificial Sequence
  mRNA product Design b-4 (hSL-A64-N5) comprising derived and/or modified sequence from LASV(ISTH2010-NIG-2012;Clade II)__AIT17482__GPCmut2 (opt5)
aggagagucccgcagucggcguccagcggcucugcuuguucgugugugugucguugcaggccuuauucaagcuuaccaugggccagaucauuaccuucuuucaagaggugccccacgucaucgaagagguuaugaacauugugcugaucgcccucagccugcuugcuauucugaaggggaucuacaauguggccacaugcggacucuucggccuggucuccuuucuucugcucugugggagaucuugcagcacgaccuauaaaggaguguacgaacugcagacacuggagcucgacauggcgucccugaacauguguaugccucuuucuugcaccaagaauaacagccaucacuauaucaugguuggcaaugaaacagggcuggagcucacccugacaaacaccuccauuaucaaucauaaauucuguaaccuuucugaugcucacaagaaaaaucuguacgaccaugcccucaugagcauuaucuccacguuucaccugagcauuccgaacuucaaucaguaugaggccaugucuugcgauuuuaacggaggcaagaucuccgugcaguacaaucugagccacgcuuaugccgucgacgcugccaaccauuguggcaccauugcgaauggggugcuccaaacauucaugcggauggccuggggaggcucuuacaucgcucuggauuccgggaagggaagcugggacugcaucaugaccucuuaccaguaucuuauuauccagaacauuacaugggaagaucacugucaguuuucccgccccagcccuaucggcuaccuggggcuccugucccaaagaacccgggacauuuauaucucucgcagacggcgcggaacguucacauggacccuuagcgauuccgagggcaacgaaacacccggcggguacugccugaccagauggaugcucaucgaggccgagcugaaauguuuuggaaauaccgcuguugccaagugcaacgaaaaacaugacgaggaguucugcgauaugcugcggcucuuugacuucuguaagcaggcgauucgcagacugaaaacgccugcccagaugagcauccagcuuauuaauaaggcugugaacgcccugaucaaugaucaacucauuaugaagaaccaucugcgggacaucaugggcauccccuauugcaauuacucuaaauauugguaccuuaaccacacagucaccgggaagacaucccugccucgcuguuggcucgugagcaauggaucuuaccugaacgaaacccacuucagcgacgauauugaacagcaggcugacaauaugaucacagagcugcuccaaaaagaguauauugauagacagggcaagaccccgcuggggcuuguggaccuguuugucuucuccacgucuuuuuaccucaucagcauuuuccugcaccugguuaaaauccccacacaucggcacguggugggaaagccuugccccaaaccucaucgccuuaaccacaugggcauuuguuccugcggccucuauaagcaccccggggucccggugaaguggaaaagaugaggacuaguaauaaggaaacuguaugaaugucugugggcaggaagugaagagauccuucuguaaagguuuuuggaauuaugucugcugaauaauaaacuuuuuugaaauaauaaaucugguagaaaaaugagaucucaaaggcucuuuucagagccaccaaaaaaaaaaaaaaaaaaaaaaaaaaaaaaaaaaaaaaaaaaaaaaaaaaaaaaaaaaaaaaaaagaauu

SEQ ID NO: 23983 - RNA, 1778 nt, Artificial Sequence
  mRNA product Design b-4 (hSL-A64-N5) comprising derived and/or modified sequence from LASV(Lassa virus/H.sapiens-wt/NGA/2015/ISTH_0543;Clade II)__AVO03639__GPCmut2 (opt5)
aggagagucccgcagucggcguccagcggcucugcuuguucgugugugugucguugcaggccuuauucaagcuuaccaugggccagaucauuaccuucuuucaagaggugccccacgucaucgaagagguuaugaacauugugcugaucgcccucagccugcuugcuauucugaaggggaucuacaauguggccacaugcggacucuucggccuggucuccuuucuucugcucugugggagaucuugcagcacgaccuauaaaggaguguacgaacugcagacacuggagcucgacauggcgaaccugaauauguguaugccucuuuccugcaccaagaacaauucucaucacuauaucaugguuggcaacgaaacagggcuggagcucacccugacaaauaccagcauuaucaaccauaaauucuguaaucuuuccgaugcucacaagaaaaaccuguacgaccaugcccucaugucuauuaucagcacguuucaccuguccauuccgaauuucaaccaguaugaggccaugagcugcgauuuuaauggaggcaagaucucugugcaguacaaccugucccacaccuaugcugucgacgccgcuaaucauuguggcacaauugccaacggggugcuccaaaccuucaugcggauggcguggggaggcagcuacaucgcccuggauucugggaagggauccugggacugcaucaugacaagcuaccaguaucuuguuauucagaacaccacgugggaagaucacugucaguuuucucgccccuccccuaucggcuaccuggggcuccugagccaaagaacacgggacauuuauaucucccgcagacggcgcggaaccuucacauggacccuuucugauagcgagggcaaugaaacccccggcggguacugccugacaagauggaugcucauugaggcugagcugaaauguuuuggaaacacggccguggcuaagugcaaugaaaaacaugacgaggaguucugcgauaugcugcggcucuuugacuucuguaagcaggccauccgcagacugaaaaccccugcgcagauguccauccagcuuauuaacaaggccgucaaugcucugaucaacgaucaacucauuaugaagaaucaucugcgggacaucaugggcauucccuauugcaacuacagcaaauauugguaccuuaaucacacagugaccgggaagacaucucugccucgcuguuggcucguguccaacggaagcuaccugaaugaaacccacuucucugacgauaucgaacagcaggccgacaacaugaucacggagcugcuccaaaaagaguauauugauagacagggcaagacaccgcuggggcuugucgaccuguuuguuuucagcaccuccuuuuaccucaucucuauuuuccugcaccuggugaaaauccccacccaucggcacauuacaggaaagccuugccccaaaccucaucgccuuaaucacaugggcaucuguagcugcggccucuauaagcaccccggggugccggucaaguggaaaagaugaggacuaguaauaaggaaacuguaugaaugucugugggcaggaagugaagagauccuucuguaaagguuuuuggaauuaugucugcugaauaauaaacuuuuuugaaauaauaaaucugguagaaaaaugagaucucaaaggcucuuuucagagccaccaaaaaaaaaaaaaaaaaaaaaaaaaaaaaaaaaaaaaaaaaaaaaaaaaaaaaaaaaaaaaaaaagaauu

SEQ ID NO: 23984 - RNA, 1778 nt, Artificial Sequence
  mRNA product Design b-4 (hSL-A64-N5) comprising derived and/or modified sequence from LASV(Lassa virus/H.sapiens-wt/NGA/2016/ISTH_0009;Clade II)__AVO03571__GPCmut2 (opt5)
aggagagucccgcagucggcguccagcggcucugcuuguucgugugugugucguugcaggccuuauucaagcuuaccaugggccagaucauuaccuucuuucaagaggugccccacgucaucgaagagguuaugaacauugugcugaucgcccucagccugcuugcuauucugaaggggaucuacaauguggccacaugcggacuccugggccuugucuccuuccugcuccugugugggagaucuugcagcacgaccuauaaaggaguguacgaacugcagacacucgagcuggacauggcgucccuuaacauguguaugccucugucuugcaccaagaauaacagccaucacuauaucaugguuggcaaugaaacagggcucgagcugacccuuacaaacaccuccauuaucaaucauaaauuuuguaaccugucugaugcucacaagaaaaaucucuacgaccaugcccugaugagcauuaucuccacguuccaccugagcauuccgaacuuuaaucaguaugaggccaugucuugcgauuucaacggaggccggaucuccgugcaguacaaucucagccacucuuaugcugucgacgccgcuaaccauuguggcaccauugccaauggggugcugcaaacauuuaugcgcauggcguggggaggcuccuacaucgcccuugauagcgggaagggaucuugggacugcaucaugaccuccuaccaguaucugauuauccagaacacaaccugggaagaucacugucaguucagcagacccuccccuauuggcuaccucgggcugcuuucucaacggacgcgcgacaucuauauuagcagacggcgcagaggaacauuuaccuggacacuguccgauagcgagggcaacgaaacccccggcggguacugccucacccgguggaugcugaucgaggcugagcugaaguguuucggaaauacagccguugcuaaaugcaacgaaaagcaugacgaggaauuuugcgauaugcuccgccuguucgacuuuuguaaacaggccaucagacggcuuaagacgccugcgcagaugucuauucagcugaucaauaaagccgugaacgcucucauuaaugaucaacugaucaugaagaaccaccuucgcgacauuaugggcauccccuauugcaauuacuccaaguauugguaccugaaccacaccgucacagggaaaaccagccucccuagauguuggcuggugucuaauggaagcuaccugaacgagacacauuucuccgacgauaucgaacagcaggccgacaauaugauuaccgagcuccugcaaaaggaguauaucgaucggcagggcaaaacgccgcuugggcugguggaccucuucgucuuuucuaccagcuucuaccugauuuccaucuuucugcaccuuguuaagauucccacacaucgccacaucaccggaaaaccuugccccaagccucauagacucaaccacaugggcauuuguagcugcggccuguauaaucaccccggggugccggugaaauggaagcggugaggacuaguaauaaggaaacuguaugaaugucugugggcaggaagugaagagauccuucuguaaagguuuuuggaauuaugucugcugaauaauaaacuuuuuugaaauaauaaaucugguagaaaaaugagaucucaaaggcucuuuucagagccaccaaaaaaaaaaaaaaaaaaaaaaaaaaaaaaaaaaaaaaaaaaaaaaaaaaaaaaaaaaaaaaaaagaauu

SEQ ID NO: 23985 - RNA, 1778 nt, Artificial Sequence
  mRNA product Design b-4 (hSL-A64-N5) comprising derived and/or modified sequence from LASV(Lassa virus/H.sapiens-wt/NGA/2016/ISTH_0017;Clade II)__AVO03567__GPCmut2 (opt5)
aggagagucccgcagucggcguccagcggcucugcuuguucgugugugugucguugcaggccuuauucaagcuuaccaugggccagaucauuaccuucuuucaagaggugccccacgucaucgaagagguuaugaacauugugcugaucgcccucagccugcuugcuauucugaaggggaucuacaauguggccacaugcggacucuucggccuggucuccuuucuucugcucugugggagaucuugcagcacgaccuauaaaggaguguacgaacugcagacacuggagcucgacauggcgucccugaacauguguaugccucuuucuugcaccaagaauaacagccaucacuauaucaugguuggcaaugaaacagggcuggagcucacccugacaaacaccuccauuaucaaucauaaauucuguaaccuuucugaugcucacaagaaaaaucuguacgaccaugcccucaugagcauuaucuccacguuucaccugagcauuccgaacuucaaucaguaugaggccaugucuugcgauuuuaacggaggcaagaucuccgugcaguacaaucugagccacaccuaugcuauugacgccgcuaaccauuguggcacaaucgccaaugggguccuccaaaccuucaugcggauggcguggggaggcucuuacaucgcccuggauuccgggaagggaagcugggacugcauuaugacaucuuaccaguaucuuaucauucagaacaccacgugggaagaucacugucaguuuucccgccccagcccuaucggcuaccuggggcuccugucccaaagaacacgggacauuuauaucucucgcagacggcgcggaaccuucacauggacccuuagcgauuccgagggcaacgaaacccccggcggguacugccugacaagauggaugcucaucgaggcugagcugaaauguuuuggaaauacggccguggcuaagugcaacgaaaaacaugacgaggaguucugcgauaugcugcggcucuuugacuucuguaagcaggccauucgcagacugaaaaccccugcgcagaugagcauccagcuuauuaauaaggccguuaacgcucugaucaaugaucaacucauuaugaagaaccaucugcgggacaucaugggcauccccuauugcaauuacucuaaauauugguaccuuaaccacacagugaccgggaagacaucccugccucgcuguuggcucgucagcaauggaucuuaccugaacgaaacccacuucagcgacgauauugaacagcaggccgacaauaugaucacggagcugcuccaaaaagaguauauggauagacagggcaagacaccgcuggggcuuguggaccuguuuguguucuccaccucuuuuuaccucauuagcaucuuccugcaccugguccggauucccacccaucgccacguuaucggaaaaccuugccccaagccucauagacuuaaccacaugggcauuuguuccugcggccucuauaaacaccccggggugccggugaaguggaagcggugaggacuaguaauaaggaaacuguaugaaugucugugggcaggaagugaagagauccuucuguaaagguuuuuggaauuaugucugcugaauaauaaacuuuuuugaaauaauaaaucugguagaaaaaugagaucucaaaggcucuuuucagagccaccaaaaaaaaaaaaaaaaaaaaaaaaaaaaaaaaaaaaaaaaaaaaaaaaaaaaaaaaaaaaaaaaagaauu

SEQ ID NO: 23986 - RNA, 1778 nt, Artificial Sequence
  mRNA product Design b-4 (hSL-A64-N5) comprising derived and/or modified sequence from LASV(Lassa virus/H.sapiens-wt/NGA/2018/ISTH_0959;Clade II)__AVV65099__GPCmut2 (opt5)
aggagagucccgcagucggcguccagcggcucugcuuguucgugugugugucguugcaggccuuauucaagcuuaccaugggccagaucauuaccuucuuucaagaggugccccacgucaucgaagagguuaugaacauugugcugaucgcccucagccugcuugcuauucugaaggggaucuacaauguggucacaugcggacucuucggccugguguccuuucuucugcucugugggagaucuugcagcacgaccuauaaaggaguuuacgaacugcagacacuggagcucgacauggccucccugaacauguguaugccucuuucuugcaccaagaauaacagccaucacuauaucauggugggcaaugaaacagggcuggagcucacccugacaaacaccuccauuaucaaucauaaauucuguaaccuuucugaugcgcacaagaaaaaucuguacgaccaugcucucaugagcauuaucuccacguuucaccugagcauuccgaacuucaaucaguaugaggccaugucuugcgauuuuaacggaggcaagaucuccguccaguacaaucugagccacgccuaugcuauugacgccgcuaaccauuguggcaccaucgccaauggggugcuccaaacauucaugcggauggcguggggaggcucuuacaucgcccuggauuccgggaagggaagcugggacugcauuaugaccucuuaccaguaucuuaucauucagaacacaaccugggaagaucacugucaguuuucccgccccagcccuaucggcuaccuggggcuccugucccaaagaacgcgggacauuuauaucucucgcagacggcgcggaacauucaccuggacacuuagcgauuccgagggcaacgaaacccccggcggguacugccugaccagauggaugcucaucgaggcugagcugaaauguuuuggaaauacagccguugcuaagugcaacgaaaaacaugacgaggaguucugcgauaugcugcggcucuuugacuucuguaagcaggccauucgcagacugaaaacgccugcgcagaugagcauccagcuuauuaauaaggccgugaacgcucugaucaaugaucaacucauuaugaagaaccaucugcgggacaucaugggcauccccuauugcaauuacucuaaauauugguaccuuaaccacaccgucacagggaagaccucccugccucgcuguuggcucgugagcaauggaucuuaccugaacgaaacacacuucagcgacgauauugaacagcaggccgacaauaugaucaccgagcugcuccaaaaagaguauauugauagacagggcaagacgccgcuggggcuuguggaccuguuugucuucuccacaucuuuuuaccucaucagcauuuuccugcaccugguuaaaauccccacccaucggcacgugauuggaaagccuugccccaaaccucaucgccuuaaccacaugggcaucuguuccugcggccucuauaagcaccccggggugccggucaaguggaaaagaugaggacuaguaauaaggaaacuguaugaaugucugugggcaggaagugaagagauccuucuguaaagguuuuuggaauuaugucugcugaauaauaaacuuuuuugaaauaauaaaucugguagaaaaaugagaucucaaaggcucuuuucagagccaccaaaaaaaaaaaaaaaaaaaaaaaaaaaaaaaaaaaaaaaaaaaaaaaaaaaaaaaaaaaaaaaaagaauu

SEQ ID NO: 23987 - RNA, 1778 nt, Artificial Sequence
  mRNA product Design b-4 (hSL-A64-N5) comprising derived and/or modified sequence from LASV(LASV003-NIG-2008;Clade II)__AIT17580__GPCmut2 (opt5)
aggagagucccgcagucggcguccagcggcucugcuuguucgugugugugucguugcaggccuuauucaagcuuaccaugggccagaucauuaccuucuuucaagaggugccccacgucaucgaagagguuaugaacauugugcugaucgcccucagccugcuugcuauucugaaggggaucuacaauguggccacaugcggacucuucggccuggucuccuuucuucugcucugugggagaucuugcagcacgaccuauaaaggaguguacgaacugcagacacuggagcucgacauggcgucccugaacauguguaugccucuuucuugcaccaagaauaacagccaucacuauaucaugguuggcaaugaaacagggcuggagcucacccugacaaacaccuccauuaucaaucauaaauucuguaaccuuucugaugcucacaagaaaaaucuguacgaccaugcccucaugagcauuaucuccacguuucaccugagcauuccgaacuucaaucaguaugaggccaugucuugcgauuuuaacggaggcaagaucuccgugcaguacaaucugagccacaccuaugcugucgacgccgcuaaccauuguggcacaauugccaauggggugcuccaaaccuucaugcggauggcguggggaggcucuuacaucgcccuggauuccgggaagggaagcugggacugcaucaugacaucuuaccaguaucuuauuauccagaacaccacgugggaagaucacugucaguuuucccgccccagcccuauuggcuaccuggggcuccugucccaaagaacacgggacaucuauauuucucgcagacggcgcggaaccuucacauggacccuuagcgauuccgagagcaacgaaacccccggcggcuacugccugacaagauggaugcucaucgaggcugagcugaaauguuuugggaauacggccguugcuaagugcaacgaaaaacaugacgaggaguucugcgauaugcugcggcucuuugacuucuguaagcaggccauccgcagacugaaagcgccugcccagaugucuauucagcuuaucaauaaggcugugaacgcccugauuaaugaucaacucaucaugaagaaccaucugcgggacauuaugggaauccccuauugcaauuacuccaaauauugguaccuuaaccacaccgucacaggccgcaccagccugccuagauguuggcucgugucuaaugggagcuaccugaacgaaacacacuucuccgacgauaucgaacagcaggcugacaauaugauuaccgagcugcuccaaaaggaguauauggaucggcagggaaaaacgccgcugggccuuguggaccuguuugucuucucuaccagcuuuuaccucaucuccauuuuccugcaccugguuaagauccccacacaucgccacgugauugggaaaccuugccccaagccucauagacuuaaccacaugggaaucuguagcugcggccucuauaaacaccccggcgugccggucaaguggaagcggugaggacuaguaauaaggaaacuguaugaaugucugugggcaggaagugaagagauccuucuguaaagguuuuuggaauuaugucugcugaauaauaaacuuuuuugaaauaauaaaucugguagaaaaaugagaucucaaaggcucuuuucagagccaccaaaaaaaaaaaaaaaaaaaaaaaaaaaaaaaaaaaaaaaaaaaaaaaaaaaaaaaaaaaaaaaaagaauu

SEQ ID NO: 23988 - RNA, 1778 nt, Artificial Sequence
  mRNA product Design b-4 (hSL-A64-N5) comprising derived and/or modified sequence from LASV(LASV035-NIG-2009;Clade II)__AIT17588__GPCmut2 (opt5)
aggagagucccgcagucggcguccagcggcucugcuuguucgugugugugucguugcaggccuuauucaagcuuaccaugggccagaucauuaccuucuuucaagaggugccccacgucaucgaagagguuaugaacauugugcugaucgcccucagccugcuugcuauucugaaggggaucuacaauguggccacaugcggacucuucggccuggucuccuuucuucugcucugugggagaucuugcagcacgaccuauaaaggaguguacgaacugcagacacuggagcucgacauggcgucccugaacauguguaugccucuuucuugcaccaagaauaacagccaucacuauaucaugguuggcaaugaaacagggcuggagcucacccugacaaacaccuccauuaucaaucauaaauucuguaaccuuucugaugcucacaagaaaaaucuguacgaccaugcccucaugagcauuaucuccacguuucaccugagcauuccgaacuucaaucaguaugaggccaugucuugcgauuuuaacggaggcaagaucuccgugcaguacaaucugagccacgcuuaugccgucgacgcugccaaccauuguggcaccauugcgaauggggugcuccaaacauucaugcggauggccuggggaggcucuuacaucgcucuggauuccgggaagggaagcugggacugcaucaugaccucuuaccaguaucuuauuauccagaacacaaccugggaagaucacugucaguuuucccgccccagcccuauuggcuaccuggggcuccugucccaaagaacgcgggacaucuauauuucucgcagacggcgcggaacauucaccuggacacuuagcgauuccgagggcaacgaaacccccggcggguacugccugaccagauggaugcucaucgaggccgagcugaaauguuuuggaaauacagcuguugccaagugcaacgaaaaacaugacgaggaguucugcgauaugcugcggcucuuugacuucuguaagcaggcgauccgcagacugaaagccccugcucagaugagcauucagcuuaucaauaaggccgugaacgcucugauuaaugaucaacucaucaugaagaaccaucugcgggacauuaugggcauccccuauugcaauuacucuaaauauugguaccuuaaccacacggucaccgggaagacaucccugccucgcuguuggcucgugagcaauggaucuuaccugaacgaaacccacuucagcgacgauaucgaacagcaggccgacaauaugauuacagagcugcuccaaaaagaguauaucgauagacagggcaagaccccgcuggggcuuguggaccuguuugucuucuccacgucuuuuuaccucauuagcaucuuccugcaccugguuaaaauucccacacaucggcacgugaucggaaagccuugccccaaaccucaucgccuuaaccacaugggcauuuguuccugcggccucuauaagcaccccggggugccggucaaguggaaaagaugaggacuaguaauaaggaaacuguaugaaugucugugggcaggaagugaagagauccuucuguaaagguuuuuggaauuaugucugcugaauaauaaacuuuuuugaaauaauaaaucugguagaaaaaugagaucucaaaggcucuuuucagagccaccaaaaaaaaaaaaaaaaaaaaaaaaaaaaaaaaaaaaaaaaaaaaaaaaaaaaaaaaaaaaaaaaagaauu

SEQ ID NO: 23989 - RNA, 1778 nt, Artificial Sequence
  mRNA product Design b-4 (hSL-A64-N5) comprising derived and/or modified sequence from LASV(LASV1000-NIG-2009;Clade II)__AIT17782__GPCmut2 (opt5)
aggagagucccgcagucggcguccagcggcucugcuuguucgugugugugucguugcaggccuuauucaagcuuaccaugggccagaucauuaccuucuuucaagaggugccccacgucaucgaagagguuaugaacauugugcugaucgcccucagccugcuugcuauucugaaggggaucuacaauguggccacaugcggacucuucggccuggucuccuuucuucugcucugugggagaucuugcagcacgaccuauaaaggaguguacgaacugcagacacuggagcucgacauggcgucccugaacauguguaugccucuuucuugcaccaagaauaacagccaucacuauaucaugguuggcaaugaaacagggcuggagcucacccugacaaacaccuccauuaucaaucauaaauucuguaaccuuucugaugcucacaagaaaaaucuguacgaccaugcccucaugagcauuaucuccacguuucaccugagcauuccgaacuucaaucaguaugaggccaugucuugcgauuuuaacggaggcaagaucuccgugcaguacaaucugagccacaccuaugcugucgacgccgcuaaccauuguggcacaauugccaauggggugcuccaaaccuucaugcggauggcguggggaggcucuuacaucgcccuggauuccgggaagggaagcugggacugcaucaugacaucuuaccaguaucuuauuauccagaacaccacgugggaagaucacugucaguuuucccgccccagcccuauuggcuaccuggggcuccugucccaaagaacacgggacaucuauauuucucgcagacggcgcggaaccuucacauggacccuuagcgauuccgagggcaacgaaacccccggcggguacugccugacaagauggaugcucaucgaggcugagcugaaauguuuuggaaauacggccguugcuaagugcaacgaaaaacaugacgaggaguucugcgauaugcugcggcucuuugacuucuguaagcaggccaucaaacgccugaagaccccugcgcagaugagcauucagcuuaucaauaaggccgugaacgcucugauuaaugaucaacucaucaugaaaaaccaccugagagacauuaugggcauccccuauugcaauuacucuaaguauugguaccuuaaccacacagucaccgggaaaacaucccugccucgguguuggcucgugagcaauggaucuuaccugaacgaaacccauuucagcgacgauaucgaacagcaggccgacaauaugauuacggagcugcuccaaaaggaguauaucgaucgccagggcaaaacaccgcuggggcuuguggaccuguuugucuucuccaccucuuuuuaccucauuagcaucuuccugcaccugguuaagauucccacccauagacacguggugggaaaaccuugccccaagccucaucggcuuaaccacaugggcaucuguuccugcggccucuauaagcaccccggggucccggugaaauggaagcgcugaggacuaguaauaaggaaacuguaugaaugucugugggcaggaagugaagagauccuucuguaaagguuuuuggaauuaugucugcugaauaauaaacuuuuuugaaauaauaaaucugguagaaaaaugagaucucaaaggcucuuuucagagccaccaaaaaaaaaaaaaaaaaaaaaaaaaaaaaaaaaaaaaaaaaaaaaaaaaaaaaaaaaaaaaaaaagaauu

SEQ ID NO: 23990 - RNA, 1778 nt, Artificial Sequence
  mRNA product Design b-4 (hSL-A64-N5) comprising derived and/or modified sequence from LASV(LASV221-NIG-2010;Clade II)__AIT17624__GPCmut2 (opt5)
aggagagucccgcagucggcguccagcggcucugcuuguucgugugugugucguugcaggccuuauucaagcuuaccaugggccagaucauuaccuucuuucaagaggugccccacgucaucgaagagguuaugaacauugugcugaucgcccucagccugcuugcuauucugaaggggaucuacaauguggccacaugcggacucuucggccuggucuccuuucuucugcucugugggagaucuugcagcacgaccuauaaaggaguguacgaacugcagacacuggagcucgacauggcgucccugaacauguguaugccucuuucuugcaccaagaauaacagccaucacuauaucaugguuggcaaugaaacagggcuggagcucacccugacaaacaccuccauuaucaaucauaaauucuguaaccuuucugaugcucacaagaaaaaucuguacgaccaugcccucaugagcauuaucuccacguuucaccugagcauuccgaacuucaaucaguaugaggccaugucuugcgauuuuaacggaggcaagaucuccgugcaguacaaucugagccacaccuaugcuauugacgccgcuaaccauuguggcacaaucgccaaugggguccuccaaaccuucaugcggauggcguggggaggcucuuacaucgcccuggauuccgggaagggaagcugggacugcauuaugacaucuuaccaguaucuuaucauucagaacaccacgugggaagaucacugucaguuuucccgccccagcccuaucggcuaccuggggcuccugucccaaagaacacgggacauuuauaucucucgcagacggcgcggaaccuucacauggacccuuagcgauuccgagggcaacgaaacccccggcggguacugccugacaagauggaugcucaucgaggcugagcugaaauguuuuggaaauacggccguggcuaagugcaacgaaaaacaugacgaggaguucugcgauaugcugcggcucuuugacuucuguaagcaggccauucgcagacugaaaaccccugcgcagaugagcauccagcuuauuaauaaggccguuaacgcucugaucaaugaucaacucauuaugaagaaccaucugcgggacaucaugggcauccccuauugcaauuacucuaaauauugguaccuuaaccacacagugaccgggaagacaucccugccucgcuguuggcucgucagcaauggaucuuaccugaacgaaacccacuucagcgacgauauugaacagcaggccgacaauaugaucacggagaugcugcaaaaagaguauauggauagacagggcaagacaccgcucgggcugguggaccuuuuuguguucuccaccucuuuuuaccugauuagcaucuuccuccaccuggucaaaauucccacccaucggcacguuaucggaaagccuugccccaaaccucaucgccugaaccacaugggcauuuguuccugcggccuuuauaagcaccccggggugccggugaaguggaaaagaugaggacuaguaauaaggaaacuguaugaaugucugugggcaggaagugaagagauccuucuguaaagguuuuuggaauuaugucugcugaauaauaaacuuuuuugaaauaauaaaucugguagaaaaaugagaucucaaaggcucuuuucagagccaccaaaaaaaaaaaaaaaaaaaaaaaaaaaaaaaaaaaaaaaaaaaaaaaaaaaaaaaaaaaaaaaaagaauu

SEQ ID NO: 23991 - RNA, 1778 nt, Artificial Sequence
  mRNA product Design b-4 (hSL-A64-N5) comprising derived and/or modified sequence from LASV(LASV237-NIG-2010;Clade II)__AIT17638__GPCmut2 (opt5)
aggagagucccgcagucggcguccagcggcucugcuuguucgugugugugucguugcaggccuuauucaagcuuaccaugggccagaucauuaccuucuuucaagaggugccccacgucaucgaagagguuaugaacauugugcugaucgcccucagccugcuugcuauucugaaggggaucuacaauguggccacaugcggacucuucggccuggucuccuuucuucugcucugugggagaucuugcagcacgaccuauaaaggaguguacgaacugcagacacuggagcucgacauggcgucccugaacauguguaugccucuuucuugcaccaagaauaacagccaucacuauaucaugguuggcaaugaaacagggcuggagcucacccugacaaacaccuccauuaucaaucauaaauucuguaaccuuucugaugcucacaagaaagaccuguacgaucaugcccucaugagcauuaucuccacguuucaccugagcauuccgaauuucaaccaguaugaggccaugucuugcgacuuuaauggaggcaagaucuccgugcaguacaaccugagccacaccuaugcugucgaugccgcuaaucauuguggcacaauugccaacggggugcuccaaaccuucaugcggauggcguggggaggcucuuacaucgcccuggacuccgggaagggaagcugggauugcaucaugacaucuuaccaguaucuuauuauccagaauaccacgugggaagaccacugucaguuuucccgccccagcccuauuggcuaccuggggcuccugucccaaagaacacgggauaucuauauuucucgcagacggcgcggaaccuucacauggacccuuagcgacuccgagggcaacgaaacccccggcggguacugccugacaagauggaugcucaucgaggcugagcugaaauguuuuggaaacacggccguugcuaagugcaaugaaaaacaugaugaggaguucugcgacaugcugcggcucuuugauuucuguaagcaggccauccgcagacugaaaaccccugcgcagaugagcauucagcuuaucaacaaggccgugaaugcucugauuaacgaccaacucaucaugaagaaucaucugcgggacauuaugggcauccccuauugcaacuacucuaaauauugguaccuuaaucacacagucaccgggaagacaucccugccucgcuguuggcucgugagcaacggaucuuaccugaaugaaacccacuucagcgaugacaucgaacagcaggccgauaacaugauuacggagcugcuccaaaaagaguauauggacagacagggcaagacaccgcuggggcuuguggaucuguuugucuucuccaccucuuuuuaccucaucagcauuuuccugcaccugaucaaaauucccacccaucggcacaucacaggaaagccuugccccaaaccucaucgccuuaaucacaugggcauuuguuccugcggccucuauaagcaccccgggguuccggugaaguggaaaagaugaggacuaguaauaaggaaacuguaugaaugucugugggcaggaagugaagagauccuucuguaaagguuuuuggaauuaugucugcugaauaauaaacuuuuuugaaauaauaaaucugguagaaaaaugagaucucaaaggcucuuuucagagccaccaaaaaaaaaaaaaaaaaaaaaaaaaaaaaaaaaaaaaaaaaaaaaaaaaaaaaaaaaaaaaaaaagaauu

SEQ ID NO: 23992 - RNA, 1778 nt, Artificial Sequence
  mRNA product Design b-4 (hSL-A64-N5) comprising derived and/or modified sequence from LASV(LASV253-NIG-2011;Clade II)__AIT17670__GPCmut2 (opt5)
aggagagucccgcagucggcguccagcggcucugcuuguucgugugugugucguugcaggccuuauucaagcuuaccaugggccagaucauuaccuucuuucaagaggugccccacgucaucgaagagguuaugaacauugugcugaucgcccucagccugcuugcuauucugaaggggaucuacaauguggccacaugcggacucuucggccuggucuccuuucuucugcucugugggagaucuugcagcacgaccuauaaaggaguguacgaacugcagacacuggagcucgacauggcgucccugaacauguguaugccucuuucuugcaccaagaauaacagccaucacuauaucaugguuggcaaugaaacagggcuggagcucacccugacaaacaccuccauuaucaaucauaaauucuguaaccuuucugaugcucacaagaaaaaucuguacgaccaugcccucaugagcauuaucuccacguuucaccugagcauuccgaacuucaaucaguaugaggccaugucuugcgauuuuaacggaggcaagaucuccgugcaguacaaucugagccacaccuaugcugucgacgccgcuaaccauuguggcacaauugccaauggggugcuccaaaccuucaugcggauggcguggggaggcucuuacaucgcccuggauuccgggaagggaagcugggacugcaucaugacaucuuaccaguaucuuauuauccagaacaccacgugggaagaucacugucaguuuucccgccccagcccuauuggcuaccuggggcuccugucccaaagaacacgggacaucuauauuucucgcagacggcgcggaaccuucacauggacccuuagcgauuccgagggcaacgaaacccccggcggguacugccugacaagauggaugcucaucgaggcugagcugaaauguuuuggaaauacggccguugcuaagugcaacgaaaaacaugacgaggaguucugcgauaugcugcggcucuuugacuucuguaagcaggccauccgcagacugaaagcgccugcccagaugagcauucagcuuaucaauaaggcugugaacgcccugauuaaugaucaacucaucaugaagaaccaucugcgggacauuaugggcauccccuauugcaauuacucuaaauauugguaccuuaaccacaccgucacagggcgcaccucccugccuagauguuggcucgugagcaauggaucuuaccugaacgaaacacacuucagcgacgauaucgaacagcaggcugacaauaugauuaccgagcugcuccaaaaggaguauaucgaucggcagggcaaaacgccgcuggggcuuguggaccuguuugucuucuccacaucuuuuuaccucauuagcaucuuccugcaccugguuaagauucccacccaucgccacaucauuggaaaaccuugccccaagccucauagacuuaaccacaugggcaucuguuccugcggccucuauaaacaccccggggugccggugaaguggaagcggugaggacuaguaauaaggaaacuguaugaaugucugugggcaggaagugaagagauccuucuguaaagguuuuuggaauuaugucugcugaauaauaaacuuuuuugaaauaauaaaucugguagaaaaaugagaucucaaaggcucuuuucagagccaccaaaaaaaaaaaaaaaaaaaaaaaaaaaaaaaaaaaaaaaaaaaaaaaaaaaaaaaaaaaaaaaaagaauu

SEQ ID NO: 23993 - RNA, 1778 nt, Artificial Sequence
  mRNA product Design b-4 (hSL-A64-N5) comprising derived and/or modified sequence from LASV(LASV254-NIG-2011;Clade II)__AIT17674__GPCmut2 (opt5)
aggagagucccgcagucggcguccagcggcucugcuuguucgugugugugucguugcaggccuuauucaagcuuaccaugggccagaucauuaccuucuuucaagaggugccccacgucaucgaagagguuaugaacauugugcugaucgcccucagccugcuugcuauucugaaggggaucuacaauguggccacaugcggacucuucggccuggucuccuuucuucugcucugugggagaucuugcagcacgaccuauaaaggaguguacgaacugcagacacuggagcucgacaugaccaaccugaauauguguaugccucuuuccugcacaaagaacaauucucaucacuauaucaugguuggcaacgaaaccgggcuggagcucacacugaccaauacgagcauuaucaaccauaaauucuguaaucuuuccgaugcgcacaagaaaaaccuguacaaucaugcucucaugucuauuaucagcaccuuucaccuguccauuccgaacuucaaucaguaugaggccaugagcugcgacuuuaacggaggcaagaucucugugcaguacaaucugucccacagcuaugccgucgaugcugccaaccauuguggcacaauugcuaacggggugcuccaaaccuucaugcggauggccuggggaggcucuuacaucgcgcuggacuccgggaagggaaauugggauugcaucaugacaagcuaccaguaucuuauuauccagaacaccacgugggaagaccacugucaguuuucucgccccuccccuauuggcuaccuggggcuccugagccaaagaacacgggauaucuauauuucccgcagacggcgcggaaccuucacauggacccuuucugacagcgagggcaaugaaacccccggcggguacugccugacaagauggaugcucaucgaggccgagcugaaauguuuuggaaacacggcuguugccaagugcaaugaaaaacaugaugaggaguucugcgacaugcugcggcucuuugauuucuguaagcaggcuauccgcagacugaaaaccccugcccaggcgaacauucagcuuaucaauaaggccgugaacgcucugauuaaugaccaacucaucaugaagaaccaucugcgggauauuaugggcauccccuauugcaauuacuccaaauauugguaccuuaaccacacagucaccgggaagacaagccugccucgcuguuggcucgugucuaauggauccuaccugaacgaaacccacuucagcgacgacaucgaacagcaggccgauaauaugauuacggagcugcuccaaaaagaguauauggacagacagggcaagacaccgcuggggcuuguggaucuguuugucuucucuaccagcuuuuaccucaucuccauuuuccugcaccugguuaaaauccccacccaucggcacgugauuggaaagccuugccccaaaccucaucgccuuaaccacaugggcaucuguucuugcggccucuauaagcaccccggggugccggucaaguggaaaagaugaggacuaguaauaaggaaacuguaugaaugucugugggcaggaagugaagagauccuucuguaaagguuuuuggaauuaugucugcugaauaauaaacuuuuuugaaauaauaaaucugguagaaaaaugagaucucaaaggcucuuuucagagccaccaaaaaaaaaaaaaaaaaaaaaaaaaaaaaaaaaaaaaaaaaaaaaaaaaaaaaaaaaaaaaaaaagaauu

SEQ ID NO: 23994 - RNA, 1778 nt, Artificial Sequence
  mRNA product Design b-4 (hSL-A64-N5) comprising derived and/or modified sequence from LASV(Nig08-A19;Clade III)__ADU56618__GPCmut2 (opt5)
aggagagucccgcagucggcguccagcggcucugcuuguucgugugugugucguugcaggccuuauucaagcuuaccaugggccagaucgugaccuucuuucaagaggucccccacguuauugaagaggugaugaacaucgugcugauugcccucagcauccuggcuauucuuaaggggcuguacaauaucgccacaugcggacucaucggccuggucacguuccuucugcucuccgggagaucuuguagcaugaccuauaaaggaguguacgaacugcagacacuggagcucaacaugaauacccugaacaugugcaugccucuuuccuguacaaagaauaacucucaucacuauauuaugguuggcaaugaaaccgggcuggagcucacacugaccaacacgagccuucugcaucacaaauuuugcaaucucuccgacgcgcauaagaaaaaccuguacgaucacacccugaugucuaucauuagcacauuccaccucuccaucccgaauuuuaaccaguaugaggcuaugagcugugacuucaauggaggcaagauuaccgugcaguacaaccugucucauuccuaugccaucgaugccgcuaaucacugcggcacagucgccaacggggugcuucaaaccuuuaugcggauggcuuggggaggcagcuacauugcccuggacucugggcgcggaaagugggauuguaucaugacguccuaccaguaucucaucauucagaacacaaccugggaagaccauugccaguucagcagacccucuccuaucggcuaccuggggcuucugucccaacggacacgcgauauuuauaucagcagacggcgcagaggaaccuuuaccuggacacucuccgacucugagggcaaugaaacgcccggcggguacugucugacccgguggaugcugauugaggcggagcucaaaugcuucggaaacacagccguugcuaaguguaaugaaaaacacgaugaggaauuuugcgacaugcugcgccuuuucgauuuuugcaagcaggccaucagacggcugaaagcuccugcccagaugagcauccagcucauuaacaaggcggugaaugcccugaucaacgaccaacuuauuaugaagaaucaucugcgcgauaucaugggcauucccuauuguaacuacuccaaauauugguaccucaaucacaccagcacagggagaaccucucugccucggugcuggcuggucuccaacggaagcuaccucaaugagacgcacuucucugacgacaucgaacagcaggcugauaacaugaucacagagaugcugcaaaaggaguaucuugaccgccagggcaaaaccccgcuggggcucguggaucuguucguguuuagcaccuccuucuaccugauuucuaucuuucuucaucucgucaagauucccacacacagacauaucguuggaaaaccuugucccaagccucaccggcugaaucacaugggcauuugcagcuguggccuguauaaacagcccggggugccggugagauggaagcgcugaggacuaguaauaaggaaacuguaugaaugucugugggcaggaagugaagagauccuucuguaaagguuuuuggaauuaugucugcugaauaauaaacuuuuuugaaauaauaaaucugguagaaaaaugagaucucaaaggcucuuuucagagccaccaaaaaaaaaaaaaaaaaaaaaaaaaaaaaaaaaaaaaaaaaaaaaaaaaaaaaaaaaaaaaaaaagaauu

SEQ ID NO: 23995 - RNA, 1781 nt, Artificial Sequence
  mRNA product Design b-4 (hSL-A64-N5) comprising derived and/or modified sequence from LASV(G1180-SLE-2010;Clade IV)__AIT17168__GPCmut2 (opt5)
aggagagucccgcagucggcguccagcggcucugcuuguucgugugugugucguugcaggccuuauucaagcuuaccaugggccagaucgugaccuucuuucaagaggucccccacguuauugaagaggugaugaacaucgugcugauugcccucagcauccuggcuguccuuaaggggcuguacaauuucgccacaugcggacucgugggccugcuuacguuucugcuccugugugggagauccugcaccgcgucucgguauaaaggaguuuacgaacugcagacacucgagcugaacauggaaacccuuaauauguguaugccucugagcugcacaaagaacaauucccaucacuauauuauggugggcaacgagaccgggcucgagcugacacuuaccaauacgucuaucaucaaccauaaauucuguaaucugagcgacgcucacaagaaaaaccucuacgaucaugcccugauguccauuaucucuaccuuucaccugagcauuccgaauuucaaccaguaugaagccauguccugcgacuuuaauggaggcaagaucagcguccaguacaaccucucucacuccuaugcuggcgaugccgcuaaucauugugggacaguggccaacggaguucugcaaaccuucaugcgcauggcguggggcgggagcuacauugcccuugacucuggacacggcuccugggauugcaucaugacaagcuaccaguaucugauuauccagaacaccacgugggaggaccauugucaguuuucuagacccuccccuaucggguaccucggacugcuuagccaacggacacgcgauauuuauaucuccagacggcgcagaggcaccuucacauggacccugucugacagcgaaggcaaggauacccccgggggauacugccucacacgguggaugcugauugaggcugagcugaaauguuuuggcaauacggccguggcuaagugcaacgaaaaacacgacgaggaguucugcgauaugcuccgccuguuugacuucuguaagcaggccauccagagacuuaaagcgccugcccagauguccauucaacugaucaauaaggcugucaacgcccucaucaaugaucagcugauuaugaagaaccaccuucgggacaucauggggauucccuauugcaauuacagcaaauauugguaccugaaccauaccacaaccggaaagacaucucucccuaaauguuggcugguguccaauggcagcuaccugaacgaaacccacuucucugacgauaucgaacagcaagcugacaauaugauuacggagaugcuccagaaggaguauauggaacgccaggggaaaacaccgcugggacuuguggaucuguuugucuucagcaccuccuuuuaccucaucucuaucuuccugcaucugguuaagauucccacccacagacauaucgugggcaaaagcugcccuaagccccaccggcuuaaccacaugggcauuuguuccugcgggcucuauaagcagccuggagugcccgucaaauggaagcgcugaggacuaguaauaaggaaacuguaugaaugucugugggcaggaagugaagagauccuucuguaaagguuuuuggaauuaugucugcugaauaauaaacuuuuuugaaauaauaaaucugguagaaaaaugagaucucaaaggcucuuuucagagccaccaaaaaaaaaaaaaaaaaaaaaaaaaaaaaaaaaaaaaaaaaaaaaaaaaaaaaaaaaaaaaaaaagaauu

SEQ ID NO: 23996 - RNA, 1781 nt, Artificial Sequence
  mRNA product Design b-4 (hSL-A64-N5) comprising derived and/or modified sequence from LASV(G1442-SLE-2011;Clade IV)__AIT17180__GPCmut2 (opt5)
aggagagucccgcagucggcguccagcggcucugcuuguucgugugugugucguugcaggccuuauucaagcuuaccaugggccagaucgugaccuucuuucaagaggucccccacguuauugaagaggugaugaacaucgugcugauugcccucagcauccuggcuguccuuaaggggcuguacaauguggccacaugcggacucauuggccugguuacguuccuucugcucugugggagauccugcaccacaacccuguauaaaggaguguacgaacugcagacacucgagcugaacauggaaacccuuaauauguguaugccucugucuugcacaaagaacaauagccaucacuauauccgggucggcaacgagaccgggcucgagcugacgcuuaccaauacauccaucauuaaccauaaauuuuguaaucugucugacgcgcacaagaaaaaccucuacgaucaugcucugaugagcaucauuuccaccuuccaccugucuaucccgaauuuuaaccaguaugaagccaugagcugcgacuucaauggaggcaagauuuccgugcaguacaaccucagccacucuuaugccggcgaugcugccaaucauugugggacaguugcuaacggagugcugcaaaccuuuaugcgcauggccuggggcggguccuacaucgcgcuugacagcggaagaggcaacugggauugcauuaugacgucuuaccaguaucugaucauccagaauacaaccugggacgaucacugucaguucucccggcccagcccuauuggguaccucggacugcuuucucaacgcacaagagacgucuauaucucccggcgcagacggggcaccuuuaccuggacacugagcgauuccgagggcaaggacacgcccgggggauacugccucacccgcuggaugcugauugaagccgagcugaaauguuucggcaacacagcuguggccaagugcaaugagaaacaugaugaagaguuuugcgacaugcucagacuguucgauuuuuguaagcaggcuauccagcggcuuaaagccccugcgcagaugucuauucaacugaucaacaaggccgugaaugcucucaucaacgaccagcugauuaugaagaaucaccuucgcgacaucauggggauucccuauugcaacuacagcaaauauugguaccugaauaacaccgccacaggaaagaccucccucccuaaauguuggcugaucagcaauggcucuuaccugaacgaaacgcacuucuccgaugacauugagcaggaagcugauaauaugaucacagagaugcuccaaaaggaguauauggaaagacaggggaaaaccccgcugggacuugucgaccuguucguuuuuagcaccucuuucuaccucaucagcauuuuucugcaucuggugaagauccccacacaccggcauauugugggcaaauccugcccuaagccccaccgccuuaaccauaugggcaucuguucuugcgggcucuauaagcagccuggaguccccgugagauggaaacggugaggacuaguaauaaggaaacuguaugaaugucugugggcaggaagugaagagauccuucuguaaagguuuuuggaauuaugucugcugaauaauaaacuuuuuugaaauaauaaaucugguagaaaaaugagaucucaaaggcucuuuucagagccaccaaaaaaaaaaaaaaaaaaaaaaaaaaaaaaaaaaaaaaaaaaaaaaaaaaaaaaaaaaaaaaaaagaauu

SEQ ID NO: 23997 - RNA, 1781 nt, Artificial Sequence
  mRNA product Design b-4 (hSL-A64-N5) comprising derived and/or modified sequence from LASV(G3010-SLE-2013;Clade IV)__AIT17344__GPCmut2 (opt5)
aggagagucccgcagucggcguccagcggcucugcuuguucgugugugugucguugcaggccuuauucaagcuuaccaugggccagaucgugaccuucuuucaagaggucccccacguuauugaagaggugaugaacaucgugcugauugcccucagcauccuggcuguccuuaaggggcuguacaauuucgccacaugcggacucgugggccugguuacguuucuucugcucugugggagauccugcaccacaucucuguauaaaggaguguacgaacugcagacccucgagcugaacauggaaacacuuaauauguguaugccucugagcugcaccaagaacaauucccaucacuauauuauggucggcaacgagacagggcucgagcugacccuuacgaauaccucuaucaucaaccauaaauucuguaaucugagcgacgcgcacaagaaaaaccucuacaaucaugcucugauguccauuaucucuacauuucaccugagcauuccgaacuucaaucaguaugaagccauguccugcgauuuuaacggaggcaagaucagcgugcaguacaaucucucucacuccuaugccggcgacgcugccagccauugugggaccguugcuaacggagugcugcaaacauucaugcggauggccuggggcgggucuuacauugcgcuugauuccggauacggcaagugggacugcaucaugaccagcuaucaguaccugauuauccagaacacgacaugggaggaucacugucaguuuucucgccccuccccuaucggguaucucggacugcuuagccaaagaacccgggacauuuacaucucccgcagacggcgcggcacauucaccuggacccugucugauagcgaaggcaaagacacacccgggggauauugccucacgagauggaugcugauugaggccgagcugaaguguuuuggcaauaccgcugucgccaaaugcaacgaaaagcaugaugaggaguucugcgacaugcuccggcuguuugauuucuguaaacaggcuauccagcgccuuaagaccccugcccagauguccauucaacugaucaauaaggcggugaacgcccucaucaaugaccagcugauuaugaaaaaccaccuuagagauaucauggggauucccuacugcaauuauagcaaguacugguaccugaaccacacaacaaccggaaaaacgucucucccuaaguguuggcugguguccaauggcagcuaucugaacgaaacacauuucucugacgacaucgaacagcaagcugauaauaugauuaccgagaugcuccagaaagaguacauggaacggcaggggaagaccccgcugggacuugucgaccuguuuguuuucagcacauccuuuuaucucaucucuaucuuccugcaccuggugaaaauucccacccaucgccacaucgugggcaagagcugcccuaagccccauagacuuaaccacaugggcauuuguuccugcgggcucuacaaacagccuggaguccccgugcgguggaagcgcugaggacuaguaauaaggaaacuguaugaaugucugugggcaggaagugaagagauccuucuguaaagguuuuuggaauuaugucugcugaauaauaaacuuuuuugaaauaauaaaucugguagaaaaaugagaucucaaaggcucuuuucagagccaccaaaaaaaaaaaaaaaaaaaaaaaaaaaaaaaaaaaaaaaaaaaaaaaaaaaaaaaaaaaaaaaaagaauu

SEQ ID NO: 23998 - RNA, 1781 nt, Artificial Sequence
  mRNA product Design b-4 (hSL-A64-N5) comprising derived and/or modified sequence from LASV(G502-SLE-2009;Clade IV)__AIT17126__GPCmut2 (opt5)
aggagagucccgcagucggcguccagcggcucugcuuguucgugugugugucguugcaggccuuauucaagcuuaccaugggccagaucgugaccuucuuucaagaggucccccacguuauugaagaggugaugaacaucgugcugauugcccucagcauccuggcuguccuuaaggggcuguacaauuucgccacaugcggacucgugggccugcuuacguuucugcuccugugugggagauccugcaccacaggacuguauaaaggcguuuacgaacuccagacccuggagcuuaacauggaaacacugaauauguguaugccucucucuugcaccaagaacaauagccaucacuauauuaugguggggaacgagacaggacuggagcuuacccugacgaauaccuccaucaucaaccauaaauucuguaaucucucugacgcgcacaagaaaaaccuguacgaucaugcucugaugagcauuaucuccacauuucaccucucuauuccgaauuucaaccaguaugaagccaugagcugcgacuuuaauggcggcaagaucuccguccaguacaaccugagccacucuuaugccggggaugcugccgaccauuguggaaccguggcuaauggcguucuucaaacauucaugcggauggccuggggaggguccuacauugcgcuggauagcggccgcgggagaugggacugcaucaugaccucuuaccaguaucucauuauccagaacacgacaugggaggaucacugucaguuuucccggcccagcccuaucggauaccugggccuucugucucaacgcaccagagacauuuauaucucccggcgcagacggggcacauucaccuggacccucagcgauuccgaagggaaggacacacccggaggcuacugccugacgcgcuggaugcugauugaggccgagcucaaauguuuugggaacaccgcuguggccaagugcaaugaaaaacaugaugaggaguucugcgacaugcugagacuuuuugauuucuguaagcaggcuauccagcggcugaaagccccugcgcagaugucuauucaacucaucaacaaggccgucaaugcucugaucaacgaccagcuugugaugaagaaucaucugcgcgacauuaugggaauccccuauugcaacuacagcagauauugguaccucaaucacacaaccacaggccggaccucccugccuaaauguuggcuggugagcaacgggucuuaccucaaugaaacgcacuucuccgaugacauugaacagcaagccgauaacaugaucacagagaugcugcagaaggaguauauggaacgccagggaaaaaccccgcuuggccuggucgaccucuuuguuuucagcaccucuuuuuaccugauuagcaucuuccugcaccuugugaagauccccacacauagacacauugugggcaaauccugcccuaagccccaucggcucaaucacauggggaucuguucuugcggacuguauaaacagccuggcguccccgugaaguggaagagaugaggacuaguaauaaggaaacuguaugaaugucugugggcaggaagugaagagauccuucuguaaagguuuuuggaauuaugucugcugaauaauaaacuuuuuugaaauaauaaaucugguagaaaaaugagaucucaaaggcucuuuucagagccaccaaaaaaaaaaaaaaaaaaaaaaaaaaaaaaaaaaaaaaaaaaaaaaaaaaaaaaaaaaaaaaaaagaauu

SEQ ID NO: 23999 - RNA, 1781 nt, Artificial Sequence
  mRNA product Design b-4 (hSL-A64-N5) comprising derived and/or modified sequence from LASV(G733-SLE-2010;Clade IV)__AIT17154__GPCmut2 (opt5)
aggagagucccgcagucggcguccagcggcucugcuuguucgugugugugucguugcaggccuuauucaagcuuaccaugggccagaucgugaccuucuuucaagaggucccccacguuauugaagaggugaugaacaucgugcugauugcccucagcauccuggcuguccuuaaggggcuguacaauuucgccacaugcggaauugugggccucguuuccuuucugcuucugugugggagaucuugcacgaccagccucuauaaaggaguguacgaacugcagacacuggagcucaacauggaaacccugaauauguguaugccucuuuccugcacaaagaacaauucucaucacuauaucauggucggcaacgagaccgggcuggagcucacacugaccaauacgagcaucauuaaccauaaauucuguaaucuuuccgacgcgcacaagaaaaaccuguacgaucaugcucucaugucuaucauuagcaccuuucaccuguccaucccgaauuucaaccaguaugaagccaugagcugcgacuuuaauggaggcaagauuucugugcaguacaaccugucccacagcuaugccggcgaugcugccaaucauugugggacaaucgcuaacggaguucuccaaaccuucaugcggauggccuggggcgggucuuacauugcgcuggacuccggacgcgauagaugggacugcaucaugacaagcuaccaguaucuuaucauucagaacaccacgugggaggaucacugucaguuuucucggcccuccccuaucggcuaccuggggcuccugagccaacgcacaagagacauuuauaucucccggcgcagacggggaaccuucacauggacccuuucugauagcgaaggcaaggacacccccggcggguacugccugacacgcuggaugcucauugaggccgagcugaaauguuuuggaaauacggcuguggccaagugcaacgaaaaacaugaugaggaguucugcgacaugcugagacucuuugauuucuguaagcaggcuauccagcggcugaaagccccugcgcagauguccauccaacuuauuaauaaggccgucaacgcucugaucaaugaccagcucauuaugaagaaccaucugcgcgacaucaugggcauucccuauugcaauuacagcaaauauugguaccuuaaccacaccacaaccgggaagacaucucugccuaaauguuggcucguguccaauggaagcuaccugaacgaaacccacuucucugaugacaucgaacagcaagccgauaauaugaucacggagaugcugcagaaggaguauauggaaagacagggcaaaacaccgcucgggcugguggaccuuuuugucuucagcaccuccuuuuaccugauuucuaucuuccuccaccugguuaagauucccacccaucggcacguggugggaaaaagcugcccuaagccccaucgccugaaccacaugggcaucuguuccugcggccuuuaugggcagccuggaguccccgugaaguggaaaagaugaggacuaguaauaaggaaacuguaugaaugucugugggcaggaagugaagagauccuucuguaaagguuuuuggaauuaugucugcugaauaauaaacuuuuuugaaauaauaaaucugguagaaaaaugagaucucaaaggcucuuuucagagccaccaaaaaaaaaaaaaaaaaaaaaaaaaaaaaaaaaaaaaaaaaaaaaaaaaaaaaaaaaaaaaaaaagaauu

SEQ ID NO: 24000 - RNA, 1781 nt, Artificial Sequence
  mRNA product Design b-4 (hSL-A64-N5) comprising derived and/or modified sequence from MOPV/LASV reassortant(IGS-1;Clade IV)__AFY05576__GPCmut2 (opt5)
aggagagucccgcagucggcguccagcggcucugcuuguucgugugugugucguugcaggccuuauucaagcuuaccaugggccagaucgugaccuucuuucaagaggucccccacguuauugaagaggugaugaacaucgugcugauugcccucagcguccuggcugugcuuaaggggcuguacaauuucgccacaugcggacucguuggccuggugacguuucuucugcucugugggagauccugcaccacaucucuguauaaaggagucuacgaacugcagacccucgagcugaacauggaaacacuuaauauguguaugccucugagcugcaccaagaacaauucccaucacuauaucauggugggcaacgagacagggcucgagcugacccuuacgaauaccucuauuaucaaccauaaauucuguaaucugagcgacgcgcacaagaaaaaccucuacgaucaugcucugauguccaucauuucuacauuucaccugagcaucccgaauuucaaccaguaugaagccauguccugcgacuuuaauggaggcaagauuagcguucaguacaaccucucucacuccuaugccggcgaugcugccaaucauugugggaccguggcuaacggaguccugcaaacauucaugcggauggccuggggcgggagcuacaucgcgcuugacucuggacgcggcaacugggauugcauuaugaccuccuaccaguaucugaucauucagaauacgacaugggaggaccacugucaguuuagcagacccucuccuaucggguaccucggacugcuuucccaacggacccgcgauaucuauauuagcagacggcgcagaggcacauucaccuggacccuguccgacucugaaggcgaggauacacccgggggauacugccucacgcgguggaugcugaucgaggccgaacugaaguguuuuggcaacaccgcuguggccaaaugcaaugagaagcaugacgaagaguucugcgauaugcuccgccuguuugacuucuguaaacaggcuauucagagacuuaaggccccugcgcagaugagcauccaacugauuaacaaagccgugaaugcucucaucaacgaucagcugaucaugaagaaucaccuucgggacauuauggggauccccuauugcaacuacuccaaguauugguaccugaaucacacaaccacaggacgcaccagccucccuaaauguuggcuggucucuaacggcuccuaccugaaugaaacgcauuucagcgacgauauugagcagcaagccgacaacaugaucacagagaugcuccagaaggaauauauggagagacaggggaaaaccccgcugggacuuguugaucuguuuguguucucuaccagcuuuuaccucauuuccaucuuccugcaccuggugaagauccccacacaucggcacauugucggcaaaucuugcccuaagccccaucgccuuaaucacaugggcaucuguagcugcgggcucuauaaacagccuggagugcccguuaaguggaagagaugaggacuaguaauaaggaaacuguaugaaugucugugggcaggaagugaagagauccuucuguaaagguuuuuggaauuaugucugcugaauaauaaacuuuuuugaaauaauaaaucugguagaaaaaugagaucucaaaggcucuuuucagagccaccaaaaaaaaaaaaaaaaaaaaaaaaaaaaaaaaaaaaaaaaaaaaaaaaaaaaaaaaaaaaaaaaagaauu

SEQ ID NO: 24001 - RNA, 1781 nt, Artificial Sequence
  mRNA product Design b-4 (hSL-A64-N5) comprising derived and/or modified sequence from LASV(LM765-SLE-2012;Clade IV)__AIT17814__GPCmut2 (opt5)
aggagagucccgcagucggcguccagcggcucugcuuguucgugugugugucguugcaggccuuauucaagcuuaccaugggccagaucgugaccuucuuucaagaggucccccacguuauugaagaggugaugaacaucgugcugauugcccucagcauccuggcuguccuuaaggggcuguacaauuucgccacaugcggacucgugggccugguuacguuucuucugcucugugggagauccugcaccacaucucuguauaaaggaguguacgaacugcagacccucgagcugaacauggaaacacuuaauauguguaugccucugagcugcaccaagaacaauucccaucacuauauuauggucggcaacgagacagggcucgagcugacccuuacgaauaccucuaucaucgaccauaaauucuguaaccugagcgaugcgcaccggaagaaucucuacgaccaugcucugauguccauuaucucuacauuucaccugagcauuccgaacuucaaucaguaugaagccauguccugcgauuuuaacggaggcaaaaucagcgugcaguacaaucucucucacuccuaugccaaggacgcugccgaucauuguggcaccguugcuaacggggugcugcaaacauucaugcgcauggccuggggaggcagcuacauugcgcuugacucugggagaggacggugggauugcaucaugaccuccuaccaguaucugauuauccagaauacgacaugggaggaccacugucaguuuagccgccccucuccuaucggcuaccucgggcugcuuucccaaagaacccgggauauuuauaucagccgcagacggcgcggaacauucaccuggacccuguccgacucugaaggcaaggauacacccggcggguacugccucacgagauggaugcugauugaggccgagcugaaauguuuuggaaacaccgcugucgccaagugcaacgaaaaacaugacgaggaguucugcgauaugcuccggcuguuugacuucuguaagcaggcuauccagcgccuuaaagccccugcgcagaugagcauucaacugaucaauaaggccgugaacgcucucaucaaugaccagcugauuaugaagaaccaccuuagagauaucaugggcauucccuauugcaauuacuccaaauauugguaccugaaccacacaaccacagggaagaccagccucccuaaauguuggcuggugucuaauggauccuaccugaacgaaacgcauuucagcgacgauaucgaacagcaagccgacaauaugauuacagagaugcuccagaaggaguauauggaacggcagggcaaaaccccgcuggggcuugucgaucuguuuguuuucucuaccagcuuuuaccucaucuccaucuuccugcaccuggugaagauucccacacaucgccacaucgugggaaaaccuugccccaagccucauagacuuaaccacaugggcauuuguucuugcggccucuauaagcagcccggggucccggugaaauggaagcggugaggacuaguaauaaggaaacuguaugaaugucugugggcaggaagugaagagauccuucuguaaagguuuuuggaauuaugucugcugaauaauaaacuuuuuugaaauaauaaaucugguagaaaaaugagaucucaaaggcucuuuucagagccaccaaaaaaaaaaaaaaaaaaaaaaaaaaaaaaaaaaaaaaaaaaaaaaaaaaaaaaaaaaaaaaaaagaauu

SEQ ID NO: 24002 - RNA, 1781 nt, Artificial Sequence
  mRNA product Design b-4 (hSL-A64-N5) comprising derived and/or modified sequence from LASV(LM776-SLE-2012;Clade IV)__AIT17824__GPCmut2 (opt5)
aggagagucccgcagucggcguccagcggcucugcuuguucgugugugugucguugcaggccuuauucaagcuuaccaugggccagaucgugaccuucuuucaagaggucccccacguuauugaagaggugaugaacaucgugcugauugcccucagcauccuggcuguccuuaaggggcuguacaauuucgccacaugcggacucgugggccugguuacguuucuucugcucugugggagauccugcaccacaucuguguauaaaggagucuacgaacugcagacccuggagcucaacauggaaacacugaauauguguaugccucuuagcugcaccaagaacaauucccaucacuauauuauggugggcaacgagacagggcuggagcucacccugacgaauaccucuaucaucaaccauaaauucuguaaucuuagcgacgcgcacaagaaaaaccuguacgaucaugcucucauguccauuaucucuacauuucaccugagcauuccgaauuucaaccaguaugaagccauguccugcgacuuuaauggaggcaagaucagcguucaguacaaccugucucacuccuaugccggcgaugcugccaaucauugugggaccguggcuaacggaguccuccaaacauucaugcggauggccuggggcgggagcuacauugcgcuggacucuggacacggcaagugggauugcaucaugaccuccuaccaguaucuuauuauccagaacacgacaugggaggaccauugucaguuuagccgccccucuccuaucggguaccugggacuccugucccaaagaacccgggauauuuauaucagccgcagacggcgcggcacauucaccuggacccuuuccgacucugaaggcaaagauacacccgggggauacugccugacgagauggaugcucauugaggccgagcugaaguguuuuggcaauaccgcuguggccaaaugcaacgaaaagcacgacgaggaguucugcgauaugcugcggcucuuugacuucuguaaacaggcuauccagcgccugaaggccccugcgcagaugagcauucaacuuaucaauaaggccgugaacgcucugaucaaugaucagcucauuaugaaaaaccaccugagagacaucauggggauucccuauugcaauuacuccaaguauugguaccuuaaccauacaaccacaggaaaaaccagccugccuaaguguuggcucgucucuaauggcuccuaccugaacgaaacgcacuucagcgacgauaucgaacagcaagccgacaauaugauuacagagaugcugcagaaagaguauauggaacggcaggggaagaccccgcucggacugguugaucuuuuuguguucucuaccagcuuuuaccugaucuccaucuuccuccaucuggugaaaauucccacacaccgccauaucgucggcaagucuugcccuaagccccacagacugaaccacaugggcauuuguagcugcgggcuuuauaaacagccuggagugcccguucgguggaagcgcugaggacuaguaauaaggaaacuguaugaaugucugugggcaggaagugaagagauccuucuguaaagguuuuuggaauuaugucugcugaauaauaaacuuuuuugaaauaauaaaucugguagaaaaaugagaucucaaaggcucuuuucagagccaccaaaaaaaaaaaaaaaaaaaaaaaaaaaaaaaaaaaaaaaaaaaaaaaaaaaaaaaaaaaaaaaaagaauu

SEQ ID NO: 24003 - RNA, 1781 nt, Artificial Sequence
  mRNA product Design b-4 (hSL-A64-N5) comprising derived and/or modified sequence from LASV(Mad39;Clade IV)__ANH09722__GPCmut2 (opt5)
aggagagucccgcagucggcguccagcggcucugcuuguucgugugugugucguugcaggccuuauucaagcuuaccaugggccagaucgugaccuucuuucaagaggucccccacguuauugaagaggugaugaacaucgugcugauugcccucagcauccuggcuguccuuaaggggcuguacaauguggccacaugcggacucauuggccugguuacguuccuucugcucugugggagauccugcaccacaacccuguauaaaggaguguacgaacugcaggcgcucgagcugaacauggaaacacuuaauauguguaugccucugucuugcaccaagaacaauagccaucacuauauccgggucggcaacgagacagggcucgagcugacccuuacgaauaccucccugaucaaccauaaauuuuguaaucucucugacgcucacaagaaaaaccuguacgaucaugcccugaugagcauuaucuccacauuccaccucucuauuccgaauuuuaaccaguaugaagccaugagcugcgacuucaaugauggaaagaucuccgugcaguacaaccugagccacaccuaugcuggcgacacagccaaucauuguggcaccguugcuaacggggugcuucaaacguuuaugcgcauggccuggggaggcucuuacauugcgcuggauuccgggagaggaggcugggacugcaucaugacaagcuaccaguaucucauuauccagaacaccacaugggaggaucacugucaguucucucggcccuccccuaucggguaccugggacuucugagccaacgcaccagagacauuuauaucucucggcgcagacggggcaccuuuacauggacgcucuccgauagcgaaggcaaggacacccccgggggauacugccugacacgcuggaugcugauugaggccgagcucaaauguuucggcaauaccgcugucgccaagugcaacgaaaaacaugaugaggaauuuugcgacaugcugagacuuuucgauuuuuguaagcaggcuauccagcggcugaaagccccugcgcagauguccauucaacucaucaauaaggccgugaacgcucugaucaaugaccagcuuauuaugaagaaccaucugcgcgacaucauggggauucccuauugcaauuacucuaaauauugguaccucaaccacacagugaccggaaagacgagccugccuaaauguuggcuggucuccaauggcagcuaccucaacgagacacacuucucugaugacaucgaacagcaagccgauaauaugauuaccgagaugcugcagaaggaguauauggaaagacaggggaaaaccccgcuuggacugguugaccucuucguguuuuccaccagcuucuaccugaucucuaucuuucugcaccuugugaagauucccacacaucggcacgucgugggcaaaccuugccccaagccucaucgccucaaccacaugggcaucuguagcugcggguucuauaagcagcccggaguuccggugagauggaaacggugaggacuaguaauaaggaaacuguaugaaugucugugggcaggaagugaagagauccuucuguaaagguuuuuggaauuaugucugcugaauaauaaacuuuuuugaaauaauaaaucugguagaaaaaugagaucucaaaggcucuuuucagagccaccaaaaaaaaaaaaaaaaaaaaaaaaaaaaaaaaaaaaaaaaaaaaaaaaaaaaaaaaaaaaaaaaagaauu

SEQ ID NO: 24004 - RNA, 1781 nt, Artificial Sequence
  mRNA product Design b-4 (hSL-A64-N5) comprising derived and/or modified sequence from LASV(Z0947-SLE-2011;Clade IV)__AIT17840__GPCmut2 (opt5)
aggagagucccgcagucggcguccagcggcucugcuuguucgugugugugucguugcaggccuuauucaagcuuaccaugggccagaucgugaccuucuuucaagaggucccccacguuauugaagaggugaugaacaucgugcugauugcccucagcauccuggcuguccuuaaggggcuguacaauuucgccacaugcggacucgugggccugguuacguuucuucugcucugugggagauccugcaccauuucucuguauaaaggaguguacgaacugcagacacucgagcugaacauggaaacccuuaauauguguaugccucugagcugcacaaagaacaauucccaucacuauaucauggucggcaacgagaccgggcucgagcugacacuuaccaauacgucuaucauuaaccauaaauucuguaaucugagcgacgcgcacaagaaaaaccucuacgaucaugcucugauguccaucauuucuaccuuucaccugagcaucccgaauuucaaccaguaugaagccauguccugcgacuuuaauggaggcaagauuagcgugcaguacaaccucucucacuccuaugccggcgaugcugccaaucauugugggacaguugcuaacggagugcugcaaaccuucaugcggauggccuggggcgggagcuacaucgcgcuugacucuggacgcgauagaugggacugcauuaugacauccuaccaguaucugaucauccagaacaccacgugggaggaucacugucaguuuagccggcccucuccuauuggcuaccucgggcugcuuucccaacgcacaagagacaucuauauuagccggcgcagacggggaaccuucacauggacccuguccgauucugaaggcaaggacacccccggcggguacugccucacacgcuggaugcugaucgaggccgagcugaaauguuuuggaaauacggcugucgccaagugcaacgaaaaacaugaugaggaguucugcgacaugcucagacuguuugauuucuguaagcaggcuauucagcggcuuaaagccccugcgcagaugagcauccaacugaucaauaaggccgugaacgcucucauuaaugaccagcugaucaugaagaaccaccuucgcgacauuaugggcauccccuauugcaauuacuccaaauauugguaccugaaccacaccacaaccgggaagacaagccucccuaaauguuggcuggugucuaauggauccuaccugaacgaaacccauuucagcgaugacauugaacagcaagccgauaauaugaucacggagaugcuccagaaggaguauauggaaagacagggcaaaacaccgcuggggcuugucgaccuguuuguuuucucuaccagcuuuuaccucaucuccauuuuccugcaccuggugaagauccccacccaucggcacauugugggaaaaccuugccccaagccucaucgccuuaaccacaugggcaucuguucuugcggccucuauaagcagcccggggucccggugaaauggaagagaugaggacuaguaauaaggaaacuguaugaaugucugugggcaggaagugaagagauccuucuguaaagguuuuuggaauuaugucugcugaauaauaaacuuuuuugaaauaauaaaucugguagaaaaaugagaucucaaaggcucuuuucagagccaccaaaaaaaaaaaaaaaaaaaaaaaaaaaaaaaaaaaaaaaaaaaaaaaaaaaaaaaaaaaaaaaaagaauu

SEQ ID NO: 24005 - RNA, 1812 nt, Artificial Sequence
  mRNA product Design b-4 (hSL-A100) comprising derived and/or modified sequence from LASV(Josiah;Clade IV)__NP_694870__GPCmut2 (opt1)
aggagagucccgcagucggcguccagcggcucugcuuguucgugugugugucguugcaggccuuauucaagcuuaccaugggccagaucgugaccuucuuccaggaggucccccacgugaucgaggaggugaugaacaucguccugaucgcccucagcgugcuggccgugcugaaggggcucuacaacuucgcgaccugcggccuggucgggcuggugacguuccuccugcugugcggccgcuccugcaccaccagccucuacaaggggguguacgagcugcagacccuggagcucaacauggagacgcugaacaugugcaugccgcuguccugcaccaagaacaacagccaccacuacaucauggucggcaacgagaccggccucgagcugacgcugaccaacaccuccaucaucaaccacaaguucugcaaccucagcgacgcccacaagaagaaccuguacgaccacgcccugauguccaucaucagcaccuuccaccucuccauccccaacuucaaccaguacgaggccaugagcugcgacuucaacgggggcaagaucuccgugcaguacaaccugagccacuccuacgccggggacgcggccaaccacugcggcacgguggccaacgggguccugcagaccuucaugcggauggccuggggcggcagcuacaucgcgcucgacuccgggcgcggcaacugggacugcaucaugaccagcuaccaguaccugaucauccagaacaccacgugggaggaccacugccaguucucccggcccagccccaucggguaccugggccuccugucccagcgcacccgggacaucuacaucagccgccggcgccggggcaccuucaccuggacgcugagcgacuccgaggggaaggacaccccgggcggguacugccugacccgcuggaugcucaucgaggccgagcugaagugcuucggcaacaccgccguggccaagugcaacgagaagcacgacgaggaguucugcgacaugcugcggcuguucgacuucugcaagcaggccauccagcgccugaaggcgcccgcccagaugagcauccagcugaucaacaaggccgugaacgcccucaucaacgaccagcugaucaugaagaaccaccuccgggacaucauggggauccccuacugcaacuacuccaaguacugguaccucaaccacacgaccaccggccgcaccagccugcccaagugcuggcuggucuccaacggcagcuaccucaacgagacgcacuucuccgacgacaucgagcagcaggccgacaacaugaucaccgagaugcugcagaaggaguacauggagcggcaggggaagacgccccugggccucguggaccuguucguguucagcaccuccuucuaccugaucagcaucuuccugcaccucgucaagaucccgacccaccgccacaucguggggaaguccugccccaagccccaccggcugaaccacaugggcaucugcagcugcgggcuguacaagcagcccggcgugccggucaaguggaagcgcugaggacuaguaauaaggaaacuguaugaaugucugugggcaggaagugaagagauccuucuguaaagguuuuuggaauuaugucugcugaauaauaaacuuuuuugaaauaauaaaucugguagaaaaaugagaucucaaaggcucuuuucagagccaccaaaaaaaaaaaaaaaaaaaaaaaaaaaaaaaaaaaaaaaaaaaaaaaaaaaaaaaaaaaaaaaaaaaaaaaaaaaaaaaaaaaaaaaaaaaaaaaaaaaaa

SEQ ID NO: 24006 - RNA, 1809 nt, Artificial Sequence
  mRNA product Design b-4 (hSL-A100) comprising derived and/or modified sequence from LASV(LP;Clade I)__AAF86701__GPCmut2 (opt1)
aggagagucccgcagucggcguccagcggcucugcuuguucgugugugugucguugcaggccuuauucaagcuuaccaugggccagaucaucaccuucuuccaggaggugccccacgucaucgaggaggugaugaacaucgugcugaucgcccucagccugcuggccauccucaaggggcuguacaacaucgcgaccugcggcaucaucgggcuggucgccuuccucuuccugugcggcaaguccugcagccugacgcucaagggcggguacgagcugcagacccuggagcucaacauggagacccugaacaugugcaugccgcuguccugcacgaagaacagcucccaccacuacauccgcgugggcaacgagaccgggcucgagcugacccugaccaacacgagcaucaucaaccacaaguucugcaaccucuccgacgcccacaagaagaaccuguacgaccacgcccugaugagcaucaucuccaccuuccaccucagcauccccaacuucaaccaguacgaggccauguccugcgacuucaacggcgggaagaucagcgugcaguacaaccugucccacagcuacgcgggcgacgccgccgagcacugcgggaccgucgccaacggcgugcugcagaccuucaugcggauggcguggggcgggcgcuacaucgcccucgacuccggcaaggggaacugggacugcaucaugacgagcuaccaguaccugaucauccagaacaccaccugggaggaccacugccaguucucccggcccagccccaucggcuaccugggccuccugucccagcgcacccgggacaucuacaucagccgccggcgccgggggacguucaccuggacccugagcgacuccgagggcaacgagacccccgggggcuacugccugacgcgcuggaugcucaucgaggccgagcugaagugcuucgggaacaccgccguggccaagugcaacgagaagcacgacgaggaguucugcgacaugcugcggcuguucgacuucugcaagcaggcgauccgccggcugaaggcccccgcccagaugagcauccagcugaucaacaaggccgucaacgcccucaucaacgaccagcugaucaugaagaaccaccuccgcgacaucaugggcauccccuacugcaacuacuccaaguacugguaccucaaccacaccagcuccggccggaccagccugcccaagugcuggcugaucuccaacgggagcuaccucaacgagacgcaguucuccgacgacaucgagcagcaggcggacaacaugaucaccgagaugcugcagaaggaguacaucgagcgccagggcaagaccccgcuggggcucguggacaucuucaucuucagcaccuccuucuaccugaucagcaucuuccugcaccugaucaagaucccgacgcaccggcacaucgugggcaagcccugccccaagccccaccgccucaaccacaugggggucugcuccugcggccuguacaagcacccgggcgugcccaccaaguggaagcggugaggacuaguaauaaggaaacuguaugaaugucugugggcaggaagugaagagauccuucuguaaagguuuuuggaauuaugucugcugaauaauaaacuuuuuugaaauaauaaaucugguagaaaaaugagaucucaaaggcucuuuucagagccaccaaaaaaaaaaaaaaaaaaaaaaaaaaaaaaaaaaaaaaaaaaaaaaaaaaaaaaaaaaaaaaaaaaaaaaaaaaaaaaaaaaaaaaaaaaaaaaaaaaaaa

SEQ ID NO: 24007 - RNA, 1809 nt, Artificial Sequence
  mRNA product Design b-4 (hSL-A100) comprising derived and/or modified sequence from LASV(803213;Clade II)__AAF86703__GPCmut2 (opt1)
aggagagucccgcagucggcguccagcggcucugcuuguucgugugugugucguugcaggccuuauucaagcuuaccaugggccagaucaucaccuucuuccaggaggugccccacgucaucgaggaggugaugaacaucgugcugaucgcccucagccugcuggccauccucaaggggaucuacaacgucgcgaccugcggccuguucgggcugaucuccuuccuccugcugugcggccgcagcugcuccgugacguacaaggggguguacgagcuccagacccuggagcugaacauggccaaccucaacaugugcaugccgcugagcugcaccaagaacaacucccaccacuacaucauggucggcaacgagacgggccuggagcucacccugaccaacaccagcaucaucaaccacaaguucugcaaccuguccgacgcccacaagaagaaccucuacgaccacgcccugaugagcaucaucuccacguuccaccugagcauccccaacuucaaccaguacgaggccauguccugcgacuucaacgggggcaagaucagcgugcaguacaaccucucccacagcuucgcgguggacgccgccaaccacugcgggaccaucgccaacggcguccugcagaccuucaugcggauggcguggggcggguccuacaucgcccuggacagcggcaaggggaacugggacugcaucaugaccuccuaccaguaccucaucauccagaacacgaccugggaggaccacugccaguucagccgccccucccccaucggcuaccuggggcugcucagccagcggacccgcgacaucuacaucagccggcgccgccggggcaccuucacguggacccucuccgacagcgagggcaacgaggcccccgggggcuacugccugacccgguggaugcugaucgaggccgagcucaagugcuucgggaacaccgccguggcgaagugcaacgagaagcacgacgaggaguucugcgacaugcugcgccuguucgacuucugcaagcaggccaucaagcggcucaagacgcccgcccagauguccauccagcugaucaacaaggccgugaacgcccugaucaacgaccagcucaucaugaagaaccaccuccgcgacaucaugggcauccccuacugcaacuacagccgguacugguaccugaaccacaccgucaccgggaagaccucccugccccgcugcuggcuggugagcaacggcuccuaccugaacgagacgcacuucagcgacgacaucgagcagcaggcggacaacaugaucaccgagaugcuccagaaggaguacauggaccggcagggcaagaccccgcuggggcugguggaccucuucgucuucuccaccagcuucuaccugaucuccaucuuccugcaccuggugaagaucccgacgcaccgccacaucgugggcaagcccugccccaagccccaccggcucaaccacauggggaucugcagcugcggccuguacaagcacccggggguccccgugaaguggaagcgcugaggacuaguaauaaggaaacuguaugaaugucugugggcaggaagugaagagauccuucuguaaagguuuuuggaauuaugucugcugaauaauaaacuuuuuugaaauaauaaaucugguagaaaaaugagaucucaaaggcucuuuucagagccaccaaaaaaaaaaaaaaaaaaaaaaaaaaaaaaaaaaaaaaaaaaaaaaaaaaaaaaaaaaaaaaaaaaaaaaaaaaaaaaaaaaaaaaaaaaaaaaaaaaaaa

SEQ ID NO: 24008 - RNA, 1809 nt, Artificial Sequence
  mRNA product Design b-4 (hSL-A100) comprising derived and/or modified sequence from LASV(GA391;Clade III)__CAA36645__GPCmut2 (opt1)
aggagagucccgcagucggcguccagcggcucugcuuguucgugugugugucguugcaggccuuauucaagcuuaccaugggccagaucgugaccuucuuccaggaggucccccacgugaucgaggaggugaugaacaucguccugaucgcccucagcauccuggccauccugaaggggcucuacaacguggcgaccugcggccugaucgggcuggugacguuccuccugcuguccggccgcagcugcucccucaucuacaaggggaccuacgagcugcagacccuggagcucaacauggagacccugaacaugugcaugccgcugagcugcaccaagaacaacucccaccacuacauccgggucggcaacgagaccggccucgagcugacccugacgaacaccagcauccucaaccacaaguucugcaaccuguccgacgcccacaagcgcaaccuguacgaccacagccucauguccaucaucagcaccuuccaccuguccauccccaacuucaaccaguacgaggccaugagcugcgacuucaacgggggcaagaucaccgugcaguacaaccugucccacagcuucgccguggacgccgcggggcacugcggcacgcucgccaacgggguccugcagaccuucaugcggauggccuggggcggcuccuacaucgcccuggacagcgggcgcggcaacugggacugcaucaugaccuccuaccaguaccucaucauccagaacaccacgugggacgaccacugccaguucagccggcccucccccaucggguaccugggccugcucagccagcgcacccgggacaucuacaucagccgccggcgccggggcaccuucaccuggacgcucuccgacagcgaggggaacgagaccccgggcggguacugccugacccgcuggaugcugaucgaggcggagcucaagugcuucggcaacaccgccguggccaagugcaacgagaagcacgacgaggaguucugcgacaugcugcggcuguucgacuucugcaagcaggccauccgccggcucaagacgcccgcccagauguccauccagcugaucaacaaggcggugaacgcccugaucaacgaccagcucaucaugaagaaccaccuccgcgacaucauggggauccccuacugcaacuacagccgguacugguaccugaaccacaccuccaccggcaagaccagccugccccgcugcuggcugaucuccaacggcagcuaccugaacgagacgaaguucuccgacgacaucgagcagcaggccgacaacaugaucaccgagaugcuccagaaggaguacaucgaccggcaggggaagacgccccugggccuggucgaccuguucguguucagcaccuccuucuaccucaucagcaucuuccugcaccuggugaagaucccgacccaccgccacaucgucgggaagcccugccccaagccccaccggcucaaccacaugggcaucugcuccugcgggcuguacaagcagccgggcgugcccgugcgcuggaagcggugaggacuaguaauaaggaaacuguaugaaugucugugggcaggaagugaagagauccuucuguaaagguuuuuggaauuaugucugcugaauaauaaacuuuuuugaaauaauaaaucugguagaaaaaugagaucucaaaggcucuuuucagagccaccaaaaaaaaaaaaaaaaaaaaaaaaaaaaaaaaaaaaaaaaaaaaaaaaaaaaaaaaaaaaaaaaaaaaaaaaaaaaaaaaaaaaaaaaaaaaaaaaaaaaa

SEQ ID NO: 24009 - RNA, 1812 nt, Artificial Sequence
  mRNA product Design b-4 (hSL-A100) comprising derived and/or modified sequence from LASV(AV;Clade V)__CCA30314__GPCmut2 (opt1)
aggagagucccgcagucggcguccagcggcucugcuuguucgugugugugucguugcaggccuuauucaagcuuaccaugggccagaucgugaccuucuuccaggaggucccccacgugaucgaggaggugaugaacaucguccugaucgcccucagcauccuggccgugcugaaggggcucuacaacaucgcgaccugcggccugaucgggcugaucacguuccuccugcugugcggccgcuccugcagcuccaaccucuacaaggggguguacgagcugcagagccuggaccucaacauggagacccugaacaugugcaugccgcuguccugcaccaagaacaacagccaccacuacauccgggucggcaacgacacgggccucgagcugacccugaccaacaccuccauccucaaccacaaguucugcaaccugagcgacgcccacaagaaggaccuguacgaccacgcccucauguccaucaucagcacguuccaccuguccauccccaacuucaaccaguacgaggccaugagcugcgacuucaacgggggcaagaucuccgugcaguacaaccugagccacuccuacgccaucgacgcggccaaccacugcgggaccguggccaacggcauccuccagaccuucaugcgcauggccuggggcgggagcuacaucgcgcuggacuccggccgggggaacugggacugcaucaugaccagcuaccaguaccugaucauccagaacacgaccugggagaaccacugccaguucucccgccccagccccaucggcuaccucgggcugcugagccagcggacccgcgacaucuacaucucccggcgccgccggggcaccuucacguggacccugagcgacuccgagggcaacgccacccccgggggcuacugccucacccgguggaugcugaucgaggccgagcugaagugcuucgggaacacggccgucgccaagugcaacgagaagcacgacgaggaguucugcgacaugcuccgccuguucgacuucugcaagcaggcgaucagccggcugaagucccccgcccagaugagcauccagcucaucaacaaggccgugaacgcccugaucaacgaccagcugaucaugaagaaccaccuccgcgacaucaugggcauccccuacugcaacuacuccaaguacugguaccugaaccacaccaucaccgggaagaccagccugcccaagugcuggcucguguccaacggcagcuaccugaacgagacgcacuucuccgacgacaucgagcagcaggccgacaacaugaucaccgagaugcugcagaaggaguacauggagcggcagggcaagaccccgcucgggcuggucgaccuguucguguucagcaccuccuucuaccugaucagcaucuuccuccgccuggugaagaucccgacgcaccggcacaucgucggcaagcccugccccaagccccaccgccugaaccacauggggaucugcuccugcggccucuacaagcagccgggggugcccgugcgguggaagcgcugaggacuaguaauaaggaaacuguaugaaugucugugggcaggaagugaagagauccuucuguaaagguuuuuggaauuaugucugcugaauaauaaacuuuuuugaaauaauaaaucugguagaaaaaugagaucucaaaggcucuuuucagagccaccaaaaaaaaaaaaaaaaaaaaaaaaaaaaaaaaaaaaaaaaaaaaaaaaaaaaaaaaaaaaaaaaaaaaaaaaaaaaaaaaaaaaaaaaaaaaaaaaaaaaa

SEQ ID NO: 24010 - RNA, 1809 nt, Artificial Sequence
  mRNA product Design b-4 (hSL-A100) comprising derived and/or modified sequence from LASV(Togo/2016/7082;Clade VI)__AMR44577__GPCmut2 (opt1)
aggagagucccgcagucggcguccagcggcucugcuuguucgugugugugucguugcaggccuuauucaagcuuaccaugggccagaucaucaccuucuuccaggaggugccccacgucaucgaggaggugaugaacaucgugcugaucgcccucagccugcuggccauccucaagggggucuacaacguggcgaccugcggcaucaucgggcuggugacguuccuguuccucugcggccgcuccugcagccugaucuacaagggguccuacgagcugcagacccucgagcugaacauggagacccugaacaugugcaugccgcucagcugcacgaagaacuccagccaccacuacauccgggucggcaacgagaccggccuggagcugacccucaccaacacguccaucaucaaccacaaguucugcaaccugagcgacgcccacaagcgcaaccuguacgaccacgcccucauguccauccugagcaccuuccaccuguccauccccaacuucaaccaguacgaggccaugagcugcgacuucaacgggggcaagaucuccgugcaguacaaccucagccacgccuacgcgguggacgccgccgagcacugcgggaccgucgccaacggcgugcugcagaccuucaugcggauggcguggggcggguccuacaucgcccuggacagcggccgcgggaacugggacugcaucaugacguccuaccaguaccucaucauccagaacaccaccugggaggaccacugccaguucagccggcccucccccaucggcuaccuggggcugcucagccagcgcacccgggacaucuacaucagccgccggcgccggggcacguucaccuggacccucuccgacagcgagggcaacgagacccccgggggcuacugccugacgcgcuggaugcugaucgaggccgagcucaagugcuucgggaacaccgccguggccaagugcaacgagaagcacgacgaggaguucugcgacaugcugcggcuguucgacuucugcaagcaggcgauccagcgccucaagucccccgcccagaugagcauccagcugaucaacaaggccgucaacgcccugaucaacgaccagcucaucaugaagaaccaccuccgggacaugaugggcauccccuacugcaacuacuccaaguacugguaccugaaccacaccagcuccgggcgcaccagccugcccaagugcuggcugguguccaacggcagcuaccugaacgagacgcacuucuccgacgacaucgagcagcaggccgacaacaugaucaccgagaugcuccagaaggaguacaucgaccggcagggcaagaccccgcuggggcugguggaccucuucgucuucagcaccuccuucuaccugaucagcaucuuccugcaccugaucaagaucccgacgcaccgccacaucgugggcaagcccugccccaagccccaccggcucaaccacauggggaucugcuccugcggccuguacaagcagccgggggugcccacccgcuggaagcggugaggacuaguaauaaggaaacuguaugaaugucugugggcaggaagugaagagauccuucuguaaagguuuuuggaauuaugucugcugaauaauaaacuuuuuugaaauaauaaaucugguagaaaaaugagaucucaaaggcucuuuucagagccaccaaaaaaaaaaaaaaaaaaaaaaaaaaaaaaaaaaaaaaaaaaaaaaaaaaaaaaaaaaaaaaaaaaaaaaaaaaaaaaaaaaaaaaaaaaaaaaaaaaaaa

SEQ ID NO: 24011 - RNA, 1809 nt, Artificial Sequence
  mRNA product Design b-4 (hSL-A100) comprising derived and/or modified sequence from LASV(KAK-428;Clade n.d. (VII))__ANH09740__GPCmut2 (opt1)
aggagagucccgcagucggcguccagcggcucugcuuguucgugugugugucguugcaggccuuauucaagcuuaccaugggccagaucgugaccuucuuccaggaggucccccacgugaucgaggaggugaugaacaucguccugaucgcccucagccugcuggccauccucaaggggcuguacaacuucgcgaccugcggcgugaucgggcugaucacguuccuccugcugugcggccgcuccugcagcgccaccuacaaggggcaguacgagcuccagacccuggagcugaacauggagucccucaacaugugcaugccgcugagcugcacgaagaacaacucccaccacuacauccgggccggcaacaacaccggccuggagcucacccugaccaacacgagcaucaucucccacaaguucugcaaccugagcgacgcccacaagaagaaccucuacgaccacacccugauguccaucaucaccaccuuccaccugagcauccccaacuucaaccaguacgaggccauguccugcgacuucaacgggggcaagaucagcauccaguacaaccucucccacagcuacgcgggggacgccgcccagcacugcggcacgguggccaacgggguccugcagaccuucaugcgcauggcguggggcggcuccuaccuggcccucgacagcgggcggcgcggcugggacugcaucaucuccagcuaccaguaccugaucauccagaacaccaccugggacgaccacugccaguucucccggcccagccccaucggguaccugggcuucgugagccagaagacgcgcgacaucuacaucucccggcgccgccggggcaccuucaccuggacccugagcgacuccgaggggcacgacaugccgggcggguacugccucacgcgguggaugcugaucgaggccgaccugaagugcuucggcaacaccgccguggccaagugcaacgagaagcacgacgaggaguucugcgacauguggcgccucuucgacuucugcaagcaggcgauccagcggcugaaggcccccgcccagaugaacauccagcugaucaacaaggccgucaacgcccucaucaacgaccagcugaugaugaagaaccaccuccgcgacaucauggggauccccuacugcaacuacagcaaguucugguaccugaacaacaccaccacgggccggaccucccugccccgcugcuggcugaucagcaacggcuccuaccucaacgagacccacuucagcgacgacaucgagcagcaggcggacaacaugaucaccgagaugcugcagaaggaguacauggaccggcaggggaagacgccccugggccucguggaccuguucguguucuccaccagcuucuaccugaucaccaucuuccuccaccuggucaagaucccgacccaccgccacaucguggggaagcccugccccaagccccaccggcugaaccacaugggcaucugcuccugcgggcuguacaagcagccgggcgugcccguccgcuggaagcggugaggacuaguaauaaggaaacuguaugaaugucugugggcaggaagugaagagauccuucuguaaagguuuuuggaauuaugucugcugaauaauaaacuuuuuugaaauaauaaaucugguagaaaaaugagaucucaaaggcucuuuucagagccaccaaaaaaaaaaaaaaaaaaaaaaaaaaaaaaaaaaaaaaaaaaaaaaaaaaaaaaaaaaaaaaaaaaaaaaaaaaaaaaaaaaaaaaaaaaaaaaaaaaaaa

SEQ ID NO: 24012 - RNA, 1809 nt, Artificial Sequence; identical to SEQ ID NO: 24006
  mRNA product Design b-4 (hSL-A100) comprising derived and/or modified sequence from LASV(Pinneo-NIG-1969;Clade I)__AIT17836__GPCmut2 (opt1)

SEQ ID NO: 24013 - RNA, 1809 nt, Artificial Sequence
  mRNA product Design b-4 (hSL-A100) comprising derived and/or modified sequence from LASV(ISTH0009-NIG-2011;Clade II)__AIT17404__GPCmut2 (opt1)
aggagagucccgcagucggcguccagcggcucugcuuguucgugugugugucguugcaggccuuauucaagcuuaccaugggccagaucaucaccuucuuccaggaggugccccacgucaucgaggaggugaugaacaucgugcugaucgcccucagccugcuggccauccucaaggggaucuacaacgucgcgaccugcggccuguucgggcugguguccuuccuccugcugugcggccgcagcugcuccacgaccuacaaggggguguacgagcuccagacccuggagcuggacauggccagccucaacaugugcaugccgcuguccugcacgaagaacaacagccaccacuacaucauggucggcaacgagaccggccuggagcucacccugaccaacacguccaucaucaaccacaaguucugcaaccugagcgacgcccacaagaagaaccucuacgaccacgcccugauguccaucaucagcaccuuccaccuguccauccccaacuucaaccaguacgaggccaugagcugcgacuucaacgggggcaagaucuccgugcaguacaaccucagccacgcguacgccguggacgccgccaaccacugcgggaccaucgcgaacggcguccugcagaccuucaugcggauggccuggggcggguccuacaucgcccuggacagcggcaagggguccugggacugcaucaugacgagcuaccaguaccucaucauccagaacaccaccugggaggaccacugccaguucucccgccccagccccaucggcuaccuggggcugcucagccagcggacccgcgacaucuacaucucccggcgccgccggggcacguucaccuggacccucagcgacuccgagggcaacgagacccccgggggcuacugccugacgcgguggaugcugaucgaggccgagcucaagugcuucgggaacaccgccguggcgaagugcaacgagaagcacgacgaggaguucugcgacaugcugcgccuguucgacuucugcaagcaggccauccggcgccucaagacccccgcccagaugagcauccagcugaucaacaaggccgugaacgcccugaucaacgaccagcucaucaugaagaaccaccuccgggacaucaugggcaucccguacugcaacuacuccaaguacugguaccugaaccacaccgucacggggaagaccagccugccccgcugcuggcugguguccaacggcagcuaccugaacgagacccacuucuccgacgacaucgagcagcaggcggacaacaugaucaccgagcuccugcagaaggaguacauggaccggcagggcaagacgccccuggggcucguggaccuguucgucuucagcaccuccuucuaccugaucagcaucuuccugcaccucaucaagaucccgacccaccgccacaucaccggcaagcccugccccaagccccaccggcugaaccacauggggaucugcuccugcggccuguacaagcacccgggggugcccgugaaguggaagcgcugaggacuaguaauaaggaaacuguaugaaugucugugggcaggaagugaagagauccuucuguaaagguuuuuggaauuaugucugcugaauaauaaacuuuuuugaaauaauaaaucugguagaaaaaugagaucucaaaggcucuuuucagagccaccaaaaaaaaaaaaaaaaaaaaaaaaaaaaaaaaaaaaaaaaaaaaaaaaaaaaaaaaaaaaaaaaaaaaaaaaaaaaaaaaaaaaaaaaaaaaaaaaaaaaa

SEQ ID NO: 24014 - RNA, 1809 nt, Artificial Sequence
  mRNA product Design b-4 (hSL-A100) comprising derived and/or modified sequence from LASV(ISTH2010-NIG-2012;Clade II)__AIT17482__GPCmut2 (opt1)
aggagagucccgcagucggcguccagcggcucugcuuguucgugugugugucguugcaggccuuauucaagcuuaccaugggccagaucaucaccuucuuccaggaggugccccacgucaucgaggaggugaugaacaucgugcugaucgcccucagccugcuggccauccucaaggggaucuacaacgucgcgaccugcggccuguucgggcugguguccuuccuccugcugugcggccgcagcugcuccacgaccuacaaggggguguacgagcuccagacccuggagcuggacauggccagccucaacaugugcaugccgcuguccugcacgaagaacaacagccaccacuacaucauggucggcaacgagaccggccuggagcucacccugaccaacacguccaucaucaaccacaaguucugcaaccugagcgacgcccacaagaagaaccucuacgaccacgcccugauguccaucaucagcaccuuccaccuguccauccccaacuucaaccaguacgaggccaugagcugcgacuucaacgggggcaagaucuccgugcaguacaaccucagccacgcguacgccguggacgccgccaaccacugcgggaccaucgcgaacggcguccugcagaccuucaugcggauggccuggggcggguccuacaucgcccuggacagcggcaagggguccugggacugcaucaugacgagcuaccaguaccucaucauccagaacaucaccugggaggaccacugccaguucucccgccccagccccaucggcuaccuggggcugcucagccagcggacccgcgacaucuacaucucccggcgccgccggggcaccuucacguggacccucagcgacuccgagggcaacgagacccccgggggcuacugccugacccgguggaugcugaucgaggccgagcucaagugcuucgggaacacggccguggcgaagugcaacgagaagcacgacgaggaguucugcgacaugcugcgccuguucgacuucugcaagcaggccauccggcgccucaagacccccgcccagaugagcauccagcugaucaacaaggccgugaacgcccugaucaacgaccagcucaucaugaagaaccaccuccgggacaucaugggcauccccuacugcaacuacuccaaguacugguaccugaaccacaccgucaccgggaagacgagccugccccgcugcuggcugguguccaacggcagcuaccugaacgagacccacuucuccgacgacaucgagcagcaggcggacaacaugaucaccgagcuccugcagaaggaguacaucgaccggcagggcaagaccccgcuggggcucguggaccuguucgucuucagcacguccuucuaccugaucagcaucuuccugcaccucgugaagaucccgacccaccgccacguggucggcaagcccugccccaagccccaccggcugaaccacauggggaucugcuccugcggccuguacaagcacccgggggugcccgugaaguggaagcgcugaggacuaguaauaaggaaacuguaugaaugucugugggcaggaagugaagagauccuucuguaaagguuuuuggaauuaugucugcugaauaauaaacuuuuuugaaauaauaaaucugguagaaaaaugagaucucaaaggcucuuuucagagccaccaaaaaaaaaaaaaaaaaaaaaaaaaaaaaaaaaaaaaaaaaaaaaaaaaaaaaaaaaaaaaaaaaaaaaaaaaaaaaaaaaaaaaaaaaaaaaaaaaaaaa

SEQ ID NO: 24015 - RNA, 1809 nt, Artificial Sequence
  mRNA product Design b-4 (hSL-A100) comprising derived and/or modified sequence from LASV(Lassa virus/H.sapiens-wt/NGA/2015/ISTH_0543;Clade II)__AVO03639__GPCmut2 (opt1)
aggagagucccgcagucggcguccagcggcucugcuuguucgugugugugucguugcaggccuuauucaagcuuaccaugggccagaucaucaccuucuuccaggaggugccccacgucaucgaggaggugaugaacaucgugcugaucgcccucagccugcuggccauccucaaggggaucuacaacgucgcgaccugcggccuguucgggcugguguccuuccuccugcugugcggccgcagcugcuccacgaccuacaaggggguguacgagcuccagacccuggagcuggacauggccaaccucaacaugugcaugccgcugagcugcacgaagaacaacucccaccacuacaucauggucggcaacgagaccggccuggagcucacccugaccaacacgagcaucaucaaccacaaguucugcaaccuguccgacgcccacaagaagaaccucuacgaccacgcccugaugagcaucaucuccaccuuccaccugagcauccccaacuucaaccaguacgaggccauguccugcgacuucaacgggggcaagaucagcgugcaguacaaccucucccacaccuacgcgguggacgccgccaaccacugcgggaccaucgccaacggcguccugcagacguucaugcggauggcguggggcgggagcuacaucgcccuggacuccggcaaggggagcugggacugcaucaugaccuccuaccaguaccucgugauccagaacaccaccugggaggaccacugccaguucagccgccccucccccaucggcuaccuggggcugcucagccagcggacgcgcgacaucuacaucagccggcgccgccggggcaccuucaccuggacccucuccgacagcgagggcaacgagacgcccgggggcuacugccugacccgguggaugcugaucgaggccgagcucaagugcuucgggaacaccgccguggccaagugcaacgagaagcacgacgaggaguucugcgacaugcugcgccuguucgacuucugcaagcaggcgauccggcgccucaagacccccgcccagauguccauccagcugaucaacaaggccgucaacgcccugaucaacgaccagcucaucaugaagaaccaccuccgggacaucaugggcauccccuacugcaacuacagcaaguacugguaccugaaccacacggugaccgggaagaccucccugccccgcugcuggcuggugagcaacggcuccuaccugaacgagacccacuucagcgacgacaucgagcagcaggccgacaacaugaucacggagcuccugcagaaggaguacaucgaccggcagggcaagaccccgcuggggcucgucgaccuguucguguucuccaccagcuucuaccugaucuccaucuuccugcaccucgugaagaucccgacccaccgccacaucacgggcaagcccugccccaagccccaccggcugaaccacauggggaucugcagcugcggccuguacaagcacccggggguccccgugaaguggaagcgcugaggacuaguaauaaggaaacuguaugaaugucugugggcaggaagugaagagauccuucuguaaagguuuuuggaauuaugucugcugaauaauaaacuuuuuugaaauaauaaaucugguagaaaaaugagaucucaaaggcucuuuucagagccaccaaaaaaaaaaaaaaaaaaaaaaaaaaaaaaaaaaaaaaaaaaaaaaaaaaaaaaaaaaaaaaaaaaaaaaaaaaaaaaaaaaaaaaaaaaaaaaaaaaaaa

SEQ ID NO: 24016 - RNA, 1809 nt, Artificial Sequence
  mRNA product Design b-4 (hSL-A100) comprising derived and/or modified sequence from LASV(Lassa virus/H.sapiens-wt/NGA/2016/ISTH_0009;Clade II)__AVO03571__GPCmut2 (opt1)
aggagagucccgcagucggcguccagcggcucugcuuguucgugugugugucguugcaggccuuauucaagcuuaccaugggccagaucaucaccuucuuccaggaggugccccacgucaucgaggaggugaugaacaucgugcugaucgcccucagccugcuggccauccucaaggggaucuacaacgucgcgaccugcggccugcuggggcucguguccuuccugcugcucugcggccgcagcugcuccacgaccuacaaggggguguacgagcugcagacccuggagcucgacauggccagccugaacaugugcaugccgcuguccugcacgaagaacaacagccaccacuacaucauggucggcaacgagaccggccucgagcugacccugaccaacacguccaucaucaaccacaaguucugcaaccucagcgacgcccacaagaagaaccuguacgaccacgcccugauguccaucaucagcaccuuccaccucuccauccccaacuucaaccaguacgaggccaugagcugcgacuucaacgggggccggaucuccgugcaguacaaccugagccacuccuacgcgguggacgccgccaaccacugcgggaccaucgccaacggcguccugcagaccuucaugcgcauggcguggggcgggagcuacaucgcccucgacuccggcaaggggagcugggacugcaucaugacguccuaccaguaccugaucauccagaacaccaccugggaggaccacugccaguucagccggcccagccccaucggcuaccuggggcuccugucccagcgcacccgggacaucuacaucagccgccggcgccggggcacguucaccuggacccuguccgacagcgagggcaacgagacccccgggggcuacugccugacgcgcuggaugcucaucgaggccgagcugaagugcuucgggaacaccgccguggccaagugcaacgagaagcacgacgaggaguucugcgacaugcugcggcuguucgacuucugcaagcaggcgauccgccggcugaagacccccgcccagauguccauccagcugaucaacaaggccgugaacgcccucaucaacgaccagcugaucaugaagaaccaccuccgcgacaucaugggcaucccguacugcaacuacagcaaguacugguaccucaaccacaccgucacggggaagaccucccugccccggugcuggcuggugagcaacggcuccuaccucaacgagacccacuucagcgacgacaucgagcagcaggccgacaacaugaucaccgagcugcugcagaaggaguacaucgaccgccagggcaagacgccccucgggcugguggaccuguucgucuucuccaccagcuucuaccugaucuccaucuuccuccaccuggugaagaucccgacccaccggcacaucaccggcaagcccugccccaagccccaccgccugaaccacauggggaucugcagcugcggccucuacaaccacccgggggugcccgucaaguggaagcggugaggacuaguaauaaggaaacuguaugaaugucugugggcaggaagugaagagauccuucuguaaagguuuuuggaauuaugucugcugaauaauaaacuuuuuugaaauaauaaaucugguagaaaaaugagaucucaaaggcucuuuucagagccaccaaaaaaaaaaaaaaaaaaaaaaaaaaaaaaaaaaaaaaaaaaaaaaaaaaaaaaaaaaaaaaaaaaaaaaaaaaaaaaaaaaaaaaaaaaaaaaaaaaaaa

SEQ ID NO: 24017 - RNA, 1809 nt, Artificial Sequence
  mRNA product Design b-4 (hSL-A100) comprising derived and/or modified sequence from LASV(Lassa virus/H.sapiens-wt/NGA/2016/ISTH_0017;Clade II)__AVO03567__GPCmut2 (opt1)
aggagagucccgcagucggcguccagcggcucugcuuguucgugugugugucguugcaggccuuauucaagcuuaccaugggccagaucaucaccuucuuccaggaggugccccacgucaucgaggaggugaugaacaucgugcugaucgcccucagccugcuggccauccucaaggggaucuacaacgucgcgaccugcggccuguucgggcugguguccuuccuccugcugugcggccgcagcugcuccacgaccuacaaggggguguacgagcuccagacccuggagcuggacauggccagccucaacaugugcaugccgcuguccugcacgaagaacaacagccaccacuacaucauggucggcaacgagaccggccuggagcucacccugaccaacacguccaucaucaaccacaaguucugcaaccugagcgacgcccacaagaagaaccucuacgaccacgcccugauguccaucaucagcaccuuccaccuguccauccccaacuucaaccaguacgaggccaugagcugcgacuucaacgggggcaagaucuccgugcaguacaaccucagccacaccuacgcgaucgacgccgccaaccacugcgggaccaucgccaacggcgugcugcagacguucaugcggauggcguggggcggguccuacaucgcccuggacagcggcaagggguccugggacugcaucaugaccagcuaccaguaccucaucauccagaacaccaccugggaggaccacugccaguucucccgccccagccccaucggcuaccuggggcugcucagccagcggacgcgcgacaucuacaucucccggcgccgccggggcaccuucaccuggacccucagcgacuccgagggcaacgagacgcccgggggcuacugccugacccgguggaugcugaucgaggccgagcucaagugcuucgggaacaccgccgucgccaagugcaacgagaagcacgacgaggaguucugcgacaugcugcgccuguucgacuucugcaagcaggcgauccggcgccucaagacccccgcccagaugagcauccagcugaucaacaaggccgugaacgcccugaucaacgaccagcucaucaugaagaaccaccuccgggacaucaugggcauccccuacugcaacuacuccaaguacugguaccugaaccacacggugaccgggaagaccagccugccccgcugcuggcuggucuccaacggcagcuaccugaacgagacccacuucuccgacgacaucgagcagcaggccgacaacaugaucacggagcuccugcagaaggaguacauggaccggcagggcaagaccccgcuggggcucguggaccuguucguguucagcaccuccuucuaccugaucagcaucuuccugcaccucguccgcaucccgacccaccggcacgugaucggcaagcccugccccaagccccaccgccugaaccacauggggaucugcuccugcggccuguacaagcacccgggggugcccgucaaguggaagcggugaggacuaguaauaaggaaacuguaugaaugucugugggcaggaagugaagagauccuucuguaaagguuuuuggaauuaugucugcugaauaauaaacuuuuuugaaauaauaaaucugguagaaaaaugagaucucaaaggcucuuuucagagccaccaaaaaaaaaaaaaaaaaaaaaaaaaaaaaaaaaaaaaaaaaaaaaaaaaaaaaaaaaaaaaaaaaaaaaaaaaaaaaaaaaaaaaaaaaaaaaaaaaaaaa

SEQ ID NO: 24018 - RNA, 1809 nt, Artificial Sequence
  mRNA product Design b-4 (hSL-A100) comprising derived and/or modified sequence from LASV(Lassa virus/H.sapiens-wt/NGA/2018/ISTH_0959;Clade II)__AVV65099__GPCmut2 (opt1)
aggagagucccgcagucggcguccagcggcucugcuuguucgugugugugucguugcaggccuuauucaagcuuaccaugggccagaucaucaccuucuuccaggaggugccccacgucaucgaggaggugaugaacaucgugcugaucgcccucagccugcuggccauccucaaggggaucuacaacgucgugaccugcggccuguucgggcugguguccuuccuccugcugugcggccgcagcugcuccacgaccuacaagggggucuacgagcuccagacccuggagcuggacauggcgagccucaacaugugcaugccgcuguccugcacgaagaacaacagccaccacuacaucauggugggcaacgagaccggccuggagcucacccugaccaacacguccaucaucaaccacaaguucugcaaccugagcgacgcccacaagaagaaccucuacgaccacgcccugauguccaucaucagcaccuuccaccuguccauccccaacuucaaccaguacgaggccaugagcugcgacuucaacgggggcaagaucuccgugcaguacaaccucagccacgccuacgcgaucgacgccgccaaccacugcgggaccaucgccaacggcguccugcagaccuucaugcggauggcguggggcggguccuacaucgcccuggacagcggcaagggguccugggacugcaucaugacgagcuaccaguaccucaucauccagaacaccaccugggaggaccacugccaguucucccgccccagccccaucggcuaccuggggcugcucagccagcggacccgcgacaucuacaucucccggcgccgccggggcacguucaccuggacccucagcgacuccgagggcaacgagacccccgggggcuacugccugacgcgguggaugcugaucgaggccgagcucaagugcuucgggaacaccgccguggccaagugcaacgagaagcacgacgaggaguucugcgacaugcugcgccuguucgacuucugcaagcaggcgauccggcgccucaagacccccgcccagaugagcauccagcugaucaacaaggccgugaacgcccugaucaacgaccagcucaucaugaagaaccaccuccgggacaucaugggcaucccguacugcaacuacuccaaguacugguaccugaaccacaccgucacggggaagaccagccugccccgcugcuggcugguguccaacggcagcuaccugaacgagacccacuucuccgacgacaucgagcagcaggccgacaacaugaucaccgagcuccugcagaaggaguacaucgaccggcagggcaagacgccccuggggcucguggaccuguucgucuucagcaccuccuucuaccugaucagcaucuuccugcaccucgugaagaucccgacccaccgccacgugaucggcaagcccugccccaagccccaccggcugaaccacauggggaucugcuccugcggccuguacaagcacccggggguccccgugaaguggaagcgcugaggacuaguaauaaggaaacuguaugaaugucugugggcaggaagugaagagauccuucuguaaagguuuuuggaauuaugucugcugaauaauaaacuuuuuugaaauaauaaaucugguagaaaaaugagaucucaaaggcucuuuucagagccaccaaaaaaaaaaaaaaaaaaaaaaaaaaaaaaaaaaaaaaaaaaaaaaaaaaaaaaaaaaaaaaaaaaaaaaaaaaaaaaaaaaaaaaaaaaaaaaaaaaaaa

SEQ ID NO: 24019 - RNA, 1809 nt, Artificial Sequence
  mRNA product Design b-4 (hSL-A100) comprising derived and/or modified sequence from LASV(LASV003-NIG-2008;Clade II)__AIT17580__GPCmut2 (opt1)
aggagagucccgcagucggcguccagcggcucugcuuguucgugugugugucguugcaggccuuauucaagcuuaccaugggccagaucaucaccuucuuccaggaggugccccacgucaucgaggaggugaugaacaucgugcugaucgcccucagccugcuggccauccucaaggggaucuacaacgucgcgaccugcggccuguucgggcugguguccuuccuccugcugugcggccgcagcugcuccacgaccuacaaggggguguacgagcuccagacccuggagcuggacauggccagccucaacaugugcaugccgcuguccugcacgaagaacaacagccaccacuacaucauggucggcaacgagaccggccuggagcucacccugaccaacacguccaucaucaaccacaaguucugcaaccugagcgacgcccacaagaagaaccucuacgaccacgcccugauguccaucaucagcaccuuccaccuguccauccccaacuucaaccaguacgaggccaugagcugcgacuucaacgggggcaagaucuccgugcaguacaaccucagccacaccuacgcgguggacgccgccaaccacugcgggaccaucgccaacggcguccugcagacguucaugcggauggcguggggcggguccuacaucgcccuggacagcggcaagggguccugggacugcaucaugaccagcuaccaguaccucaucauccagaacaccaccugggaggaccacugccaguucucccgccccagccccaucggcuaccuggggcugcucagccagcggacgcgcgacaucuacaucucccggcgccgccggggcaccuucaccuggacccucagcgacuccgagagcaacgagacgccgggcggguacugccugacccgguggaugcugaucgaggccgagcucaagugcuucggcaacaccgccguggccaagugcaacgagaagcacgacgaggaguucugcgacaugcugcgccuguucgacuucugcaagcaggcgauccggcgccucaaggcccccgcccagauguccauccagcugaucaacaaggccgugaacgcccugaucaacgaccagcucaucaugaagaaccaccuccgggacaucauggggauccccuacugcaacuacagcaaguacugguaccugaaccacaccgucacgggccgcaccucccugccccggugcuggcuggugagcaacggguccuaccugaacgagacccacuucagcgacgacaucgagcagcaggcggacaacaugaucaccgagcuccugcagaaggaguacauggaccgccagggcaagacgccccugggccucguggaccuguucgucuucuccaccagcuucuaccugaucuccaucuuccugcaccucgugaagaucccgacccaccggcacgugaucgggaagcccugccccaagccccaccgccugaaccacaugggcaucugcagcugcgggcuguacaagcacccgggcguccccgugaaguggaagcggugaggacuaguaauaaggaaacuguaugaaugucugugggcaggaagugaagagauccuucuguaaagguuuuuggaauuaugucugcugaauaauaaacuuuuuugaaauaauaaaucugguagaaaaaugagaucucaaaggcucuuuucagagccaccaaaaaaaaaaaaaaaaaaaaaaaaaaaaaaaaaaaaaaaaaaaaaaaaaaaaaaaaaaaaaaaaaaaaaaaaaaaaaaaaaaaaaaaaaaaaaaaaaaaaa

SEQ ID NO: 24020 - RNA, 1809 nt, Artificial Sequence
  mRNA product Design b-4 (hSL-A100) comprising derived and/or modified sequence from LASV(LASV035-NIG-2009;Clade II)__AIT17588__GPCmut2 (opt1)
aggagagucccgcagucggcguccagcggcucugcuuguucgugugugugucguugcaggccuuauucaagcuuaccaugggccagaucaucaccuucuuccaggaggugccccacgucaucgaggaggugaugaacaucgugcugaucgcccucagccugcuggccauccucaaggggaucuacaacgucgcgaccugcggccuguucgggcugguguccuuccuccugcugugcggccgcagcugcuccacgaccuacaaggggguguacgagcuccagacccuggagcuggacauggccagccucaacaugugcaugccgcuguccugcacgaagaacaacagccaccacuacaucauggucggcaacgagaccggccuggagcucacccugaccaacacguccaucaucaaccacaaguucugcaaccugagcgacgcccacaagaagaaccucuacgaccacgcccugauguccaucaucagcaccuuccaccuguccauccccaacuucaaccaguacgaggccaugagcugcgacuucaacgggggcaagaucuccgugcaguacaaccucagccacgcguacgccguggacgccgccaaccacugcgggaccaucgcgaacggcguccugcagaccuucaugcggauggccuggggcggguccuacaucgcccuggacagcggcaagggguccugggacugcaucaugacgagcuaccaguaccucaucauccagaacaccaccugggaggaccacugccaguucucccgccccagccccaucggcuaccuggggcugcucagccagcggacccgcgacaucuacaucucccggcgccgccggggcacguucaccuggacccucagcgacuccgagggcaacgagacccccgggggcuacugccugacgcgguggaugcugaucgaggccgagcucaagugcuucgggaacaccgccguggcgaagugcaacgagaagcacgacgaggaguucugcgacaugcugcgccuguucgacuucugcaagcaggccauccggcgccucaaggcccccgcccagaugagcauccagcugaucaacaaggccgugaacgcgcugaucaacgaccagcucaucaugaagaaccaccuccgggacaucaugggcauccccuacugcaacuacuccaaguacugguaccugaaccacaccgucaccgggaagacgagccugccccgcugcuggcugguguccaacggcagcuaccugaacgagacccacuucuccgacgacaucgagcagcaggccgacaacaugaucaccgagcuccugcagaaggaguacaucgaccggcagggcaagaccccgcuggggcucguggaccuguucgucuucagcacguccuucuaccugaucagcaucuuccugcaccucgugaagaucccgacccaccgccacgugaucggcaagcccugccccaagccccaccggcugaaccacauggggaucugcuccugcggccuguacaagcacccggggguccccgugaaguggaagcgcugaggacuaguaauaaggaaacuguaugaaugucugugggcaggaagugaagagauccuucuguaaagguuuuuggaauuaugucugcugaauaauaaacuuuuuugaaauaauaaaucugguagaaaaaugagaucucaaaggcucuuuucagagccaccaaaaaaaaaaaaaaaaaaaaaaaaaaaaaaaaaaaaaaaaaaaaaaaaaaaaaaaaaaaaaaaaaaaaaaaaaaaaaaaaaaaaaaaaaaaaaaaaaaaaa

SEQ ID NO: 24021 - RNA, 1809 nt, Artificial Sequence
  mRNA product Design b-4 (hSL-A100) comprising derived and/or modified sequence from LASV(LASV1000-NIG-2009;Clade II)__AIT17782__GPCmut2 (opt1)
aggagagucccgcagucggcguccagcggcucugcuuguucgugugugugucguugcaggccuuauucaagcuuaccaugggccagaucaucaccuucuuccaggaggugccccacgucaucgaggaggugaugaacaucgugcugaucgcccucagccugcuggccauccucaaggggaucuacaacgucgcgaccugcggccuguucgggcugguguccuuccuccugcugugcggccgcagcugcuccacgaccuacaaggggguguacgagcuccagacccuggagcuggacauggccagccucaacaugugcaugccgcuguccugcacgaagaacaacagccaccacuacaucauggucggcaacgagaccggccuggagcucacccugaccaacacguccaucaucaaccacaaguucugcaaccugagcgacgcccacaagaagaaccucuacgaccacgcccugauguccaucaucagcaccuuccaccuguccauccccaacuucaaccaguacgaggccaugagcugcgacuucaacgggggcaagaucuccgugcaguacaaccucagccacaccuacgcgguggacgccgccaaccacugcgggaccaucgccaacggcguccugcagacguucaugcggauggcguggggcggguccuacaucgcccuggacagcggcaagggguccugggacugcaucaugaccagcuaccaguaccucaucauccagaacaccaccugggaggaccacugccaguucucccgccccagccccaucggcuaccuggggcugcucagccagcggacgcgcgacaucuacaucucccggcgccgccggggcaccuucaccuggacccucagcgacuccgagggcaacgagacgcccgggggcuacugccugacccgguggaugcugaucgaggccgagcucaagugcuucgggaacaccgccguggccaagugcaacgagaagcacgacgaggaguucugcgacaugcugcgccuguucgacuucugcaagcaggcgaucaagcggcucaagacccccgcccagaugagcauccagcugaucaacaaggccgugaacgcccugaucaacgaccagcucaucaugaagaaccaccuccgcgacaucaugggcauccccuacugcaacuacuccaaguacugguaccugaaccacacggucaccgggaagaccagccugccccggugcuggcugguguccaacggcagcuaccugaacgagacccacuucuccgacgacaucgagcagcaggccgacaacaugaucacggagcuccugcagaaggaguacaucgaccgccagggcaagaccccgcuggggcucguggaccuguucgucuucagcaccuccuucuaccugaucagcaucuuccugcaccucgugaagaucccgacccaccggcacguggucggcaagcccugccccaagccccaccgccugaaccacauggggaucugcuccugcggccuguacaagcacccgggggugcccgugaaguggaagcggugaggacuaguaauaaggaaacuguaugaaugucugugggcaggaagugaagagauccuucuguaaagguuuuuggaauuaugucugcugaauaauaaacuuuuuugaaauaauaaaucugguagaaaaaugagaucucaaaggcucuuuucagagccaccaaaaaaaaaaaaaaaaaaaaaaaaaaaaaaaaaaaaaaaaaaaaaaaaaaaaaaaaaaaaaaaaaaaaaaaaaaaaaaaaaaaaaaaaaaaaaaaaaaaaa

SEQ ID NO: 24022 - RNA, 1809 nt, Artificial Sequence
  mRNA product Design b-4 (hSL-A100) comprising derived and/or modified sequence from LASV(LASV221-NIG-2010;Clade II)__AIT17624__GPCmut2 (opt1)
aggagagucccgcagucggcguccagcggcucugcuuguucgugugugugucguugcaggccuuauucaagcuuaccaugggccagaucaucaccuucuuccaggaggugccccacgucaucgaggaggugaugaacaucgugcugaucgcccucagccugcuggccauccucaaggggaucuacaacgucgcgaccugcggccuguucgggcugguguccuuccuccugcugugcggccgcagcugcuccacgaccuacaaggggguguacgagcuccagacccuggagcuggacauggccagccucaacaugugcaugccgcuguccugcacgaagaacaacagccaccacuacaucauggucggcaacgagaccggccuggagcucacccugaccaacacguccaucaucaaccacaaguucugcaaccugagcgacgcccacaagaagaaccucuacgaccacgcccugauguccaucaucagcaccuuccaccuguccauccccaacuucaaccaguacgaggccaugagcugcgacuucaacgggggcaagaucuccgugcaguacaaccucagccacaccuacgcgaucgacgccgccaaccacugcgggaccaucgccaacggcgugcugcagacguucaugcggauggcguggggcggguccuacaucgcccuggacagcggcaagggguccugggacugcaucaugaccagcuaccaguaccucaucauccagaacaccaccugggaggaccacugccaguucucccgccccagccccaucggcuaccuggggcugcucagccagcggacgcgcgacaucuacaucucccggcgccgccggggcaccuucaccuggacccucagcgacuccgagggcaacgagacgcccgggggcuacugccugacccgguggaugcugaucgaggccgagcucaagugcuucgggaacaccgccgucgccaagugcaacgagaagcacgacgaggaguucugcgacaugcugcgccuguucgacuucugcaagcaggcgauccggcgccucaagacccccgcccagaugagcauccagcugaucaacaaggccgugaacgcccugaucaacgaccagcucaucaugaagaaccaccuccgggacaucaugggcauccccuacugcaacuacuccaaguacugguaccugaaccacacggugaccgggaagaccagccugccccgcugcuggcuggucuccaacggcagcuaccugaacgagacccacuucuccgacgacaucgagcagcaggccgacaacaugaucacggagaugcuccagaaggaguacauggaccggcagggcaagaccccgcuggggcugguggaccucuucguguucagcaccuccuucuaccugaucagcaucuuccugcaccuggucaagaucccgacccaccgccacgugaucggcaagcccugccccaagccccaccggcucaaccacauggggaucugcuccugcggccuguacaagcacccgggggugcccgucaaguggaagcgcugaggacuaguaauaaggaaacuguaugaaugucugugggcaggaagugaagagauccuucuguaaagguuuuuggaauuaugucugcugaauaauaaacuuuuuugaaauaauaaaucugguagaaaaaugagaucucaaaggcucuuuucagagccaccaaaaaaaaaaaaaaaaaaaaaaaaaaaaaaaaaaaaaaaaaaaaaaaaaaaaaaaaaaaaaaaaaaaaaaaaaaaaaaaaaaaaaaaaaaaaaaaaaaaaa

SEQ ID NO: 24023 - RNA, 1809 nt, Artificial Sequence
  mRNA product Design b-4 (hSL-A100) comprising derived and/or modified sequence from LASV(LASV237-NIG-2010;Clade II)__AIT17638__GPCmut2 (opt1)
aggagagucccgcagucggcguccagcggcucugcuuguucgugugugugucguugcaggccuuauucaagcuuaccaugggccagaucaucaccuucuuccaggaggugccccacgucaucgaggaggugaugaacaucgugcugaucgcccucagccugcuggccauccucaaggggaucuacaacgucgcgaccugcggccuguucgggcugguguccuuccuccugcugugcggccgcagcugcuccacgaccuacaaggggguguacgagcuccagacccuggagcuggacauggccagccucaacaugugcaugccgcuguccugcacgaagaacaacagccaccacuacaucauggucggcaacgagaccggccuggagcucacccugaccaacacguccaucaucaaccacaaguucugcaaccugagcgacgcccacaagaaggaccucuacgaccacgcccugauguccaucaucagcaccuuccaccuguccauccccaacuucaaccaguacgaggccaugagcugcgacuucaacgggggcaagaucuccgugcaguacaaccucagccacaccuacgcgguggacgccgccaaccacugcgggaccaucgccaacggcguccugcagacguucaugcggauggcguggggcggguccuacaucgcccuggacagcggcaagggguccugggacugcaucaugaccagcuaccaguaccucaucauccagaacaccaccugggaggaccacugccaguucucccgccccagccccaucggcuaccuggggcugcucagccagcggacgcgcgacaucuacaucucccggcgccgccggggcaccuucaccuggacccucagcgacuccgagggcaacgagacgcccgggggcuacugccugacccgguggaugcugaucgaggccgagcucaagugcuucgggaacaccgccguggccaagugcaacgagaagcacgacgaggaguucugcgacaugcugcgccuguucgacuucugcaagcaggcgauccggcgccucaagacccccgcccagaugagcauccagcugaucaacaaggccgugaacgcccugaucaacgaccagcucaucaugaagaaccaccuccgggacaucaugggcauccccuacugcaacuacuccaaguacugguaccugaaccacacggucaccgggaagaccagccugccccgcugcuggcugguguccaacggcagcuaccugaacgagacccacuucuccgacgacaucgagcagcaggccgacaacaugaucacggagcuccugcagaaggaguacauggaccggcagggcaagaccccgcuggggcucguggaccuguucgucuucagcaccuccuucuaccugaucagcaucuuccugcaccucaucaagaucccgacccaccgccacaucacgggcaagcccugccccaagccccaccggcugaaccacauggggaucugcuccugcggccuguacaagcacccgggggugcccgugaaguggaagcgcugaggacuaguaauaaggaaacuguaugaaugucugugggcaggaagugaagagauccuucuguaaagguuuuuggaauuaugucugcugaauaauaaacuuuuuugaaauaauaaaucugguagaaaaaugagaucucaaaggcucuuuucagagccaccaaaaaaaaaaaaaaaaaaaaaaaaaaaaaaaaaaaaaaaaaaaaaaaaaaaaaaaaaaaaaaaaaaaaaaaaaaaaaaaaaaaaaaaaaaaaaaaaaaaaa

SEQ ID NO: 24024 - RNA, 1809 nt, Artificial Sequence
  mRNA product Design b-4 (hSL-A100) comprising derived and/or modified sequence from LASV(LASV253-NIG-2011;Clade II)__AIT17670__GPCmut2 (opt1)
aggagagucccgcagucggcguccagcggcucugcuuguucgugugugugucguugcaggccuuauucaagcuuaccaugggccagaucaucaccuucuuccaggaggugccccacgucaucgaggaggugaugaacaucgugcugaucgcccucagccugcuggccauccucaaggggaucuacaacgucgcgaccugcggccuguucgggcugguguccuuccuccugcugugcggccgcagcugcuccacgaccuacaaggggguguacgagcuccagacccuggagcuggacauggccagccucaacaugugcaugccgcuguccugcacgaagaacaacagccaccacuacaucauggucggcaacgagaccggccuggagcucacccugaccaacacguccaucaucaaccacaaguucugcaaccugagcgacgcccacaagaagaaccucuacgaccacgcccugauguccaucaucagcaccuuccaccuguccauccccaacuucaaccaguacgaggccaugagcugcgacuucaacgggggcaagaucuccgugcaguacaaccucagccacaccuacgcgguggacgccgccaaccacugcgggaccaucgccaacggcguccugcagacguucaugcggauggcguggggcggguccuacaucgcccuggacagcggcaagggguccugggacugcaucaugaccagcuaccaguaccucaucauccagaacaccaccugggaggaccacugccaguucucccgccccagccccaucggcuaccuggggcugcucagccagcggacgcgcgacaucuacaucucccggcgccgccggggcaccuucaccuggacccucagcgacuccgagggcaacgagacgcccgggggcuacugccugacccgguggaugcugaucgaggccgagcucaagugcuucgggaacaccgccguggccaagugcaacgagaagcacgacgaggaguucugcgacaugcugcgccuguucgacuucugcaagcaggcgauccggcgccucaaggcccccgcccagaugagcauccagcugaucaacaaggccgugaacgcccugaucaacgaccagcucaucaugaagaaccaccuccgggacaucaugggcaucccguacugcaacuacuccaaguacugguaccugaaccacaccgucacggggcgcaccagccugccccggugcuggcugguguccaacggcagcuaccugaacgagacccacuucuccgacgacaucgagcagcaggcggacaacaugaucaccgagcuccugcagaaggaguacaucgaccgccagggcaagacgccccuggggcucguggaccuguucgucuucagcaccuccuucuaccugaucagcaucuuccugcaccucgugaagaucccgacccaccggcacaucaucggcaagcccugccccaagccccaccgccugaaccacauggggaucugcuccugcggccuguacaagcacccgggggugcccgucaaguggaagcggugaggacuaguaauaaggaaacuguaugaaugucugugggcaggaagugaagagauccuucuguaaagguuuuuggaauuaugucugcugaauaauaaacuuuuuugaaauaauaaaucugguagaaaaaugagaucucaaaggcucuuuucagagccaccaaaaaaaaaaaaaaaaaaaaaaaaaaaaaaaaaaaaaaaaaaaaaaaaaaaaaaaaaaaaaaaaaaaaaaaaaaaaaaaaaaaaaaaaaaaaaaaaaaaaa

SEQ ID NO: 24025 - RNA, 1809 nt, Artificial Sequence
  mRNA product Design b-4 (hSL-A100) comprising derived and/or modified sequence from LASV(LASV254-NIG-2011;Clade II)__AIT17674__GPCmut2 (opt1)
aggagagucccgcagucggcguccagcggcucugcuuguucgugugugugucguugcaggccuuauucaagcuuaccaugggccagaucaucaccuucuuccaggaggugccccacgucaucgaggaggugaugaacaucgugcugaucgcccucagccugcuggccauccucaaggggaucuacaacgucgcgaccugcggccuguucgggcugguguccuuccuccugcugugcggccgcagcugcuccacgaccuacaaggggguguacgagcuccagacccuggagcuggacaugaccaaccucaacaugugcaugccgcugagcugcaccaagaacaacucccaccacuacaucauggucggcaacgagaccggccuggagcucacccugacgaacaccagcaucaucaaccacaaguucugcaaccuguccgacgcccacaagaagaaccucuacaaccacgcccugaugagcaucaucuccaccuuccaccugagcauccccaacuucaaccaguacgaggccauguccugcgacuucaacgggggcaagaucagcgugcaguacaaccucucccacagcuacgccguggacgcggccaaccacugcgggaccaucgccaacggcguccugcagacguucaugcggauggccuggggcggguccuacaucgcgcuggacagcggcaaggggaacugggacugcaucaugaccuccuaccaguaccucaucauccagaacaccaccugggaggaccacugccaguucagccgccccucccccaucggcuaccuggggcugcucagccagcggacgcgcgacaucuacaucagccggcgccgccggggcaccuucaccuggacccucuccgacagcgagggcaacgagacgcccgggggcuacugccugacccgguggaugcugaucgaggccgagcucaagugcuucgggaacaccgccguggccaagugcaacgagaagcacgacgaggaguucugcgacaugcugcgccuguucgacuucugcaagcaggccauccggcgccucaagacccccgcgcaggccaacauccagcugaucaacaaggccgugaacgcccugaucaacgaccagcucaucaugaagaaccaccuccgggacaucaugggcauccccuacugcaacuacuccaaguacugguaccugaaccacacggucaccgggaagaccagccugccccgcugcuggcugguguccaacggcagcuaccugaacgagacccacuucuccgacgacaucgagcagcaggccgacaacaugaucacggagcuccugcagaaggaguacauggaccggcagggcaagaccccgcuggggcucguggaccuguucgucuucagcaccuccuucuaccugaucagcaucuuccugcaccucgugaagaucccgacccaccgccacgugaucggcaagcccugccccaagccccaccggcugaaccacauggggaucugcuccugcggccuguacaagcacccggggguccccgugaaguggaagcgcugaggacuaguaauaaggaaacuguaugaaugucugugggcaggaagugaagagauccuucuguaaagguuuuuggaauuaugucugcugaauaauaaacuuuuuugaaauaauaaaucugguagaaaaaugagaucucaaaggcucuuuucagagccaccaaaaaaaaaaaaaaaaaaaaaaaaaaaaaaaaaaaaaaaaaaaaaaaaaaaaaaaaaaaaaaaaaaaaaaaaaaaaaaaaaaaaaaaaaaaaaaaaaaaaa

SEQ ID NO: 24026 - RNA, 1809 nt, Artificial Sequence
  mRNA product Design b-4 (hSL-A100) comprising derived and/or modified sequence from LASV(Nig08-A19;Clade III)__ADU56618__GPCmut2 (opt1)
aggagagucccgcagucggcguccagcggcucugcuuguucgugugugugucguugcaggccuuauucaagcuuaccaugggccagaucgugaccuucuuccaggaggucccccacgugaucgaggaggugaugaacaucguccugaucgcccucagcauccuggccauccugaaggggcucuacaacaucgcgaccugcggccugaucgggcuggugacguuccuccugcuguccggccgcagcugcuccaugaccuacaaggggguguacgagcuccagacccuggagcugaacaugaacacccucaacaugugcaugccgcugagcugcaccaagaacaacucccaccacuacaucauggucggcaacgagaccggccuggagcucacccugacgaacaccagccugcuccaccacaaguucugcaaccuguccgacgcccacaagaagaaccuguacgaccacacccucaugagcaucaucuccaccuuccaccugagcauccccaacuucaaccaguacgaggccauguccugcgacuucaacgggggcaagaucacggugcaguacaaccugagccacuccuacgccaucgacgccgcgaaccacugcgggaccguggccaacggcguccuccagaccuucaugcggauggccuggggcgggagcuacaucgcccuggacuccggccgcgggaagugggacugcaucaugaccagcuaccaguaccugaucauccagaacacgaccugggaggaccacugccaguucucccggcccagccccaucggcuaccucgggcugcugucccagcgcacccgggacaucuacaucagccgccggcgccggggcaccuucacguggacccugagcgacuccgagggcaacgagacccccgggggcuacugccucacccgcuggaugcugaucgaggcggagcugaagugcuucgggaacacggccguggccaagugcaacgagaagcacgacgaggaguucugcgacaugcuccggcuguucgacuucugcaagcaggccauccgccggcugaaggcccccgcgcagaugagcauccagcucaucaacaaggccgugaacgcccugaucaacgaccagcugaucaugaagaaccaccuccgcgacaucaugggcauccccuacugcaacuacuccaaguacugguaccugaaccacaccagcaccgggcggaccucccugccccgcugcuggcucgucagcaacggcuccuaccugaacgagacgcacuucagcgacgacaucgagcagcaggccgacaacaugaucaccgagaugcugcagaaggaguaccucgaccggcagggcaagaccccgcuggggcugguggaccuguucguguucuccaccagcuucuaccucaucuccaucuuccugcaccuggucaagaucccgacgcaccgccacaucgugggcaagcccugccccaagccccaccggcucaaccacauggggaucugcagcugcggccuguacaagcagccgggggugcccguccgcuggaagcggugaggacuaguaauaaggaaacuguaugaaugucugugggcaggaagugaagagauccuucuguaaagguuuuuggaauuaugucugcugaauaauaaacuuuuuugaaauaauaaaucugguagaaaaaugagaucucaaaggcucuuuucagagccaccaaaaaaaaaaaaaaaaaaaaaaaaaaaaaaaaaaaaaaaaaaaaaaaaaaaaaaaaaaaaaaaaaaaaaaaaaaaaaaaaaaaaaaaaaaaaaaaaaaaaa

SEQ ID NO: 24027 - RNA, 1812 nt, Artificial Sequence
  mRNA product Design b-4 (hSL-A100) comprising derived and/or modified sequence from LASV(G1180-SLE-2010;Clade IV)__AIT17168__GPCmut2 (opt1)
aggagagucccgcagucggcguccagcggcucugcuuguucgugugugugucguugcaggccuuauucaagcuuaccaugggccagaucgugaccuucuuccaggaggucccccacgugaucgaggaggugaugaacaucguccugaucgcccucagcauccuggccgugcugaaggggcucuacaacuucgcgaccugcggccugguggggcugcucaccuuccugcugcucugcggccgcuccugcaccgccagccgguacaagggggucuacgagcugcagacccuggagcucaacauggagacccugaacaugugcaugccgcuguccugcaccaagaacaacagccaccacuacaucauggugggcaacgagaccggccucgagcugacccugacgaacaccuccaucaucaaccacaaguucugcaaccucagcgacgcccacaagaagaaccuguacgaccacgcccugauguccaucaucagcaccuuccaccucuccauccccaacuucaaccaguacgaggccaugagcugcgacuucaacgggggcaagaucuccgugcaguacaaccugagccacuccuacgcgggggacgccgccaaccacugcggcaccgucgccaacggggugcugcagacguucaugcgcauggcguggggcggcagcuacaucgcccucgacuccgggcacggcagcugggacugcaucaugaccuccuaccaguaccugaucauccagaacaccaccugggaggaccacugccaguucagccggcccucccccaucggguaccugggccuccugagccagcgcacgcgggacaucuacaucagccgccggcgccggggcaccuucaccuggacccuguccgacagcgaggggaaggacacgccgggcggguacugccugacccgcuggaugcucaucgaggccgagcugaagugcuucggcaacaccgccguggccaagugcaacgagaagcacgacgaggaguucugcgacaugcugcggcuguucgacuucugcaagcaggcgauccagcgccugaaggcccccgcccagauguccauccagcugaucaacaaggccgucaacgcccucaucaacgaccagcugaucaugaagaaccaccuccgggacaucauggggauccccuacugcaacuacagcaaguacugguaccucaaccacaccacgaccggcaagaccucccugcccaagugcuggcuggugagcaacggcuccuaccucaacgagacccacuucagcgacgacaucgagcagcaggcggacaacaugaucacggagaugcugcagaaggaguacauggagcgccaggggaagacgccccugggccucguggaccuguucgucuucuccaccagcuucuaccugaucuccaucuuccugcaccucgugaagaucccgacccaccggcacaucgugggcaagagcugccccaagccccaccgccugaaccacauggggaucugcuccugcgggcuguacaagcagcccggcgucccggugaaguggaagcggugaggacuaguaauaaggaaacuguaugaaugucugugggcaggaagugaagagauccuucuguaaagguuuuuggaauuaugucugcugaauaauaaacuuuuuugaaauaauaaaucugguagaaaaaugagaucucaaaggcucuuuucagagccaccaaaaaaaaaaaaaaaaaaaaaaaaaaaaaaaaaaaaaaaaaaaaaaaaaaaaaaaaaaaaaaaaaaaaaaaaaaaaaaaaaaaaaaaaaaaaaaaaaaaaa

SEQ ID NO: 24028 - RNA, 1812 nt, Artificial Sequence
  mRNA product Design b-4 (hSL-A100) comprising derived and/or modified sequence from LASV(G1442-SLE-2011;Clade IV)__AIT17180__GPCmut2 (opt1)
aggagagucccgcagucggcguccagcggcucugcuuguucgugugugugucguugcaggccuuauucaagcuuaccaugggccagaucgugaccuucuuccaggaggucccccacgugaucgaggaggugaugaacaucguccugaucgcccucagcauccuggccgugcugaaggggcucuacaacguggcgaccugcggccugaucgggcuggucacguuccuccugcugugcggccgcuccugcaccaccacccucuacaaggggguguacgagcugcagacgcuggagcucaacauggagacccugaacaugugcaugccgcugagcugcaccaagaacaacucccaccacuacauccgggugggcaacgagacgggccucgagcugacccugaccaacaccagcaucaucaaccacaaguucugcaaccucuccgacgcccacaagaagaaccuguacgaccacgcccugaugagcaucaucuccacguuccaccucagcauccccaacuucaaccaguacgaggccauguccugcgacuucaacgggggcaagaucagcguccaguacaaccugucccacagcuacgccggggacgcggccaaccacugcggcaccguggccaacggggugcugcagaccuucaugcgcauggccuggggcggcuccuacaucgcgcucgacagcgggcggggcaacugggacugcaucaugaccuccuaccaguaccugaucauccagaacacgaccugggacgaccacugccaguucagccgccccucccccaucggguaccugggccuccugagccagcggacccgcgacgucuacaucucccggcgccgccggggcaccuucacguggacccugagcgacagcgaggggaaggacaccccgggcggguacugccugacccgguggaugcucaucgaggccgagcugaagugcuucggcaacacggccguggccaagugcaacgagaagcacgacgaggaguucugcgacaugcugcgccucuucgacuucugcaagcaggccauccagcggcugaaggcgcccgcccagauguccauccagcugaucaacaaggccgugaacgcccucaucaacgaccagcugaucaugaagaaccaccuccgcgacaucauggggauccccuacugcaacuacagcaaguacugguaccugaacaacaccgccaccggcaagaccucccugcccaagugcuggcugaucagcaacggcuccuaccucaacgagacgcacuucagcgacgacaucgagcaggaggcggacaacaugaucaccgagaugcugcagaaggaguacauggagcggcaggggaagacgccccugggccucgucgaccuguucguguucuccaccagcuucuaccugaucuccaucuuccugcaccucgugaagaucccgacccaccgccacaucgucggcaagagcugccccaagccccaccggcugaaccacauggggaucugcuccugcgggcuguacaagcagcccggcgugccggugcgcuggaagcggugaggacuaguaauaaggaaacuguaugaaugucugugggcaggaagugaagagauccuucuguaaagguuuuuggaauuaugucugcugaauaauaaacuuuuuugaaauaauaaaucugguagaaaaaugagaucucaaaggcucuuuucagagccaccaaaaaaaaaaaaaaaaaaaaaaaaaaaaaaaaaaaaaaaaaaaaaaaaaaaaaaaaaaaaaaaaaaaaaaaaaaaaaaaaaaaaaaaaaaaaaaaaaaaaa

SEQ ID NO: 24029 - RNA, 1812 nt, Artificial Sequence
  mRNA product Design b-4 (hSL-A100) comprising derived and/or modified sequence from LASV(G3010-SLE-2013;Clade IV)__AIT17344__GPCmut2 (opt1)
aggagagucccgcagucggcguccagcggcucugcuuguucgugugugugucguugcaggccuuauucaagcuuaccaugggccagaucgugaccuucuuccaggaggucccccacgugaucgaggaggugaugaacaucguccugaucgcccucagcauccuggccgugcugaaggggcucuacaacuucgcgaccugcggccugguggggcuggucacguuccuccugcugugcggccgcuccugcaccaccagccucuacaaggggguguacgagcugcagacccuggagcucaacauggagacgcugaacaugugcaugccgcuguccugcaccaagaacaacagccaccacuacaucauggugggcaacgagaccggccucgagcugacgcugaccaacaccuccaucaucaaccacaaguucugcaaccucagcgacgcccacaagaagaaccuguacaaccacgcccugauguccaucaucagcaccuuccaccucuccauccccaacuucaaccaguacgaggccaugagcugcgacuucaacgggggcaagaucuccguccaguacaaccugagccacuccuacgccggggacgcggccagccacugcggcacgguggccaacggggugcugcagaccuucaugcggauggccuggggcggcuccuacaucgcgcucgacagcggguacggcaagugggacugcaucaugaccuccuaccaguaccugaucauccagaacaccacgugggaggaccacugccaguucagccgccccucccccaucggguaccugggccuccugagccagcggacccgcgacaucuacaucagccggcgccgccggggcaccuucaccuggacgcuguccgacagcgaggggaaggacaccccgggcggguacugccugacccgguggaugcucaucgaggccgagcugaagugcuucggcaacaccgccgucgccaagugcaacgagaagcacgacgaggaguucugcgacaugcugcgccucuucgacuucugcaagcaggccauccagcggcugaagacgcccgcgcagauguccauccagcugaucaacaaggccgugaacgcccucaucaacgaccagcugaucaugaagaaccaccuccgcgacaucauggggauccccuacugcaacuacagcaaguacugguaccugaaccacaccaccaccggcaagacgucccugcccaagugcuggcuggugagcaacggcuccuaccucaacgagacccacuucagcgacgacaucgagcagcaggccgacaacaugaucaccgagaugcugcagaaggaguacauggagcggcaggggaagacgccccugggccucgucgaccuguucguguucuccaccagcuucuaccugaucuccaucuuccugcaccucgugaagaucccgacccaccgccacaucgucggcaagagcugccccaagccccaccggcugaaccacauggggaucugcuccugcgggcuguacaagcagcccggcgugccggugcgcuggaagcggugaggacuaguaauaaggaaacuguaugaaugucugugggcaggaagugaagagauccuucuguaaagguuuuuggaauuaugucugcugaauaauaaacuuuuuugaaauaauaaaucugguagaaaaaugagaucucaaaggcucuuuucagagccaccaaaaaaaaaaaaaaaaaaaaaaaaaaaaaaaaaaaaaaaaaaaaaaaaaaaaaaaaaaaaaaaaaaaaaaaaaaaaaaaaaaaaaaaaaaaaaaaaaaaaa

SEQ ID NO: 24030 - RNA, 1812 nt, Artificial Sequence
  mRNA product Design b-4 (hSL-A100) comprising derived and/or modified sequence from LASV(G502-SLE-2009;Clade IV)__AIT17126__GPCmut2 (opt1)
aggagagucccgcagucggcguccagcggcucugcuuguucgugugugugucguugcaggccuuauucaagcuuaccaugggccagaucgugaccuucuuccaggaggucccccacgugaucgaggaggugaugaacaucguccugaucgcccucagcauccuggccgugcugaaggggcucuacaacuucgcgaccugcggccugguggggcugcucacguuccugcugcucugcggccgcuccugcaccaccgggcuguacaagggcgucuacgagcugcagacccucgagcugaacauggagacgcugaacaugugcaugccgcucagcugcaccaagaacaacucccaccacuacaucauggugggcaacgagaccgggcuggagcugacgcucaccaacaccagcaucaucaaccacaaguucugcaaccuguccgacgcccacaagaagaaccuguacgaccacgcccucaugagcaucaucuccaccuuccaccugagcauccccaacuucaaccaguacgaggccauguccugcgacuucaacggcgggaagaucagcgugcaguacaaccugucccacagcuacgccggcgacgcggccgaccacugcgggacggucgccaacggcgugcuccagaccuucaugcggauggccuggggcggguccuacaucgcgcuggacagcggccgcgggcggugggacugcaucaugaccuccuaccaguaccugaucauccagaacaccacgugggaggaccacugccaguucagccgccccucccccaucggcuaccucggccugcugagccagcggacccgcgacaucuacaucucccggcgccgccgggggaccuucaccuggacgcugagcgacagcgagggcaaggacacccccgggggcuacugccucacccgguggaugcugaucgaggccgagcugaagugcuucgggaacaccgccguggccaagugcaacgagaagcacgacgaggaguucugcgacaugcuccgccuguucgacuucugcaagcaggccauccagcggcugaaggcgcccgcccagauguccauccagcucaucaacaaggccgucaacgcccugaucaacgaccagcuggugaugaagaaccaccuccgcgacaucaugggcauccccuacugcaacuacagccgguacugguaccugaaccacacgaccaccggccgcaccucccugcccaagugcuggcucgugagcaacggguccuaccugaacgagacgcacuucagcgacgacaucgagcagcaggccgacaacaugaucaccgagaugcugcagaaggaguacauggagcggcagggcaagaccccgcucgggcuggucgaccuguucguguucuccaccagcuucuaccugaucuccaucuuccuccaccuggugaagaucccgacgcaccgccacaucgucggcaagagcugccccaagccccaccggcugaaccacauggggaucugcuccugcggccucuacaagcagcccggcgugccggugaaguggaagcgcugaggacuaguaauaaggaaacuguaugaaugucugugggcaggaagugaagagauccuucuguaaagguuuuuggaauuaugucugcugaauaauaaacuuuuuugaaauaauaaaucugguagaaaaaugagaucucaaaggcucuuuucagagccaccaaaaaaaaaaaaaaaaaaaaaaaaaaaaaaaaaaaaaaaaaaaaaaaaaaaaaaaaaaaaaaaaaaaaaaaaaaaaaaaaaaaaaaaaaaaaaaaaaaaaa

SEQ ID NO: 24031 - RNA, 1812 nt, Artificial Sequence
  mRNA product Design b-4 (hSL-A100) comprising derived and/or modified sequence from LASV(G733-SLE-2010;Clade IV)__AIT17154__GPCmut2 (opt1)
aggagagucccgcagucggcguccagcggcucugcuuguucgugugugugucguugcaggccuuauucaagcuuaccaugggccagaucgugaccuucuuccaggaggucccccacgugaucgaggaggugaugaacaucguccugaucgcccucagcauccuggccgugcugaaggggcucuacaacuucgcgaccugcggcaucguggggcuggucuccuuccugcuccugugcggccgcagcugcacgaccucccuguacaaggggguguacgagcuccagacccuggagcugaacauggagacccucaacaugugcaugccgcugagcugcaccaagaacaacucccaccacuacaucauggugggcaacgagaccggccuggagcucacccugacgaacaccagcaucaucaaccacaaguucugcaaccuguccgacgcccacaagaagaaccucuacgaccacgcccugaugagcaucaucuccaccuuccaccugagcauccccaacuucaaccaguacgaggccauguccugcgacuucaacgggggcaagaucagcguccaguacaaccucucccacagcuacgccggggacgcggccaaccacugcggcaccaucgccaacggggugcugcagacguucaugcggauggccuggggcggcuccuacaucgcgcuggacagcgggcgcgaccggugggacugcaucaugaccuccuaccaguaccucaucauccagaacaccaccugggaggaccacugccaguucagccgccccucccccaucggcuaccuggggcugcucagccagcggacgcgcgacaucuacaucagccggcgccgccggggcaccuucaccuggacccucuccgacagcgagggcaaggacacgcccgggggcuacugccugacccgguggaugcugaucgaggccgagcucaagugcuucgggaacaccgccguggccaagugcaacgagaagcacgacgaggaguucugcgacaugcugcgccuguucgacuucugcaagcaggccauccagcggcucaaggcgcccgcccagauguccauccagcugaucaacaaggccgucaacgcccugaucaacgaccagcucaucaugaagaaccaccuccgcgacaucaugggcauccccuacugcaacuacagcaaguacugguaccugaaccacaccacgaccgggaagaccucccugcccaagugcuggcuggugagcaacggcuccuaccugaacgagacccacuucagcgacgacaucgagcagcaggccgacaacaugaucacggagaugcuccagaaggaguacauggagcggcagggcaagaccccgcuggggcugguggaccucuucgucuucuccaccagcuucuaccugaucuccaucuuccugcaccuggugaagaucccgacccaccgccacguggucggcaagagcugccccaagccccaccggcucaaccacauggggaucugcuccugcggccuguacgggcagcccggcgugccggugaaguggaagcgcugaggacuaguaauaaggaaacuguaugaaugucugugggcaggaagugaagagauccuucuguaaagguuuuuggaauuaugucugcugaauaauaaacuuuuuugaaauaauaaaucugguagaaaaaugagaucucaaaggcucuuuucagagccaccaaaaaaaaaaaaaaaaaaaaaaaaaaaaaaaaaaaaaaaaaaaaaaaaaaaaaaaaaaaaaaaaaaaaaaaaaaaaaaaaaaaaaaaaaaaaaaaaaaaaa

SEQ ID NO: 24032 - RNA, 1812 nt, Artificial Sequence
  mRNA product Design b-4 (hSL-A100) comprising derived and/or modified sequence from MOPV/LASV reassortant(IGS-1;Clade IV)__AFY05576__GPCmut2 (opt1)
aggagagucccgcagucggcguccagcggcucugcuuguucgugugugugucguugcaggccuuauucaagcuuaccaugggccagaucgugaccuucuuccaggaggucccccacgugaucgaggaggugaugaacaucguccugaucgcccucagcgugcuggccgugcugaaggggcucuacaacuucgcgaccugcggccuggucgggcuggugacguuccuccugcugugcggccgcuccugcaccaccagccucuacaaggggguguacgagcugcagacccuggagcucaacauggagacgcugaacaugugcaugccgcuguccugcaccaagaacaacagccaccacuacaucauggucggcaacgagaccggccucgagcugacgcugaccaacaccuccaucaucaaccacaaguucugcaaccucagcgacgcccacaagaagaaccuguacgaccacgcccugauguccaucaucagcaccuuccaccucuccauccccaacuucaaccaguacgaggccaugagcugcgacuucaacgggggcaagaucuccgugcaguacaaccugagccacuccuacgccggggacgcggccaaccacugcggcacgguggccaacgggguccugcagaccuucaugcggauggccuggggcggcagcuacaucgcgcucgacuccgggcgcggcaacugggacugcaucaugaccagcuaccaguaccugaucauccagaacaccacgugggaggaccacugccaguucucccggcccagccccaucggguaccugggccuccugucccagcgcacccgggacaucuacaucagccgccggcgccggggcaccuucaccuggacgcugagcgacuccgagggggaggacaccccgggcggguacugccugacccgcuggaugcucaucgaggccgagcugaagugcuucggcaacaccgccguggccaagugcaacgagaagcacgacgaggaguucugcgacaugcugcggcuguucgacuucugcaagcaggccauccagcgccugaaggcgcccgcccagaugagcauccagcugaucaacaaggccgugaacgcccucaucaacgaccagcugaucaugaagaaccaccuccgggacaucauggggauccccuacugcaacuacuccaaguacugguaccucaaccacacgaccaccggccgcaccagccugcccaagugcuggcuggucuccaacggcagcuaccucaacgagacgcacuucuccgacgacaucgagcagcaggccgacaacaugaucaccgagaugcugcagaaggaguacauggagcggcaggggaagacgccccugggccucguggaccuguucguguucagcaccuccuucuaccugaucagcaucuuccugcaccucgucaagaucccgacccaccgccacaucguggggaaguccugccccaagccccaccggcugaaccacaugggcaucugcagcugcgggcuguacaagcagcccggcgugccggucaaguggaagcgcugaggacuaguaauaaggaaacuguaugaaugucugugggcaggaagugaagagauccuucuguaaagguuuuuggaauuaugucugcugaauaauaaacuuuuuugaaauaauaaaucugguagaaaaaugagaucucaaaggcucuuuucagagccaccaaaaaaaaaaaaaaaaaaaaaaaaaaaaaaaaaaaaaaaaaaaaaaaaaaaaaaaaaaaaaaaaaaaaaaaaaaaaaaaaaaaaaaaaaaaaaaaaaaaaa

SEQ ID NO: 24033 - RNA, 1812 nt, Artificial Sequence
  mRNA product Design b-4 (hSL-A100) comprising derived and/or modified sequence from LASV(LM765-SLE-2012;Clade IV)__AIT17814__GPCmut2 (opt1)
aggagagucccgcagucggcguccagcggcucugcuuguucgugugugugucguugcaggccuuauucaagcuuaccaugggccagaucgugaccuucuuccaggaggucccccacgugaucgaggaggugaugaacaucguccugaucgcccucagcauccuggccgugcugaaggggcucuacaacuucgcgaccugcggccugguggggcuggucacguuccuccugcugugcggccgcuccugcaccaccagccucuacaaggggguguacgagcugcagacccuggagcucaacauggagacgcugaacaugugcaugccgcuguccugcaccaagaacaacagccaccacuacaucauggugggcaacgagaccggccucgagcugacgcugaccaacaccuccaucaucgaccacaaguucugcaaccucagcgacgcccaccggaagaaccuguacgaccacgcccugauguccaucaucagcaccuuccaccucuccauccccaacuucaaccaguacgaggccaugagcugcgacuucaacgggggcaagaucuccguccaguacaaccugagccacuccuacgccaaggacgcggccgaccacugcgggacgguggccaacggcgugcugcagaccuucaugcgcauggccuggggcgggagcuacaucgcgcucgacuccggccgggggcgcugggacugcaucaugaccagcuaccaguaccugaucauccagaacaccacgugggaggaccacugccaguucucccggcccagccccaucggcuaccuggggcuccugucccagcgcacccgggacaucuacaucagccgccggcgccggggcaccuucaccuggacgcugagcgacuccgagggcaaggacacccccgggggcuacugccugacccgcuggaugcucaucgaggccgagcugaagugcuucgggaacaccgccgucgccaagugcaacgagaagcacgacgaggaguucugcgacaugcugcggcuguucgacuucugcaagcaggccauccagcgccugaaggcgcccgcccagaugagcauccagcugaucaacaaggccgugaacgcccucaucaacgaccagcugaucaugaagaaccaccuccgggacaucaugggcauccccuacugcaacuacuccaaguacugguaccucaaccacacgaccaccgggaagaccagccugcccaagugcuggcugguguccaacggcagcuaccucaacgagacgcacuucuccgacgacaucgagcagcaggccgacaacaugaucaccgagaugcugcagaaggaguacauggagcgccagggcaagaccccgcuggggcucgucgaccuguucguguucagcaccuccuucuaccugaucagcaucuuccugcaccucgugaagaucccgacgcaccggcacaucgucggcaagcccugccccaagccccaccgccugaaccacauggggaucugcuccugcggccuguacaagcagccgggggugcccgugaaguggaagcggugaggacuaguaauaaggaaacuguaugaaugucugugggcaggaagugaagagauccuucuguaaagguuuuuggaauuaugucugcugaauaauaaacuuuuuugaaauaauaaaucugguagaaaaaugagaucucaaaggcucuuuucagagccaccaaaaaaaaaaaaaaaaaaaaaaaaaaaaaaaaaaaaaaaaaaaaaaaaaaaaaaaaaaaaaaaaaaaaaaaaaaaaaaaaaaaaaaaaaaaaaaaaaaaaa

SEQ ID NO: 24034 - RNA, 1812 nt, Artificial Sequence
  mRNA product Design b-4 (hSL-A100) comprising derived and/or modified sequence from LASV(LM776-SLE-2012;Clade IV)__AIT17824__GPCmut2 (opt1)
aggagagucccgcagucggcguccagcggcucugcuuguucgugugugugucguugcaggccuuauucaagcuuaccaugggccagaucgugaccuucuuccaggaggucccccacgugaucgaggaggugaugaacaucguccugaucgcccucagcauccuggccgugcugaaggggcucuacaacuucgcgaccugcggccugguggggcuggucacguuccuccugcugugcggccgcuccugcaccaccagcguguacaaggggguguacgagcuccagacccuggagcugaacauggagacgcucaacaugugcaugccgcuguccugcaccaagaacaacagccaccacuacaucauggucggcaacgagaccggccuggagcucacgcugaccaacaccuccaucaucaaccacaaguucugcaaccugagcgacgcccacaagaagaaccucuacgaccacgcccugauguccaucaucagcaccuuccaccuguccauccccaacuucaaccaguacgaggccaugagcugcgacuucaacgggggcaagaucuccgugcaguacaaccucagccacuccuacgccggggacgcggccaaccacugcggcacgguggccaacgggguccugcagaccuucaugcggauggccuggggcggcagcuacaucgcgcuggacuccgggcacggcaagugggacugcaucaugaccagcuaccaguaccucaucauccagaacaccacgugggaggaccacugccaguucucccgccccagccccaucggguaccugggccugcucucccagcggacccgcgacaucuacaucagccggcgccgccggggcaccuucaccuggacgcucagcgacuccgaggggaaggacaccccgggcggguacugccugacccgguggaugcugaucgaggccgagcucaagugcuucggcaacaccgccguggccaagugcaacgagaagcacgacgaggaguucugcgacaugcugcgccuguucgacuucugcaagcaggccauccagcggcucaaggcgcccgcccagaugagcauccagcugaucaacaaggccgugaacgcccugaucaacgaccagcucaucaugaagaaccaccuccgcgacaucauggggauccccuacugcaacuacuccaaguacugguaccugaaccacacgaccaccggcaagaccagccugcccaagugcuggcuggucuccaacggcagcuaccugaacgagacgcacuucuccgacgacaucgagcagcaggccgacaacaugaucaccgagaugcuccagaaggaguacauggagcggcaggggaagacgccccugggccugguggaccucuucguguucagcaccuccuucuaccugaucagcaucuuccugcaccuggucaagaucccgacccaccgccacaucguggggaaguccugccccaagccccaccggcucaaccacaugggcaucugcagcugcgggcuguacaagcagcccggcgugccgguccgcuggaagcggugaggacuaguaauaaggaaacuguaugaaugucugugggcaggaagugaagagauccuucuguaaagguuuuuggaauuaugucugcugaauaauaaacuuuuuugaaauaauaaaucugguagaaaaaugagaucucaaaggcucuuuucagagccaccaaaaaaaaaaaaaaaaaaaaaaaaaaaaaaaaaaaaaaaaaaaaaaaaaaaaaaaaaaaaaaaaaaaaaaaaaaaaaaaaaaaaaaaaaaaaaaaaaaaaa

SEQ ID NO: 24035 - RNA, 1812 nt, Artificial Sequence
  mRNA product Design b-4 (hSL-A100) comprising derived and/or modified sequence from LASV(Mad39;Clade IV)__ANH09722__GPCmut2 (opt1)
aggagagucccgcagucggcguccagcggcucugcuuguucgugugugugucguugcaggccuuauucaagcuuaccaugggccagaucgugaccuucuuccaggaggucccccacgugaucgaggaggugaugaacaucguccugaucgcccucagcauccuggccgugcugaaggggcucuacaacguggcgaccugcggccugaucgggcuggucacguuccuccugcugugcggccgcuccugcaccaccacccucuacaaggggguguacgagcugcaggcccuggagcucaacauggagacgcugaacaugugcaugccgcugagcugcaccaagaacaacucccaccacuacauccgggugggcaacgagaccggccucgagcugacgcugaccaacaccagccucaucaaccacaaguucugcaaccuguccgacgcccacaagaagaaccuguacgaccacgcccucaugagcaucaucuccaccuuccaccugagcauccccaacuucaaccaguacgaggccauguccugcgacuucaacgacgggaagaucagcguccaguacaaccugucccacacguacgcgggcgacaccgccaaccacugcgggaccguggccaacggcgugcuccagaccuucaugcgcauggccuggggcgggagcuacaucgcgcuggacuccggccgcgggggcugggacugcaucaugacgagcuaccaguaccugaucauccagaacaccaccugggaggaccacugccaguucucccggcccagccccaucggguaccucggccugcugucccagcggacccgcgacaucuacaucagccggcgccgccggggcacguucaccuggacccuguccgacagcgaggggaaggacaccccgggcggguacugccucacgcgguggaugcugaucgaggccgagcugaagugcuucggcaacaccgccgucgccaagugcaacgagaagcacgacgaggaguucugcgacaugcuccgccuguucgacuucugcaagcaggccauccagcggcugaaggcgcccgcccagaugagcauccagcucaucaacaaggccgugaacgcccugaucaacgaccagcugaucaugaagaaccaccuccgcgacaucauggggauccccuacugcaacuacuccaaguacugguaccugaaccacaccgugaccggcaagacgagccugcccaagugcuggcucgucuccaacggcagcuaccugaacgagacccacuucuccgacgacaucgagcagcaggccgacaacaugaucaccgagaugcugcagaaggaguacauggagcggcaggggaagacgccccucggccugguggaccuguucguguucagcaccuccuucuaccugaucagcaucuuccuccaccuggucaagaucccgacccaccgccacgugguggggaagcccugccccaagccccaccggcugaaccacaugggcaucugcuccugcggguucuacaagcagccgggcguccccgugcgcuggaagcggugaggacuaguaauaaggaaacuguaugaaugucugugggcaggaagugaagagauccuucuguaaagguuuuuggaauuaugucugcugaauaauaaacuuuuuugaaauaauaaaucugguagaaaaaugagaucucaaaggcucuuuucagagccaccaaaaaaaaaaaaaaaaaaaaaaaaaaaaaaaaaaaaaaaaaaaaaaaaaaaaaaaaaaaaaaaaaaaaaaaaaaaaaaaaaaaaaaaaaaaaaaaaaaaaa

SEQ ID NO: 24036 - RNA, 1812 nt, Artificial Sequence
  mRNA product Design b-4 (hSL-A100) comprising derived and/or modified sequence from LASV(Z0947-SLE-2011;Clade IV)__AIT17840__GPCmut2 (opt1)
aggagagucccgcagucggcguccagcggcucugcuuguucgugugugugucguugcaggccuuauucaagcuuaccaugggccagaucgugaccuucuuccaggaggucccccacgugaucgaggaggugaugaacaucguccugaucgcccucagcauccuggccgugcugaaggggcucuacaacuucgcgaccugcggccugguggggcuggucacguuccuccugcugugcggccgcuccugcaccaucagccucuacaaggggguguacgagcugcagacccuggagcucaacauggagacccugaacaugugcaugccgcuguccugcaccaagaacaacagccaccacuacaucauggugggcaacgagaccggccucgagcugacccugacgaacaccuccaucaucaaccacaaguucugcaaccucagcgacgcccacaagaagaaccuguacgaccacgcccugauguccaucaucagcaccuuccaccucuccauccccaacuucaaccaguacgaggccaugagcugcgacuucaacgggggcaagaucuccguccaguacaaccugagccacuccuacgccggggacgcggccaaccacugcggcaccguggccaacggggugcugcagacguucaugcggauggccuggggcggcagcuacaucgcgcucgacuccgggcgcgaccggugggacugcaucaugaccagcuaccaguaccugaucauccagaacaccaccugggaggaccacugccaguucucccgccccagccccaucggcuaccuggggcuccugucccagcggacgcgcgacaucuacaucagccggcgccgccggggcaccuucaccuggacccugagcgacuccgagggcaaggacacgcccgggggcuacugccugacccgguggaugcucaucgaggccgagcugaagugcuucgggaacaccgccgucgccaagugcaacgagaagcacgacgaggaguucugcgacaugcugcgccucuucgacuucugcaagcaggccauccagcggcugaaggcgcccgcccagaugagcauccagcugaucaacaaggccgugaacgcccucaucaacgaccagcugaucaugaagaaccaccuccgcgacaucaugggcauccccuacugcaacuacuccaaguacugguaccugaaccacaccacgaccgggaagaccagccugcccaagugcuggcugguguccaacggcagcuaccucaacgagacccacuucuccgacgacaucgagcagcaggccgacaacaugaucacggagaugcugcagaaggaguacauggagcggcagggcaagaccccgcuggggcucgucgaccuguucguguucagcaccuccuucuaccugaucagcaucuuccugcaccucgugaagaucccgacccaccgccacaucgucggcaagcccugccccaagccccaccggcugaaccacauggggaucugcuccugcggccuguacaagcagccgggggugcccgugaaguggaagcgcugaggacuaguaauaaggaaacuguaugaaugucugugggcaggaagugaagagauccuucuguaaagguuuuuggaauuaugucugcugaauaauaaacuuuuuugaaauaauaaaucugguagaaaaaugagaucucaaaggcucuuuucagagccaccaaaaaaaaaaaaaaaaaaaaaaaaaaaaaaaaaaaaaaaaaaaaaaaaaaaaaaaaaaaaaaaaaaaaaaaaaaaaaaaaaaaaaaaaaaaaaaaaaaaaa

SEQ ID NO: 24037 - RNA, 1812 nt, Artificial Sequence
  mRNA product Design b-4 (hSL-A100) comprising derived and/or modified sequence from LASV(Josiah;Clade IV)__NP_694870__GPCmut2 (opt1)
aggagagucccgcagucggcguccagcggcucugcuuguucgugugugugucguugcaggccuuauucaagcuuaccaugggccagaucgugaccuucuuccaggaggucccccacgugaucgaggaggugaugaacaucguccugaucgcccucagcgugcuggccgugcugaaggggcucuacaacuucgcgaccugcggccuggucgggcuggugacguuccuccugcugugcggccgcuccugcaccaccagccucuacaaggggguguacgagcugcagacccuggagcucaacauggagacgcugaacaugugcaugccgcuguccugcaccaagaacaacagccaccacuacaucauggucggcaacgagaccggccucgagcugacccugacgaacaccuccaucaucaaccacaaguucugcaaccucagcgacgcccacaagaagaaccuguacgaccacgcccugauguccaucaucagcaccuuccaccucuccauccccaacuucaaccaguacgaggccaugagcugcgacuucaacgggggcaagaucuccgugcaguacaaccugagccacuccuacgccggggacgcggccaaccacugcggcaccguggccaacgggguccugcagacguucaugcggauggccuggggcggcagcuacaucgcgcucgacuccgggcgcggcaacugggacugcaucaugaccagcuaccaguaccugaucauccagaacaccaccugggaggaccacugccaguucucccggcccagccccaucggguaccugggccuccugucccagcgcacgcgggacaucuacaucagccgccggcgccggggcaccuucaccuggacccugagcgacuccgaggggaaggacacgccgggcggguacugccucacccgcuggaugcugaucgaggccgagcugaagugcuucggcaacaccgccguggccaagugcaacgagaagcacgacgaggaguucugcgacaugcuccggcuguucgacuucugcaagcaggccauccagcgccugaaggcgcccgcccagaugagcauccagcucaucaacaaggccgugaacgcccugaucaacgaccagcugaucaugaagaaccaccuccgggacaucauggggauccccuacugcaacuacuccaaguacugguaccugaaccacaccacgaccggccgcaccagccugcccaagugcuggcucgucuccaacggcagcuaccugaacgagacccacuucuccgacgacaucgagcagcaggccgacaacaugaucacggagaugcugcagaaggaguacauggagcggcaggggaagaccccgcucggccugguggaccuguucguguucagcaccuccuucuaccugaucagcaucuuccuccaccuggucaagauccccacccaccgccacaucguggggaaguccugccccaagccccaccggcugaaccacaugggcaucugcagcugcgggcucuacaagcagccgggcgugcccgucaaguggaagcgcugaggacuaguaauaaggaaacuguaugaaugucugugggcaggaagugaagagauccuucuguaaagguuuuuggaauuaugucugcugaauaauaaacuuuuuugaaauaauaaaucugguagaaaaaugagaucucaaaggcucuuuucagagccaccaaaaaaaaaaaaaaaaaaaaaaaaaaaaaaaaaaaaaaaaaaaaaaaaaaaaaaaaaaaaaaaaaaaaaaaaaaaaaaaaaaaaaaaaaaaaaaaaaaaaa

SEQ ID NO: 24038 - RNA, 1809 nt, Artificial Sequence
  mRNA product Design b-4 (hSL-A100) comprising derived and/or modified sequence from LASV(LP;Clade I)__AAF86701__GPCmut2 (opt1)
aggagagucccgcagucggcguccagcggcucugcuuguucgugugugugucguugcaggccuuauucaagcuuaccaugggccagaucaucaccuucuuccaggaggugccccacgucaucgaggaggugaugaacaucgugcugaucgcccucagccugcuggccauccucaaggggcuguacaacaucgcgaccugcggcaucaucgggcuggucgccuuccucuuccugugcggcaaguccugcagccugacgcucaagggcggguacgagcugcagacccuggagcucaacauggagacccugaacaugugcaugccgcuguccugcaccaagaacagcucccaccacuacauccgcgugggcaacgagacggggcucgagcugacccugaccaacaccagcaucaucaaccacaaguucugcaaccucuccgacgcccacaagaagaaccuguacgaccacgcccugaugagcaucaucuccacguuccaccucagcauccccaacuucaaccaguacgaggccauguccugcgacuucaacggcgggaagaucagcgugcaguacaaccugucccacagcuacgcgggcgacgccgccgagcacugcgggaccgucgccaacggcgugcugcagaccuucaugcggauggcguggggcgggcgcuacaucgcccucgacuccggcaaggggaacugggacugcaucaugaccagcuaccaguaccugaucauccagaacacgaccugggaggaccacugccaguucucccggcccagccccaucggcuaccugggccuccugucccagcgcacccgggacaucuacaucagccgccggcgccgggggaccuucacguggacccugagcgacuccgagggcaacgagacccccgggggcuacugccucacccgcuggaugcugaucgaggccgagcugaagugcuucgggaacacggccguggccaagugcaacgagaagcacgacgaggaguucugcgacaugcuccggcuguucgacuucugcaagcaggcgauccgccggcugaaggccccggcccagaugagcauccagcucaucaacaaggccgucaacgcccugaucaacgaccagcugaucaugaagaaccaccuccgcgacaucaugggcauccccuacugcaacuacuccaaguacugguaccugaaccacaccagcuccggccggaccagccugcccaagugcuggcucaucuccaacgggagcuaccugaacgagacccaguucuccgacgacaucgagcagcaggcggacaacaugaucacggagaugcugcagaaggaguacaucgagcgccagggcaagaccccgcucgggcugguggacaucuucaucuucagcaccuccuucuaccugaucagcaucuuccugcaccucaucaagauccccacccaccggcacaucgugggcaagcccugccccaagccgcaccgccugaaccacaugggggucugcuccugcggccuguacaagcaccccggcgugcccacgaaguggaagcggugaggacuaguaauaaggaaacuguaugaaugucugugggcaggaagugaagagauccuucuguaaagguuuuuggaauuaugucugcugaauaauaaacuuuuuugaaauaauaaaucugguagaaaaaugagaucucaaaggcucuuuucagagccaccaaaaaaaaaaaaaaaaaaaaaaaaaaaaaaaaaaaaaaaaaaaaaaaaaaaaaaaaaaaaaaaaaaaaaaaaaaaaaaaaaaaaaaaaaaaaaaaaaaaaa

SEQ ID NO: 24039 - RNA, 1809 nt, Artificial Sequence
  mRNA product Design b-4 (hSL-A100) comprising derived and/or modified sequence from LASV(803213;Clade II)__AAF86703__GPCmut2 (opt1)
aggagagucccgcagucggcguccagcggcucugcuuguucgugugugugucguugcaggccuuauucaagcuuaccaugggccagaucaucaccuucuuccaggaggugccccacgucaucgaggaggugaugaacaucgugcugaucgcccucagccugcuggccauccucaaggggaucuacaacgucgcgaccugcggccuguucgggcugaucuccuuccuccugcugugcggccgcagcugcuccgugacguacaaggggguguacgagcuccagacccuggagcugaacauggccaaccucaacaugugcaugccgcugagcugcaccaagaacaacucccaccacuacaucauggucggcaacgagaccggccuggagcucacgcugaccaacaccagcaucaucaaccacaaguucugcaaccuguccgacgcccacaagaagaaccucuacgaccacgcccugaugagcaucaucuccaccuuccaccugagcauccccaacuucaaccaguacgaggccauguccugcgacuucaacgggggcaagaucagcgugcaguacaaccucucccacagcuucgcgguggacgccgccaaccacugcgggacgaucgccaacggcguccugcagaccuucaugcggauggcguggggcggguccuacaucgcccuggacagcggcaaggggaacugggacugcaucaugaccuccuaccaguaccucaucauccagaacaccacgugggaggaccacugccaguucagccgccccucccccaucggcuaccuggggcugcucagccagcggacccgcgacaucuacaucagccggcgccggcgcggcaccuucaccuggacgcuguccgacagcgagggcaacgaggcccccgggggcuacugccugacccgguggaugcucaucgaggccgagcugaagugcuucgggaacaccgccguggcgaagugcaacgagaagcacgacgaggaguucugcgacaugcugcgccucuucgacuucugcaagcaggccaucaagcggcugaagaccccggcccagauguccauccagcugaucaacaaggccgugaacgcccucaucaacgaccagcugaucaugaagaaccaccuccgcgacaucaugggcauccccuacugcaacuacagccgguacugguaccugaaccacacggucaccgggaagaccucccugccccgcugcuggcuggugagcaacggcuccuaccucaacgagacccacuucagcgacgacaucgagcagcaggcggacaacaugaucacggagaugcugcagaaggaguacauggaccggcagggcaagaccccgcuggggcucguggaccuguucgucuucuccaccagcuucuaccugaucuccaucuuccugcaccucgugaagauccccacccaccgccacaucgugggcaagcccugccccaagccgcaccggcugaaccacauggggaucugcagcugcggccuguacaagcaccccgggguccccgugaaguggaagcgcugaggacuaguaauaaggaaacuguaugaaugucugugggcaggaagugaagagauccuucuguaaagguuuuuggaauuaugucugcugaauaauaaacuuuuuugaaauaauaaaucugguagaaaaaugagaucucaaaggcucuuuucagagccaccaaaaaaaaaaaaaaaaaaaaaaaaaaaaaaaaaaaaaaaaaaaaaaaaaaaaaaaaaaaaaaaaaaaaaaaaaaaaaaaaaaaaaaaaaaaaaaaaaaaaa

SEQ ID NO: 24040 - RNA, 1809 nt, Artificial Sequence
  mRNA product Design b-4 (hSL-A100) comprising derived and/or modified sequence from LASV(GA391;Clade III)__CAA36645__GPCmut2 (opt1)
aggagagucccgcagucggcguccagcggcucugcuuguucgugugugugucguugcaggccuuauucaagcuuaccaugggccagaucgugaccuucuuccaggaggucccccacgugaucgaggaggugaugaacaucguccugaucgcccucagcauccuggccauccugaaggggcucuacaacguggcgaccugcggccugaucgggcuggugacguuccuccugcuguccggccgcagcugcucccucaucuacaaggggaccuacgagcugcagacccuggagcucaacauggagacccugaacaugugcaugccgcugagcugcacgaagaacaacucccaccacuacauccgggucggcaacgagaccggccucgagcugacccugaccaacacgagcauccucaaccacaaguucugcaaccuguccgacgcccacaagcgcaaccuguacgaccacagccucauguccaucaucagcaccuuccaccuguccauccccaacuucaaccaguacgaggccaugagcugcgacuucaacgggggcaagaucaccgugcaguacaaccugucccacagcuucgccguggacgccgcggggcacugcggcacccucgccaacgggguccugcagacguucaugcggauggccuggggcggcuccuacaucgcccuggacagcgggcgcggcaacugggacugcaucaugaccuccuaccaguaccucaucauccagaacaccaccugggacgaccacugccaguucagccggcccucccccaucggguaccugggccugcucagccagcgcacgcgggacaucuacaucagccgccggcgccggggcaccuucaccuggacccuguccgacagcgaggggaacgagacgccgggcggguacugccugacccgcuggaugcucaucgaggcggagcugaagugcuucggcaacaccgccguggccaagugcaacgagaagcacgacgaggaguucugcgacaugcugcggcuguucgacuucugcaagcaggccauccgccggcugaagacccccgcccagauguccauccagcugaucaacaaggcggugaacgcccucaucaacgaccagcugaucaugaagaaccaccuccgcgacaucauggggauccccuacugcaacuacagccgguacugguaccucaaccacacguccaccggcaagaccagccugccccgcugcuggcugaucuccaacggcagcuaccucaacgagaccaaguucuccgacgacaucgagcagcaggccgacaacaugaucacggagaugcugcagaaggaguacaucgaccggcaggggaagaccccgcugggccuggucgaccucuucguguucagcaccuccuucuaccugaucagcaucuuccugcaccucgugaagauccccacccaccgccacaucgucgggaagcccugccccaagccgcaccggcugaaccacaugggcaucugcuccugcgggcuguacaagcagcccggcgugcccgugcgcuggaagcgcugaggacuaguaauaaggaaacuguaugaaugucugugggcaggaagugaagagauccuucuguaaagguuuuuggaauuaugucugcugaauaauaaacuuuuuugaaauaauaaaucugguagaaaaaugagaucucaaaggcucuuuucagagccaccaaaaaaaaaaaaaaaaaaaaaaaaaaaaaaaaaaaaaaaaaaaaaaaaaaaaaaaaaaaaaaaaaaaaaaaaaaaaaaaaaaaaaaaaaaaaaaaaaaaaa

SEQ ID NO: 24041 - RNA, 1812 nt, Artificial Sequence
  mRNA product Design b-4 (hSL-A100) comprising derived and/or modified sequence from LASV(AV;Clade V)__CCA30314__GPCmut2 (opt1)
aggagagucccgcagucggcguccagcggcucugcuuguucgugugugugucguugcaggccuuauucaagcuuaccaugggccagaucgugaccuucuuccaggaggucccccacgugaucgaggaggugaugaacaucguccugaucgcccucagcauccuggccgugcugaaggggcucuacaacaucgcgaccugcggccugaucgggcugaucacguuccuccugcugugcggccgcuccugcagcuccaaccucuacaaggggguguacgagcugcagagccuggaccucaacauggagacccugaacaugugcaugccgcuguccugcaccaagaacaacagccaccacuacauccgggucggcaacgacaccggccucgagcugacgcugaccaacaccuccauccucaaccacaaguucugcaaccugagcgacgcccacaagaaggaccuguacgaccacgcccucauguccaucaucagcaccuuccaccuguccauccccaacuucaaccaguacgaggccaugagcugcgacuucaacgggggcaagaucuccgugcaguacaaccugagccacuccuacgccaucgacgcggccaaccacugcgggacgguggccaacggcauccuccagaccuucaugcgcauggccuggggcgggagcuacaucgcgcuggacuccggccgggggaacugggacugcaucaugaccagcuaccaguaccugaucauccagaacaccacgugggagaaccacugccaguucucccgccccagccccaucggcuaccucgggcugcugagccagcggacccgcgacaucuacaucucccggcgccggcgcggcaccuucaccuggacgcucagcgacuccgagggcaacgccacccccgggggcuacugccugacccgguggaugcugaucgaggccgagcucaagugcuucgggaacaccgccgucgccaagugcaacgagaagcacgacgaggaguucugcgacaugcugcgccuguucgacuucugcaagcaggcgaucagccggcucaaguccccggcccagaugagcauccagcugaucaacaaggccgugaacgcccugaucaacgaccagcucaucaugaagaaccaccuccgcgacaucaugggcauccccuacugcaacuacuccaaguacugguaccugaaccacacgaucaccgggaagaccagccugcccaagugcuggcugguguccaacggcagcuaccugaacgagacccacuucuccgacgacaucgagcagcaggccgacaacaugaucacggagaugcuccagaaggaguacauggagcggcagggcaagaccccgcuggggcuggucgaccuguucguguucagcaccuccuucuaccucaucagcaucuuccugcgccuggugaagauccccacccaccggcacaucgucggcaagcccugccccaagccgcaccgccucaaccacauggggaucugcuccugcggccuguacaagcagcccggggugcccgugcgguggaagcgcugaggacuaguaauaaggaaacuguaugaaugucugugggcaggaagugaagagauccuucuguaaagguuuuuggaauuaugucugcugaauaauaaacuuuuuugaaauaauaaaucugguagaaaaaugagaucucaaaggcucuuuucagagccaccaaaaaaaaaaaaaaaaaaaaaaaaaaaaaaaaaaaaaaaaaaaaaaaaaaaaaaaaaaaaaaaaaaaaaaaaaaaaaaaaaaaaaaaaaaaaaaaaaaaaa

SEQ ID NO: 24042 - RNA, 1809 nt, Artificial Sequence
  mRNA product Design b-4 (hSL-A100) comprising derived and/or modified sequence from LASV(Togo/2016/7082;Clade VI)__AMR44577__GPCmut2 (opt1)
aggagagucccgcagucggcguccagcggcucugcuuguucgugugugugucguugcaggccuuauucaagcuuaccaugggccagaucaucaccuucuuccaggaggugccccacgucaucgaggaggugaugaacaucgugcugaucgcccucagccugcuggccauccucaagggggucuacaacguggcgaccugcggcaucaucgggcuggugacguuccuguuccucugcggccgcuccugcagccugaucuacaagggguccuacgagcugcagacccucgagcugaacauggagacccugaacaugugcaugccgcucagcugcaccaagaacuccagccaccacuacauccgggucggcaacgagacgggccuggagcugacccucaccaacaccuccaucaucaaccacaaguucugcaaccugagcgacgcccacaagcgcaaccuguacgaccacgcccucauguccauccugagcacguuccaccuguccauccccaacuucaaccaguacgaggccaugagcugcgacuucaacgggggcaagaucuccgugcaguacaaccucagccacgccuacgcgguggacgccgccgagcacugcgggaccgucgccaacggcgugcugcagaccuucaugcggauggcguggggcggguccuacaucgcccuggacagcggccgcgggaacugggacugcaucaugaccuccuaccaguaccucaucauccagaacacgaccugggaggaccacugccaguucagccggcccucccccaucggcuaccuggggcugcucagccagcgcacccgggacaucuacaucagccgccggcgccggggcaccuucacguggacccuguccgacagcgagggcaacgagacccccgggggcuacugccugacccgcuggaugcucaucgaggccgagcugaagugcuucgggaacacggccguggccaagugcaacgagaagcacgacgaggaguucugcgacaugcugcggcuguucgacuucugcaagcaggcgauccagcgccugaaguccccggcccagaugagcauccagcugaucaacaaggccgucaacgcccucaucaacgaccagcugaucaugaagaaccaccuccgggacaugaugggcauccccuacugcaacuacuccaaguacugguaccucaaccacaccagcuccgggcgcaccagccugcccaagugcuggcugguguccaacggcagcuaccucaacgagacccacuucuccgacgacaucgagcagcaggccgacaacaugaucacggagaugcugcagaaggaguacaucgaccggcagggcaagaccccgcuggggcucguggaccuguucgucuucagcaccuccuucuaccugaucagcaucuuccugcaccucaucaagauccccacccaccgccacaucgugggcaagcccugccccaagccgcaccggcugaaccacauggggaucugcuccugcggccuguacaagcagcccggggugcccacgcgcuggaagcggugaggacuaguaauaaggaaacuguaugaaugucugugggcaggaagugaagagauccuucuguaaagguuuuuggaauuaugucugcugaauaauaaacuuuuuugaaauaauaaaucugguagaaaaaugagaucucaaaggcucuuuucagagccaccaaaaaaaaaaaaaaaaaaaaaaaaaaaaaaaaaaaaaaaaaaaaaaaaaaaaaaaaaaaaaaaaaaaaaaaaaaaaaaaaaaaaaaaaaaaaaaaaaaaaa

SEQ ID NO: 24043 - RNA, 1809 nt, Artificial Sequence
  mRNA product Design b-4 (hSL-A100) comprising derived and/or modified sequence from LASV(KAK-428;Clade n.d. (VII))__ANH09740__GPCmut2 (opt1)
aggagagucccgcagucggcguccagcggcucugcuuguucgugugugugucguugcaggccuuauucaagcuuaccaugggccagaucgugaccuucuuccaggaggucccccacgugaucgaggaggugaugaacaucguccugaucgcccucagccugcuggccauccucaaggggcuguacaacuucgcgaccugcggcgugaucgggcugaucacguuccuccugcugugcggccgcuccugcagcgccaccuacaaggggcaguacgagcuccagacccuggagcugaacauggagucccucaacaugugcaugccgcugagcugcaccaagaacaacucccaccacuacauccgggccggcaacaacacgggccuggagcucacccugaccaacaccagcaucaucucccacaaguucugcaaccugagcgacgcccacaagaagaaccucuacgaccacacgcugauguccaucaucaccaccuuccaccugagcauccccaacuucaaccaguacgaggccauguccugcgacuucaacgggggcaagaucagcauccaguacaaccucucccacagcuacgcgggggacgccgcccagcacugcggcaccguggccaacgggguccugcagacguucaugcgcauggcguggggcggcuccuaccuggcccucgacagcgggcggcgcggcugggacugcaucaucuccagcuaccaguaccugaucauccagaacaccaccugggacgaccacugccaguucucccggcccagccccaucggguaccugggcuucgugagccagaagacccgcgacaucuacaucucccggcgccggcgcggcacguucaccuggacccucagcgacuccgaggggcacgacaugccgggcggguacugccugacccgguggaugcugaucgaggccgaccucaagugcuucggcaacacggccguggccaagugcaacgagaagcacgacgaggaguucugcgacauguggcgccuguucgacuucugcaagcaggcgauccagcggcugaaggcccccgcccagaugaacauccagcucaucaacaaggccgucaacgcccugaucaacgaccagcugaugaugaagaaccaccuccgcgacaucauggggauccccuacugcaacuacagcaaguucugguaccugaacaacaccaccaccggccggacgucccugccccgcugcuggcucaucagcaacggcuccuaccugaacgagacccacuucagcgacgacaucgagcagcaggcggacaacaugaucaccgagaugcugcagaaggaguacauggaccggcaggggaagaccccgcucggccugguggaccuguucguguucuccacgagcuucuaccucaucaccaucuuccugcaccuggucaagauccccacccaccgccacaucguggggaagcccugccccaagccgcaccggcugaaccacaugggcaucugcuccugcgggcucuacaagcagcccggcgugcccguccgcuggaagcggugaggacuaguaauaaggaaacuguaugaaugucugugggcaggaagugaagagauccuucuguaaagguuuuuggaauuaugucugcugaauaauaaacuuuuuugaaauaauaaaucugguagaaaaaugagaucucaaaggcucuuuucagagccaccaaaaaaaaaaaaaaaaaaaaaaaaaaaaaaaaaaaaaaaaaaaaaaaaaaaaaaaaaaaaaaaaaaaaaaaaaaaaaaaaaaaaaaaaaaaaaaaaaaaaa

SEQ ID NO: 24044 - RNA, 1809 nt, Artificial Sequence; identical to SEQ ID NO: 24038
  mRNA product Design b-4 (hSL-A100) comprising derived and/or modified sequence from LASV(Pinneo-NIG-1969;Clade I)__AIT17836__GPCmut2 (opt1)

SEQ ID NO: 24045 - RNA, 1809 nt, Artificial Sequence
  mRNA product Design b-4 (hSL-A100) comprising derived and/or modified sequence from LASV(ISTH0009-NIG-2011;Clade II)__AIT17404__GPCmut2 (opt1)
aggagagucccgcagucggcguccagcggcucugcuuguucgugugugugucguugcaggccuuauucaagcuuaccaugggccagaucaucaccuucuuccaggaggugccccacgucaucgaggaggugaugaacaucgugcugaucgcccucagccugcuggccauccucaaggggaucuacaacgucgcgaccugcggccuguucgggcugguguccuuccuccugcugugcggccgcagcugcuccacgaccuacaaggggguguacgagcuccagacccuggagcuggacauggccagccucaacaugugcaugccgcuguccugcaccaagaacaacagccaccacuacaucauggucggcaacgagacgggccuggagcucacccugaccaacaccuccaucaucaaccacaaguucugcaaccugagcgacgcccacaagaagaaccucuacgaccacgcccugauguccaucaucagcacguuccaccuguccauccccaacuucaaccaguacgaggccaugagcugcgacuucaacgggggcaagaucuccgugcaguacaaccucagccacgcguacgccguggacgccgccaaccacugcgggaccaucgcgaacggcguccugcagaccuucaugcggauggccuggggcggguccuacaucgcccuggacagcggcaagggguccugggacugcaucaugaccagcuaccaguaccucaucauccagaacacgaccugggaggaccacugccaguucucccgccccagccccaucggcuaccuggggcugcucagccagcggacccgcgacaucuacaucucccggcgccggcgcggcaccuucacguggacccugagcgacuccgagggcaacgagacccccgggggcuacugccugacccgguggaugcucaucgaggccgagcugaagugcuucgggaacacggccguggcgaagugcaacgagaagcacgacgaggaguucugcgacaugcugcgccucuucgacuucugcaagcaggccauccggcgccugaagaccccggcccagaugagcauccagcugaucaacaaggccgugaacgcccucaucaacgaccagcugaucaugaagaaccaccuccgggacaucaugggcauccccuacugcaacuacuccaaguacugguaccugaaccacaccgucaccgggaagacgagccugccccgcugcuggcugguguccaacggcagcuaccucaacgagacccacuucuccgacgacaucgagcagcaggcggacaacaugaucaccgagcugcugcagaaggaguacauggaccggcagggcaagaccccgcucgggcugguggaccuguucgucuucagcacguccuucuaccugaucagcaucuuccuccaccugaucaagauccccacccaccgccacaucaccggcaagcccugccccaagccgcaccggcugaaccacauggggaucugcuccugcggccucuacaagcaccccggggugcccgugaaguggaagcgcugaggacuaguaauaaggaaacuguaugaaugucugugggcaggaagugaagagauccuucuguaaagguuuuuggaauuaugucugcugaauaauaaacuuuuuugaaauaauaaaucugguagaaaaaugagaucucaaaggcucuuuucagagccaccaaaaaaaaaaaaaaaaaaaaaaaaaaaaaaaaaaaaaaaaaaaaaaaaaaaaaaaaaaaaaaaaaaaaaaaaaaaaaaaaaaaaaaaaaaaaaaaaaaaaa

SEQ ID NO: 24046 - RNA, 1809 nt, Artificial Sequence
  mRNA product Design b-4 (hSL-A100) comprising derived and/or modified sequence from LASV(ISTH2010-NIG-2012;Clade II)__AIT17482__GPCmut2 (opt1)
aggagagucccgcagucggcguccagcggcucugcuuguucgugugugugucguugcaggccuuauucaagcuuaccaugggccagaucaucaccuucuuccaggaggugccccacgucaucgaggaggugaugaacaucgugcugaucgcccucagccugcuggccauccucaaggggaucuacaacgucgcgaccugcggccuguucgggcugguguccuuccuccugcugugcggccgcagcugcuccacgaccuacaaggggguguacgagcuccagacccuggagcuggacauggccagccucaacaugugcaugccgcuguccugcaccaagaacaacagccaccacuacaucauggucggcaacgagacgggccuggagcucacccugaccaacaccuccaucaucaaccacaaguucugcaaccugagcgacgcccacaagaagaaccucuacgaccacgcccugauguccaucaucagcacguuccaccuguccauccccaacuucaaccaguacgaggccaugagcugcgacuucaacgggggcaagaucuccgugcaguacaaccucagccacgcguacgccguggacgccgccaaccacugcgggaccaucgcgaacggcguccugcagaccuucaugcggauggccuggggcggguccuacaucgcccuggacagcggcaagggguccugggacugcaucaugaccagcuaccaguaccucaucauccagaacaucacgugggaggaccacugccaguucucccgccccagccccaucggcuaccuggggcugcucagccagcggacccgcgacaucuacaucucccggcgccggcgcggcaccuucaccuggacgcugagcgacuccgagggcaacgagacccccgggggcuacugccugacccgguggaugcucaucgaggccgagcugaagugcuucgggaacaccgccguggcgaagugcaacgagaagcacgacgaggaguucugcgacaugcugcgccucuucgacuucugcaagcaggccauccggcgccugaagacgccggcccagaugagcauccagcugaucaacaaggccgugaacgcccucaucaacgaccagcugaucaugaagaaccaccuccgggacaucaugggcauccccuacugcaacuacuccaaguacugguaccugaaccacaccgucaccgggaagaccagccugccccgcugcuggcugguguccaacggcagcuaccucaacgagacgcacuucuccgacgacaucgagcagcaggcggacaacaugaucaccgagcugcugcagaaggaguacaucgaccggcagggcaagaccccgcucgggcugguggaccuguucgucuucagcaccuccuucuaccugaucagcaucuuccuccaccuggugaagauccccacgcaccgccacguggucggcaagcccugccccaagccgcaccggcugaaccacauggggaucugcuccugcggccucuacaagcaccccggggugcccgugaaguggaagcgcugaggacuaguaauaaggaaacuguaugaaugucugugggcaggaagugaagagauccuucuguaaagguuuuuggaauuaugucugcugaauaauaaacuuuuuugaaauaauaaaucugguagaaaaaugagaucucaaaggcucuuuucagagccaccaaaaaaaaaaaaaaaaaaaaaaaaaaaaaaaaaaaaaaaaaaaaaaaaaaaaaaaaaaaaaaaaaaaaaaaaaaaaaaaaaaaaaaaaaaaaaaaaaaaaa

SEQ ID NO: 24047 - RNA, 1809 nt, Artificial Sequence
  mRNA product Design b-4 (hSL-A100) comprising derived and/or modified sequence from LASV(Lassa virus/H.sapiens-wt/NGA/2015/ISTH_0543;Clade II)__AVO03639__GPCmut2 (opt1)
aggagagucccgcagucggcguccagcggcucugcuuguucgugugugugucguugcaggccuuauucaagcuuaccaugggccagaucaucaccuucuuccaggaggugccccacgucaucgaggaggugaugaacaucgugcugaucgcccucagccugcuggccauccucaaggggaucuacaacgucgcgaccugcggccuguucgggcugguguccuuccuccugcugugcggccgcagcugcuccacgaccuacaaggggguguacgagcuccagacccuggagcuggacauggccaaccucaacaugugcaugccgcugagcugcaccaagaacaacucccaccacuacaucauggucggcaacgagacgggccuggagcucacccugaccaacaccagcaucaucaaccacaaguucugcaaccuguccgacgcccacaagaagaaccucuacgaccacgcccugaugagcaucaucuccacguuccaccugagcauccccaacuucaaccaguacgaggccauguccugcgacuucaacgggggcaagaucagcgugcaguacaaccucucccacaccuacgcgguggacgccgccaaccacugcgggaccaucgccaacggcguccugcagaccuucaugcggauggcguggggcgggagcuacaucgcccuggacuccggcaaggggagcugggacugcaucaugacguccuaccaguaccucgugauccagaacaccaccugggaggaccacugccaguucagccgccccucccccaucggcuaccuggggcugcucagccagcggacccgcgacaucuacaucagccggcgccggcgcggcacguucaccuggacccuguccgacagcgagggcaacgagacccccgggggcuacugccugacgcgguggaugcucaucgaggccgagcugaagugcuucgggaacaccgccguggccaagugcaacgagaagcacgacgaggaguucugcgacaugcugcgccucuucgacuucugcaagcaggcgauccggcgccugaagaccccggcccagauguccauccagcugaucaacaaggccgucaacgcccucaucaacgaccagcugaucaugaagaaccaccuccgggacaucaugggcauccccuacugcaacuacagcaaguacugguaccugaaccacaccgugacggggaagaccucccugccccgcugcuggcuggugagcaacggcuccuaccucaacgagacccacuucagcgacgacaucgagcagcaggccgacaacaugaucaccgagcugcugcagaaggaguacaucgaccggcagggcaagacgccgcucgggcuggucgaccuguucguguucuccaccagcuucuaccugaucuccaucuuccuccaccuggugaagauccccacccaccgccacaucaccggcaagcccugccccaagccgcaccggcugaaccacauggggaucugcagcugcggccucuacaagcaccccgggguccccgugaaguggaagcgcugaggacuaguaauaaggaaacuguaugaaugucugugggcaggaagugaagagauccuucuguaaagguuuuuggaauuaugucugcugaauaauaaacuuuuuugaaauaauaaaucugguagaaaaaugagaucucaaaggcucuuuucagagccaccaaaaaaaaaaaaaaaaaaaaaaaaaaaaaaaaaaaaaaaaaaaaaaaaaaaaaaaaaaaaaaaaaaaaaaaaaaaaaaaaaaaaaaaaaaaaaaaaaaaaa

SEQ ID NO: 24048 - RNA, 1809 nt, Artificial Sequence
  mRNA product Design b-4 (hSL-A100) comprising derived and/or modified sequence from LASV(Lassa virus/H.sapiens-wt/NGA/2016/ISTH_0009;Clade II)__AVO03571__GPCmut2 (opt1)
aggagagucccgcagucggcguccagcggcucugcuuguucgugugugugucguugcaggccuuauucaagcuuaccaugggccagaucaucaccuucuuccaggaggugccccacgucaucgaggaggugaugaacaucgugcugaucgcccucagccugcuggccauccucaaggggaucuacaacgucgcgaccugcggccugcuggggcucguguccuuccugcugcucugcggccgcagcugcuccacgaccuacaaggggguguacgagcugcagacccuggagcucgacauggccagccugaacaugugcaugccgcuguccugcaccaagaacaacagccaccacuacaucauggucggcaacgagacgggccucgagcugacccugaccaacaccuccaucaucaaccacaaguucugcaaccucagcgacgcccacaagaagaaccuguacgaccacgcccugauguccaucaucagcacguuccaccucuccauccccaacuucaaccaguacgaggccaugagcugcgacuucaacgggggccggaucuccgugcaguacaaccugagccacuccuacgcgguggacgccgccaaccacugcgggaccaucgccaacggcguccugcagaccuucaugcgcauggcguggggcgggagcuacaucgcccucgacuccggcaaggggagcugggacugcaucaugaccuccuaccaguaccugaucauccagaacacgaccugggaggaccacugccaguucagccggcccagccccaucggcuaccuggggcuccugucccagcgcacccgggacaucuacaucagccgccggcgccggggcaccuucacguggacccuguccgacagcgagggcaacgagacccccgggggcuacugccucacccgcuggaugcugaucgaggccgagcugaagugcuucgggaacacggccguggccaagugcaacgagaagcacgacgaggaguucugcgacaugcuccggcuguucgacuucugcaagcaggcgauccgccggcugaagaccccggcccagauguccauccagcucaucaacaaggccgugaacgcccugaucaacgaccagcugaucaugaagaaccaccuccgcgacaucaugggcauccccuacugcaacuacagcaaguacugguaccugaaccacaccgucaccgggaagacgucccugccccggugcuggcucgugagcaacggcuccuaccugaacgagacccacuucagcgacgacaucgagcagcaggccgacaacaugaucaccgagcugcuccagaaggaguacaucgaccgccagggcaagaccccgcuggggcugguggaccuguucgucuucuccacgagcuucuaccucaucuccaucuuccugcaccuggugaagauccccacccaccggcacaucaccggcaagcccugccccaagccgcaccgccucaaccacauggggaucugcagcugcggccuguacaaccaccccggggugcccgucaaguggaagcggugaggacuaguaauaaggaaacuguaugaaugucugugggcaggaagugaagagauccuucuguaaagguuuuuggaauuaugucugcugaauaauaaacuuuuuugaaauaauaaaucugguagaaaaaugagaucucaaaggcucuuuucagagccaccaaaaaaaaaaaaaaaaaaaaaaaaaaaaaaaaaaaaaaaaaaaaaaaaaaaaaaaaaaaaaaaaaaaaaaaaaaaaaaaaaaaaaaaaaaaaaaaaaaaaa

SEQ ID NO: 24049 - RNA, 1809 nt, Artificial Sequence
  mRNA product Design b-4 (hSL-A100) comprising derived and/or modified sequence from LASV(Lassa virus/H.sapiens-wt/NGA/2016/ISTH_0017;Clade II)__AVO03567__GPCmut2 (opt1)
aggagagucccgcagucggcguccagcggcucugcuuguucgugugugugucguugcaggccuuauucaagcuuaccaugggccagaucaucaccuucuuccaggaggugccccacgucaucgaggaggugaugaacaucgugcugaucgcccucagccugcuggccauccucaaggggaucuacaacgucgcgaccugcggccuguucgggcugguguccuuccuccugcugugcggccgcagcugcuccacgaccuacaaggggguguacgagcuccagacccuggagcuggacauggccagccucaacaugugcaugccgcuguccugcaccaagaacaacagccaccacuacaucauggucggcaacgagacgggccuggagcucacccugaccaacaccuccaucaucaaccacaaguucugcaaccugagcgacgcccacaagaagaaccucuacgaccacgcccugauguccaucaucagcacguuccaccuguccauccccaacuucaaccaguacgaggccaugagcugcgacuucaacgggggcaagaucuccgugcaguacaaccucagccacaccuacgcgaucgacgccgccaaccacugcgggaccaucgccaacggcgugcugcagaccuucaugcggauggcguggggcggguccuacaucgcccuggacagcggcaagggguccugggacugcaucaugacgagcuaccaguaccucaucauccagaacaccaccugggaggaccacugccaguucucccgccccagccccaucggcuaccuggggcugcucagccagcggacccgcgacaucuacaucucccggcgccggcgcggcacguucaccuggacccugagcgacuccgagggcaacgagacccccgggggcuacugccugacgcgguggaugcucaucgaggccgagcugaagugcuucgggaacaccgccgucgccaagugcaacgagaagcacgacgaggaguucugcgacaugcugcgccucuucgacuucugcaagcaggcgauccggcgccugaagaccccggcccagaugagcauccagcugaucaacaaggccgugaacgcccucaucaacgaccagcugaucaugaagaaccaccuccgggacaucaugggcauccccuacugcaacuacuccaaguacugguaccugaaccacaccgugacggggaagaccagccugccccgcugcuggcuggucuccaacggcagcuaccucaacgagacccacuucuccgacgacaucgagcagcaggccgacaacaugaucaccgagcugcugcagaaggaguacauggaccggcagggcaagacgccgcucgggcugguggaccuguucguguucagcaccuccuucuaccugaucagcaucuuccuccaccugguccgcauccccacccaccggcacgugaucggcaagcccugccccaagccgcaccgccugaaccacauggggaucugcuccugcggccucuacaagcaccccggggugcccgucaaguggaagcggugaggacuaguaauaaggaaacuguaugaaugucugugggcaggaagugaagagauccuucuguaaagguuuuuggaauuaugucugcugaauaauaaacuuuuuugaaauaauaaaucugguagaaaaaugagaucucaaaggcucuuuucagagccaccaaaaaaaaaaaaaaaaaaaaaaaaaaaaaaaaaaaaaaaaaaaaaaaaaaaaaaaaaaaaaaaaaaaaaaaaaaaaaaaaaaaaaaaaaaaaaaaaaaaaa

SEQ ID NO: 24050 - RNA, 1809 nt, Artificial Sequence
  mRNA product Design b-4 (hSL-A100) comprising derived and/or modified sequence from LASV(Lassa virus/H.sapiens-wt/NGA/2018/ISTH_0959;Clade II)__AVV65099__GPCmut2 (opt1)
aggagagucccgcagucggcguccagcggcucugcuuguucgugugugugucguugcaggccuuauucaagcuuaccaugggccagaucaucaccuucuuccaggaggugccccacgucaucgaggaggugaugaacaucgugcugaucgcccucagccugcuggccauccucaaggggaucuacaacgucgugaccugcggccuguucgggcugguguccuuccuccugcugugcggccgcagcugcuccacgaccuacaagggggucuacgagcuccagacccuggagcuggacauggcgagccucaacaugugcaugccgcuguccugcaccaagaacaacagccaccacuacaucauggugggcaacgagacgggccuggagcucacccugaccaacaccuccaucaucaaccacaaguucugcaaccugagcgacgcccacaagaagaaccucuacgaccacgcccugauguccaucaucagcacguuccaccuguccauccccaacuucaaccaguacgaggccaugagcugcgacuucaacgggggcaagaucuccgugcaguacaaccucagccacgccuacgcgaucgacgccgccaaccacugcgggaccaucgccaacggcguccugcagaccuucaugcggauggcguggggcggguccuacaucgcccuggacagcggcaagggguccugggacugcaucaugaccagcuaccaguaccucaucauccagaacacgaccugggaggaccacugccaguucucccgccccagccccaucggcuaccuggggcugcucagccagcggacccgcgacaucuacaucucccggcgccggcgcggcaccuucacguggacccugagcgacuccgagggcaacgagacccccgggggcuacugccugacccgguggaugcucaucgaggccgagcugaagugcuucgggaacacggccguggccaagugcaacgagaagcacgacgaggaguucugcgacaugcugcgccucuucgacuucugcaagcaggcgauccggcgccugaagaccccggcccagaugagcauccagcugaucaacaaggccgugaacgcccucaucaacgaccagcugaucaugaagaaccaccuccgggacaucaugggcauccccuacugcaacuacuccaaguacugguaccugaaccacaccgucaccgggaagacgagccugccccgcugcuggcugguguccaacggcagcuaccucaacgagacccacuucuccgacgacaucgagcagcaggccgacaacaugaucaccgagcugcugcagaaggaguacaucgaccggcagggcaagaccccgcucgggcugguggaccuguucgucuucagcacguccuucuaccugaucagcaucuuccuccaccuggugaagauccccacccaccgccacgugaucggcaagcccugccccaagccgcaccggcugaaccacauggggaucugcuccugcggccucuacaagcaccccgggguccccgugaaguggaagcgcugaggacuaguaauaaggaaacuguaugaaugucugugggcaggaagugaagagauccuucuguaaagguuuuuggaauuaugucugcugaauaauaaacuuuuuugaaauaauaaaucugguagaaaaaugagaucucaaaggcucuuuucagagccaccaaaaaaaaaaaaaaaaaaaaaaaaaaaaaaaaaaaaaaaaaaaaaaaaaaaaaaaaaaaaaaaaaaaaaaaaaaaaaaaaaaaaaaaaaaaaaaaaaaaaa

SEQ ID NO: 24051 - RNA, 1809 nt, Artificial Sequence
  mRNA product Design b-4 (hSL-A100) comprising derived and/or modified sequence from LASV(LASV003-NIG-2008;Clade II)__AIT17580__GPCmut2 (opt1)
aggagagucccgcagucggcguccagcggcucugcuuguucgugugugugucguugcaggccuuauucaagcuuaccaugggccagaucaucaccuucuuccaggaggugccccacgucaucgaggaggugaugaacaucgugcugaucgcccucagccugcuggccauccucaaggggaucuacaacgucgcgaccugcggccuguucgggcugguguccuuccuccugcugugcggccgcagcugcuccacgaccuacaaggggguguacgagcuccagacccuggagcuggacauggccagccucaacaugugcaugccgcuguccugcaccaagaacaacagccaccacuacaucauggucggcaacgagacgggccuggagcucacccugaccaacaccuccaucaucaaccacaaguucugcaaccugagcgacgcccacaagaagaaccucuacgaccacgcccugauguccaucaucagcacguuccaccuguccauccccaacuucaaccaguacgaggccaugagcugcgacuucaacgggggcaagaucuccgugcaguacaaccucagccacaccuacgcgguggacgccgccaaccacugcgggaccaucgccaacggcguccugcagaccuucaugcggauggcguggggcggguccuacaucgcccuggacagcggcaagggguccugggacugcaucaugacgagcuaccaguaccucaucauccagaacaccaccugggaggaccacugccaguucucccgccccagccccaucggcuaccuggggcugcucagccagcggacccgcgacaucuacaucucccggcgccggcgcggcacguucaccuggacccugagcgacuccgagagcaacgagaccccgggcggguacugccugacgcgguggaugcucaucgaggccgagcugaagugcuucggcaacaccgccguggccaagugcaacgagaagcacgacgaggaguucugcgacaugcugcgccucuucgacuucugcaagcaggcgauccggcgccugaaggcccccgcccagauguccauccagcugaucaacaaggccgugaacgcccucaucaacgaccagcugaucaugaagaaccaccuccgggacaucauggggauccccuacugcaacuacagcaaguacugguaccugaaccacaccgucaccggccgcacgucccugccccggugcuggcuggugagcaacggguccuaccucaacgagacccacuucagcgacgacaucgagcagcaggcggacaacaugaucaccgagcugcugcagaaggaguacauggaccgccagggcaagaccccgcucggccugguggaccuguucgucuucuccacgagcuucuaccugaucuccaucuuccuccaccuggugaagauccccacccaccggcacgugaucgggaagcccugccccaagccgcaccgccugaaccacaugggcaucugcagcugcgggcucuacaagcaccccggcguccccgugaaguggaagcggugaggacuaguaauaaggaaacuguaugaaugucugugggcaggaagugaagagauccuucuguaaagguuuuuggaauuaugucugcugaauaauaaacuuuuuugaaauaauaaaucugguagaaaaaugagaucucaaaggcucuuuucagagccaccaaaaaaaaaaaaaaaaaaaaaaaaaaaaaaaaaaaaaaaaaaaaaaaaaaaaaaaaaaaaaaaaaaaaaaaaaaaaaaaaaaaaaaaaaaaaaaaaaaaaa

SEQ ID NO: 24052 - RNA, 1809 nt, Artificial Sequence
  mRNA product Design b-4 (hSL-A100) comprising derived and/or modified sequence from LASV(LASV035-NIG-2009;Clade II)__AIT17588__GPCmut2 (opt1)
aggagagucccgcagucggcguccagcggcucugcuuguucgugugugugucguugcaggccuuauucaagcuuaccaugggccagaucaucaccuucuuccaggaggugccccacgucaucgaggaggugaugaacaucgugcugaucgcccucagccugcuggccauccucaaggggaucuacaacgucgcgaccugcggccuguucgggcugguguccuuccuccugcugugcggccgcagcugcuccacgaccuacaaggggguguacgagcuccagacccuggagcuggacauggccagccucaacaugugcaugccgcuguccugcaccaagaacaacagccaccacuacaucauggucggcaacgagacgggccuggagcucacccugaccaacaccuccaucaucaaccacaaguucugcaaccugagcgacgcccacaagaagaaccucuacgaccacgcccugauguccaucaucagcacguuccaccuguccauccccaacuucaaccaguacgaggccaugagcugcgacuucaacgggggcaagaucuccgugcaguacaaccucagccacgcguacgccguggacgccgccaaccacugcgggaccaucgcgaacggcguccugcagaccuucaugcggauggccuggggcggguccuacaucgcccuggacagcggcaagggguccugggacugcaucaugaccagcuaccaguaccucaucauccagaacacgaccugggaggaccacugccaguucucccgccccagccccaucggcuaccuggggcugcucagccagcggacccgcgacaucuacaucucccggcgccggcgcggcaccuucacguggacccugagcgacuccgagggcaacgagacccccgggggcuacugccugacccgguggaugcucaucgaggccgagcugaagugcuucgggaacacggccguggcgaagugcaacgagaagcacgacgaggaguucugcgacaugcugcgccucuucgacuucugcaagcaggccauccggcgccugaaggccccggcccagaugagcauccagcugaucaacaaggccgugaacgcgcucaucaacgaccagcugaucaugaagaaccaccuccgggacaucaugggcauccccuacugcaacuacuccaaguacugguaccugaaccacaccgucaccgggaagaccagccugccccgcugcuggcugguguccaacggcagcuaccucaacgagacgcacuucuccgacgacaucgagcagcaggccgacaacaugaucaccgagcugcugcagaaggaguacaucgaccggcagggcaagaccccgcucgggcugguggaccuguucgucuucagcaccuccuucuaccugaucagcaucuuccuccaccuggugaagauccccacgcaccgccacgugaucggcaagcccugccccaagccgcaccggcugaaccacauggggaucugcuccugcggccucuacaagcaccccgggguccccgugaaguggaagcgcugaggacuaguaauaaggaaacuguaugaaugucugugggcaggaagugaagagauccuucuguaaagguuuuuggaauuaugucugcugaauaauaaacuuuuuugaaauaauaaaucugguagaaaaaugagaucucaaaggcucuuuucagagccaccaaaaaaaaaaaaaaaaaaaaaaaaaaaaaaaaaaaaaaaaaaaaaaaaaaaaaaaaaaaaaaaaaaaaaaaaaaaaaaaaaaaaaaaaaaaaaaaaaaaaa

SEQ ID NO: 24053 - RNA, 1809 nt, Artificial Sequence
  mRNA product Design b-4 (hSL-A100) comprising derived and/or modified sequence from LASV(LASV1000-NIG-2009;Clade II)__AIT17782__GPCmut2 (opt1)
aggagagucccgcagucggcguccagcggcucugcuuguucgugugugugucguugcaggccuuauucaagcuuaccaugggccagaucaucaccuucuuccaggaggugccccacgucaucgaggaggugaugaacaucgugcugaucgcccucagccugcuggccauccucaaggggaucuacaacgucgcgaccugcggccuguucgggcugguguccuuccuccugcugugcggccgcagcugcuccacgaccuacaaggggguguacgagcuccagacccuggagcuggacauggccagccucaacaugugcaugccgcuguccugcaccaagaacaacagccaccacuacaucauggucggcaacgagacgggccuggagcucacccugaccaacaccuccaucaucaaccacaaguucugcaaccugagcgacgcccacaagaagaaccucuacgaccacgcccugauguccaucaucagcacguuccaccuguccauccccaacuucaaccaguacgaggccaugagcugcgacuucaacgggggcaagaucuccgugcaguacaaccucagccacaccuacgcgguggacgccgccaaccacugcgggaccaucgccaacggcguccugcagaccuucaugcggauggcguggggcggguccuacaucgcccuggacagcggcaagggguccugggacugcaucaugacgagcuaccaguaccucaucauccagaacaccaccugggaggaccacugccaguucucccgccccagccccaucggcuaccuggggcugcucagccagcggacccgcgacaucuacaucucccggcgccggcgcggcacguucaccuggacccugagcgacuccgagggcaacgagacccccgggggcuacugccugacgcgguggaugcucaucgaggccgagcugaagugcuucgggaacaccgccguggccaagugcaacgagaagcacgacgaggaguucugcgacaugcugcgccucuucgacuucugcaagcaggcgaucaagcggcugaagaccccggcccagaugagcauccagcugaucaacaaggccgugaacgcccucaucaacgaccagcugaucaugaagaaccaccuccgcgacaucaugggcauccccuacugcaacuacuccaaguacugguaccugaaccacaccgucacggggaagaccagccugccccggugcuggcugguguccaacggcagcuaccucaacgagacccacuucuccgacgacaucgagcagcaggccgacaacaugaucaccgagcugcugcagaaggaguacaucgaccgccagggcaagacgccgcucgggcugguggaccuguucgucuucagcaccuccuucuaccugaucagcaucuuccuccaccuggugaagauccccacccaccggcacguggucggcaagcccugccccaagccgcaccgccugaaccacauggggaucugcuccugcggccucuacaagcaccccggggugcccgugaaguggaagcggugaggacuaguaauaaggaaacuguaugaaugucugugggcaggaagugaagagauccuucuguaaagguuuuuggaauuaugucugcugaauaauaaacuuuuuugaaauaauaaaucugguagaaaaaugagaucucaaaggcucuuuucagagccaccaaaaaaaaaaaaaaaaaaaaaaaaaaaaaaaaaaaaaaaaaaaaaaaaaaaaaaaaaaaaaaaaaaaaaaaaaaaaaaaaaaaaaaaaaaaaaaaaaaaaa

SEQ ID NO: 24054 - RNA, 1809 nt, Artificial Sequence
  mRNA product Design b-4 (hSL-A100) comprising derived and/or modified sequence from LASV(LASV221-NIG-2010;Clade II)__AIT17624__GPCmut2 (opt1)
aggagagucccgcagucggcguccagcggcucugcuuguucgugugugugucguugcaggccuuauucaagcuuaccaugggccagaucaucaccuucuuccaggaggugccccacgucaucgaggaggugaugaacaucgugcugaucgcccucagccugcuggccauccucaaggggaucuacaacgucgcgaccugcggccuguucgggcugguguccuuccuccugcugugcggccgcagcugcuccacgaccuacaaggggguguacgagcuccagacccuggagcuggacauggccagccucaacaugugcaugccgcuguccugcaccaagaacaacagccaccacuacaucauggucggcaacgagacgggccuggagcucacccugaccaacaccuccaucaucaaccacaaguucugcaaccugagcgacgcccacaagaagaaccucuacgaccacgcccugauguccaucaucagcacguuccaccuguccauccccaacuucaaccaguacgaggccaugagcugcgacuucaacgggggcaagaucuccgugcaguacaaccucagccacaccuacgcgaucgacgccgccaaccacugcgggaccaucgccaacggcgugcugcagaccuucaugcggauggcguggggcggguccuacaucgcccuggacagcggcaagggguccugggacugcaucaugacgagcuaccaguaccucaucauccagaacaccaccugggaggaccacugccaguucucccgccccagccccaucggcuaccuggggcugcucagccagcggacccgcgacaucuacaucucccggcgccggcgcggcacguucaccuggacccugagcgacuccgagggcaacgagacccccgggggcuacugccugacgcgguggaugcucaucgaggccgagcugaagugcuucgggaacaccgccgucgccaagugcaacgagaagcacgacgaggaguucugcgacaugcugcgccucuucgacuucugcaagcaggcgauccggcgccugaagaccccggcccagaugagcauccagcugaucaacaaggccgugaacgcccucaucaacgaccagcugaucaugaagaaccaccuccgggacaucaugggcauccccuacugcaacuacuccaaguacugguaccugaaccacaccgugacggggaagaccagccugccccgcugcuggcuggucuccaacggcagcuaccucaacgagacccacuucuccgacgacaucgagcagcaggccgacaacaugaucaccgagaugcugcagaaggaguacauggaccggcagggcaagacgccgcuggggcucguggaccuguucguguucagcaccuccuucuaccugaucagcaucuuccugcaccucgucaagauccccacccaccgccacgugaucggcaagcccugccccaagccgcaccggcugaaccacauggggaucugcuccugcggccuguacaagcaccccggggugcccgucaaguggaagcgcugaggacuaguaauaaggaaacuguaugaaugucugugggcaggaagugaagagauccuucuguaaagguuuuuggaauuaugucugcugaauaauaaacuuuuuugaaauaauaaaucugguagaaaaaugagaucucaaaggcucuuuucagagccaccaaaaaaaaaaaaaaaaaaaaaaaaaaaaaaaaaaaaaaaaaaaaaaaaaaaaaaaaaaaaaaaaaaaaaaaaaaaaaaaaaaaaaaaaaaaaaaaaaaaaa

SEQ ID NO: 24055 - RNA, 1809 nt, Artificial Sequence
  mRNA product Design b-4 (hSL-A100) comprising derived and/or modified sequence from LASV(LASV237-NIG-2010;Clade II)__AIT17638__GPCmut2 (opt1)
aggagagucccgcagucggcguccagcggcucugcuuguucgugugugugucguugcaggccuuauucaagcuuaccaugggccagaucaucaccuucuuccaggaggugccccacgucaucgaggaggugaugaacaucgugcugaucgcccucagccugcuggccauccucaaggggaucuacaacgucgcgaccugcggccuguucgggcugguguccuuccuccugcugugcggccgcagcugcuccacgaccuacaaggggguguacgagcuccagacccuggagcuggacauggccagccucaacaugugcaugccgcuguccugcaccaagaacaacagccaccacuacaucauggucggcaacgagacgggccuggagcucacccugaccaacaccuccaucaucaaccacaaguucugcaaccugagcgacgcccacaagaaggaccucuacgaccacgcccugauguccaucaucagcacguuccaccuguccauccccaacuucaaccaguacgaggccaugagcugcgacuucaacgggggcaagaucuccgugcaguacaaccucagccacaccuacgcgguggacgccgccaaccacugcgggaccaucgccaacggcguccugcagaccuucaugcggauggcguggggcggguccuacaucgcccuggacagcggcaagggguccugggacugcaucaugacgagcuaccaguaccucaucauccagaacaccaccugggaggaccacugccaguucucccgccccagccccaucggcuaccuggggcugcucagccagcggacccgcgacaucuacaucucccggcgccggcgcggcacguucaccuggacccugagcgacuccgagggcaacgagacccccgggggcuacugccugacgcgguggaugcucaucgaggccgagcugaagugcuucgggaacaccgccguggccaagugcaacgagaagcacgacgaggaguucugcgacaugcugcgccucuucgacuucugcaagcaggcgauccggcgccugaagaccccggcccagaugagcauccagcugaucaacaaggccgugaacgcccucaucaacgaccagcugaucaugaagaaccaccuccgggacaucaugggcauccccuacugcaacuacuccaaguacugguaccugaaccacaccgucacggggaagaccagccugccccgcugcuggcugguguccaacggcagcuaccucaacgagacccacuucuccgacgacaucgagcagcaggccgacaacaugaucaccgagcugcugcagaaggaguacauggaccggcagggcaagacgccgcucgggcugguggaccuguucgucuucagcaccuccuucuaccugaucagcaucuuccuccaccugaucaagauccccacccaccgccacaucaccggcaagcccugccccaagccgcaccggcugaaccacauggggaucugcuccugcggccucuacaagcaccccggggugcccgugaaguggaagcgcugaggacuaguaauaaggaaacuguaugaaugucugugggcaggaagugaagagauccuucuguaaagguuuuuggaauuaugucugcugaauaauaaacuuuuuugaaauaauaaaucugguagaaaaaugagaucucaaaggcucuuuucagagccaccaaaaaaaaaaaaaaaaaaaaaaaaaaaaaaaaaaaaaaaaaaaaaaaaaaaaaaaaaaaaaaaaaaaaaaaaaaaaaaaaaaaaaaaaaaaaaaaaaaaaa

SEQ ID NO: 24056 - RNA, 1809 nt, Artificial Sequence
  mRNA product Design b-4 (hSL-A100) comprising derived and/or modified sequence from LASV(LASV253-NIG-2011;Clade II)__AIT17670__GPCmut2 (opt1)
aggagagucccgcagucggcguccagcggcucugcuuguucgugugugugucguugcaggccuuauucaagcuuaccaugggccagaucaucaccuucuuccaggaggugccccacgucaucgaggaggugaugaacaucgugcugaucgcccucagccugcuggccauccucaaggggaucuacaacgucgcgaccugcggccuguucgggcugguguccuuccuccugcugugcggccgcagcugcuccacgaccuacaaggggguguacgagcuccagacccuggagcuggacauggccagccucaacaugugcaugccgcuguccugcaccaagaacaacagccaccacuacaucauggucggcaacgagacgggccuggagcucacccugaccaacaccuccaucaucaaccacaaguucugcaaccugagcgacgcccacaagaagaaccucuacgaccacgcccugauguccaucaucagcacguuccaccuguccauccccaacuucaaccaguacgaggccaugagcugcgacuucaacgggggcaagaucuccgugcaguacaaccucagccacaccuacgcgguggacgccgccaaccacugcgggaccaucgccaacggcguccugcagaccuucaugcggauggcguggggcggguccuacaucgcccuggacagcggcaagggguccugggacugcaucaugacgagcuaccaguaccucaucauccagaacaccaccugggaggaccacugccaguucucccgccccagccccaucggcuaccuggggcugcucagccagcggacccgcgacaucuacaucucccggcgccggcgcggcacguucaccuggacccugagcgacuccgagggcaacgagacccccgggggcuacugccugacgcgguggaugcucaucgaggccgagcugaagugcuucgggaacaccgccguggccaagugcaacgagaagcacgacgaggaguucugcgacaugcugcgccucuucgacuucugcaagcaggcgauccggcgccugaaggccccggcccagaugagcauccagcugaucaacaaggccgugaacgcccucaucaacgaccagcugaucaugaagaaccaccuccgggacaucaugggcauccccuacugcaacuacuccaaguacugguaccugaaccacaccgucaccgggcgcacgagccugccccggugcuggcugguguccaacggcagcuaccucaacgagacccacuucuccgacgacaucgagcagcaggcggacaacaugaucaccgagcugcugcagaaggaguacaucgaccgccagggcaagaccccgcucgggcugguggaccuguucgucuucagcacguccuucuaccugaucagcaucuuccuccaccuggugaagauccccacccaccggcacaucaucggcaagcccugccccaagccgcaccgccugaaccacauggggaucugcuccugcggccucuacaagcaccccggggugcccgucaaguggaagcggugaggacuaguaauaaggaaacuguaugaaugucugugggcaggaagugaagagauccuucuguaaagguuuuuggaauuaugucugcugaauaauaaacuuuuuugaaauaauaaaucugguagaaaaaugagaucucaaaggcucuuuucagagccaccaaaaaaaaaaaaaaaaaaaaaaaaaaaaaaaaaaaaaaaaaaaaaaaaaaaaaaaaaaaaaaaaaaaaaaaaaaaaaaaaaaaaaaaaaaaaaaaaaaaaa

SEQ ID NO: 24057 - RNA, 1809 nt, Artificial Sequence
  mRNA product Design b-4 (hSL-A100) comprising derived and/or modified sequence from LASV(LASV254-NIG-2011;Clade II)__AIT17674__GPCmut2 (opt1)
aggagagucccgcagucggcguccagcggcucugcuuguucgugugugugucguugcaggccuuauucaagcuuaccaugggccagaucaucaccuucuuccaggaggugccccacgucaucgaggaggugaugaacaucgugcugaucgcccucagccugcuggccauccucaaggggaucuacaacgucgcgaccugcggccuguucgggcugguguccuuccuccugcugugcggccgcagcugcuccacgaccuacaaggggguguacgagcuccagacccuggagcuggacaugaccaaccucaacaugugcaugccgcugagcugcacgaagaacaacucccaccacuacaucauggucggcaacgagaccggccuggagcucacccugaccaacacgagcaucaucaaccacaaguucugcaaccuguccgacgcccacaagaagaaccucuacaaccacgcccugaugagcaucaucuccaccuuccaccugagcauccccaacuucaaccaguacgaggccauguccugcgacuucaacgggggcaagaucagcgugcaguacaaccucucccacagcuacgccguggacgcggccaaccacugcgggaccaucgccaacggcguccugcagaccuucaugcggauggccuggggcggguccuacaucgcgcuggacagcggcaaggggaacugggacugcaucaugacguccuaccaguaccucaucauccagaacaccaccugggaggaccacugccaguucagccgccccucccccaucggcuaccuggggcugcucagccagcggacccgcgacaucuacaucagccggcgccggcgcggcacguucaccuggacccuguccgacagcgagggcaacgagacccccgggggcuacugccugacgcgguggaugcucaucgaggccgagcugaagugcuucgggaacaccgccguggccaagugcaacgagaagcacgacgaggaguucugcgacaugcugcgccucuucgacuucugcaagcaggccauccggcgccugaagaccccggcgcaggccaacauccagcugaucaacaaggccgugaacgcccucaucaacgaccagcugaucaugaagaaccaccuccgggacaucaugggcauccccuacugcaacuacuccaaguacugguaccugaaccacaccgucacggggaagaccagccugccccgcugcuggcugguguccaacggcagcuaccucaacgagacccacuucuccgacgacaucgagcagcaggccgacaacaugaucaccgagcugcugcagaaggaguacauggaccggcagggcaagacgccgcucgggcugguggaccuguucgucuucagcaccuccuucuaccugaucagcaucuuccuccaccuggugaagauccccacccaccgccacgugaucggcaagcccugccccaagccgcaccggcugaaccacauggggaucugcuccugcggccucuacaagcaccccgggguccccgugaaguggaagcgcugaggacuaguaauaaggaaacuguaugaaugucugugggcaggaagugaagagauccuucuguaaagguuuuuggaauuaugucugcugaauaauaaacuuuuuugaaauaauaaaucugguagaaaaaugagaucucaaaggcucuuuucagagccaccaaaaaaaaaaaaaaaaaaaaaaaaaaaaaaaaaaaaaaaaaaaaaaaaaaaaaaaaaaaaaaaaaaaaaaaaaaaaaaaaaaaaaaaaaaaaaaaaaaaaa

SEQ ID NO: 24058 - RNA, 1809 nt, Artificial Sequence
  mRNA product Design b-4 (hSL-A100) comprising derived and/or modified sequence from LASV(Nig08-A19;Clade III)__ADU56618__GPCmut2 (opt1)
aggagagucccgcagucggcguccagcggcucugcuuguucgugugugugucguugcaggccuuauucaagcuuaccaugggccagaucgugaccuucuuccaggaggucccccacgugaucgaggaggugaugaacaucguccugaucgcccucagcauccuggccauccugaaggggcucuacaacaucgcgaccugcggccugaucgggcuggugacguuccuccugcuguccggccgcagcugcuccaugaccuacaaggggguguacgagcuccagacccuggagcugaacaugaacacccucaacaugugcaugccgcugagcugcacgaagaacaacucccaccacuacaucauggucggcaacgagaccggccuggagcucacccugaccaacacgagccugcuccaccacaaguucugcaaccuguccgacgcccacaagaagaaccuguacgaccacacccucaugagcaucaucuccaccuuccaccugagcauccccaacuucaaccaguacgaggccauguccugcgacuucaacgggggcaagaucaccgugcaguacaaccugagccacuccuacgccaucgacgccgcgaaccacugcgggacgguggccaacggcguccuccagaccuucaugcggauggccuggggcgggagcuacaucgcccuggacuccggccgcgggaagugggacugcaucaugaccagcuaccaguaccugaucauccagaacaccacgugggaggaccacugccaguucucccggcccagccccaucggcuaccucgggcugcugucccagcgcacccgggacaucuacaucagccgccggcgccggggcaccuucaccuggacgcucagcgacuccgagggcaacgagacccccgggggcuacugccugacccgcuggaugcugaucgaggcggagcucaagugcuucgggaacaccgccguggccaagugcaacgagaagcacgacgaggaguucugcgacaugcugcggcuguucgacuucugcaagcaggccauccgccggcucaaggccccggcgcagaugagcauccagcugaucaacaaggccgugaacgcccugaucaacgaccagcucaucaugaagaaccaccuccgcgacaucaugggcauccccuacugcaacuacuccaaguacugguaccugaaccacacgagcaccgggcggaccucccugccccgcugcuggcuggucagcaacggcuccuaccugaacgagacccacuucagcgacgacaucgagcagcaggccgacaacaugaucacggagaugcuccagaaggaguaccuggaccggcagggcaagaccccgcuggggcugguggaccucuucguguucuccaccagcuucuaccugaucuccaucuuccugcaccucgucaagauccccacccaccgccacaucgugggcaagcccugccccaagccgcaccggcugaaccacauggggaucugcagcugcggccuguacaagcagcccggggugcccguccgcuggaagcggugaggacuaguaauaaggaaacuguaugaaugucugugggcaggaagugaagagauccuucuguaaagguuuuuggaauuaugucugcugaauaauaaacuuuuuugaaauaauaaaucugguagaaaaaugagaucucaaaggcucuuuucagagccaccaaaaaaaaaaaaaaaaaaaaaaaaaaaaaaaaaaaaaaaaaaaaaaaaaaaaaaaaaaaaaaaaaaaaaaaaaaaaaaaaaaaaaaaaaaaaaaaaaaaaa

SEQ ID NO: 24059 - RNA, 1812 nt, Artificial Sequence
  mRNA product Design b-4 (hSL-A100) comprising derived and/or modified sequence from LASV(G1180-SLE-2010;Clade IV)__AIT17168__GPCmut2 (opt1)
aggagagucccgcagucggcguccagcggcucugcuuguucgugugugugucguugcaggccuuauucaagcuuaccaugggccagaucgugaccuucuuccaggaggucccccacgugaucgaggaggugaugaacaucguccugaucgcccucagcauccuggccgugcugaaggggcucuacaacuucgcgaccugcggccugguggggcugcucacguuccugcugcucugcggccgcuccugcaccgccagccgguacaagggggucuacgagcugcagacccuggagcucaacauggagacccugaacaugugcaugccgcuguccugcacgaagaacaacagccaccacuacaucauggugggcaacgagaccggccucgagcugacccugaccaacacguccaucaucaaccacaaguucugcaaccucagcgacgcccacaagaagaaccuguacgaccacgcccugauguccaucaucagcaccuuccaccucuccauccccaacuucaaccaguacgaggccaugagcugcgacuucaacgggggcaagaucuccgugcaguacaaccugagccacuccuacgcgggggacgccgccaaccacugcggcaccgucgccaacggggugcugcagaccuucaugcgcauggcguggggcggcagcuacaucgcccucgacuccgggcacggcagcugggacugcaucaugacguccuaccaguaccugaucauccagaacaccaccugggaggaccacugccaguucagccggcccucccccaucggguaccugggccuccugagccagcgcacccgggacaucuacaucagccgccggcgccggggcacguucaccuggacccuguccgacagcgaggggaaggacaccccgggcggguacugccucacgcgcuggaugcugaucgaggccgagcugaagugcuucggcaacaccgccguggccaagugcaacgagaagcacgacgaggaguucugcgacaugcuccggcuguucgacuucugcaagcaggcgauccagcgccugaaggcccccgcccagauguccauccagcucaucaacaaggccgucaacgcccugaucaacgaccagcugaucaugaagaaccaccuccgggacaucauggggauccccuacugcaacuacagcaaguacugguaccugaaccacaccaccacgggcaagaccucccugcccaagugcuggcucgugagcaacggcuccuaccugaacgagacccacuucagcgacgacaucgagcagcaggcggacaacaugaucaccgagaugcugcagaaggaguacauggagcgccaggggaagacgccgcucggccugguggaccuguucgucuucuccaccagcuucuaccugaucuccaucuuccuccaccuggugaagauccccacccaccggcacaucgugggcaagagcugccccaagccccaccgccugaaccacauggggaucugcuccugcgggcucuacaagcagccgggcguccccgugaaguggaagcggugaggacuaguaauaaggaaacuguaugaaugucugugggcaggaagugaagagauccuucuguaaagguuuuuggaauuaugucugcugaauaauaaacuuuuuugaaauaauaaaucugguagaaaaaugagaucucaaaggcucuuuucagagccaccaaaaaaaaaaaaaaaaaaaaaaaaaaaaaaaaaaaaaaaaaaaaaaaaaaaaaaaaaaaaaaaaaaaaaaaaaaaaaaaaaaaaaaaaaaaaaaaaaaaaa

SEQ ID NO: 24060 - RNA, 1812 nt, Artificial Sequence
  mRNA product Design b-4 (hSL-A100) comprising derived and/or modified sequence from LASV(G1442-SLE-2011;Clade IV)__AIT17180__GPCmut2 (opt1)
aggagagucccgcagucggcguccagcggcucugcuuguucgugugugugucguugcaggccuuauucaagcuuaccaugggccagaucgugaccuucuuccaggaggucccccacgugaucgaggaggugaugaacaucguccugaucgcccucagcauccuggccgugcugaaggggcucuacaacguggcgaccugcggccugaucgggcuggucacguuccuccugcugugcggccgcuccugcaccaccacccucuacaaggggguguacgagcugcagacgcuggagcucaacauggagacccugaacaugugcaugccgcugagcugcaccaagaacaacucccaccacuacauccgggugggcaacgagaccggccucgagcugacgcugaccaacaccagcaucaucaaccacaaguucugcaaccucuccgacgcccacaagaagaaccuguacgaccacgcccugaugagcaucaucuccaccuuccaccucagcauccccaacuucaaccaguacgaggccauguccugcgacuucaacgggggcaagaucagcguccaguacaaccugucccacagcuacgccggggacgcggccaaccacugcggcacgguggccaacggggugcugcagaccuucaugcgcauggccuggggcggcuccuacaucgcgcucgacagcgggcggggcaacugggacugcaucaugaccuccuaccaguaccugaucauccagaacaccacgugggacgaccacugccaguucagccgccccucccccaucggguaccugggccuccugagccagcggacccgcgacgucuacaucucccggcgccggcgcggcaccuucaccuggacgcugagcgacagcgaggggaaggacaccccgggcggguacugccucacccgguggaugcugaucgaggccgagcugaagugcuucggcaacaccgccguggccaagugcaacgagaagcacgacgaggaguucugcgacaugcuccgccuguucgacuucugcaagcaggccauccagcggcugaaggcgcccgcccagauguccauccagcucaucaacaaggccgugaacgcccugaucaacgaccagcugaucaugaagaaccaccuccgcgacaucauggggauccccuacugcaacuacagcaaguacugguaccugaacaacacggccaccggcaagaccucccugcccaagugcuggcucaucagcaacggcuccuaccugaacgagacccacuucagcgacgacaucgagcaggaggcggacaacaugaucacggagaugcugcagaaggaguacauggagcggcaggggaagaccccgcucggccuggucgaccuguucguguucuccaccagcuucuaccugaucuccaucuuccuccaccuggugaagauccccacccaccgccacaucgucggcaagagcugccccaagccccaccggcugaaccacauggggaucugcuccugcgggcucuacaagcagccgggcgugcccgugcgcuggaagcggugaggacuaguaauaaggaaacuguaugaaugucugugggcaggaagugaagagauccuucuguaaagguuuuuggaauuaugucugcugaauaauaaacuuuuuugaaauaauaaaucugguagaaaaaugagaucucaaaggcucuuuucagagccaccaaaaaaaaaaaaaaaaaaaaaaaaaaaaaaaaaaaaaaaaaaaaaaaaaaaaaaaaaaaaaaaaaaaaaaaaaaaaaaaaaaaaaaaaaaaaaaaaaaaaa

SEQ ID NO: 24061 - RNA, 1812 nt, Artificial Sequence
  mRNA product Design b-4 (hSL-A100) comprising derived and/or modified sequence from LASV(G3010-SLE-2013;Clade IV)__AIT17344__GPCmut2 (opt1)
aggagagucccgcagucggcguccagcggcucugcuuguucgugugugugucguugcaggccuuauucaagcuuaccaugggccagaucgugaccuucuuccaggaggucccccacgugaucgaggaggugaugaacaucguccugaucgcccucagcauccuggccgugcugaaggggcucuacaacuucgcgaccugcggccugguggggcuggucacguuccuccugcugugcggccgcuccugcaccaccagccucuacaaggggguguacgagcugcagacccuggagcucaacauggagacgcugaacaugugcaugccgcuguccugcaccaagaacaacagccaccacuacaucauggugggcaacgagaccggccucgagcugacccugacgaacaccuccaucaucaaccacaaguucugcaaccucagcgacgcccacaagaagaaccuguacaaccacgcccugauguccaucaucagcaccuuccaccucuccauccccaacuucaaccaguacgaggccaugagcugcgacuucaacgggggcaagaucuccguccaguacaaccugagccacuccuacgccggggacgcggccagccacugcggcaccguggccaacggggugcugcagacguucaugcggauggccuggggcggcuccuacaucgcgcucgacagcggguacggcaagugggacugcaucaugaccuccuaccaguaccugaucauccagaacaccaccugggaggaccacugccaguucagccgccccucccccaucggguaccugggccuccugagccagcggacgcgcgacaucuacaucagccggcgccggcgcggcaccuucaccuggacccuguccgacagcgaggggaaggacacgccgggcggguacugccucacccgguggaugcugaucgaggccgagcugaagugcuucggcaacaccgccgucgccaagugcaacgagaagcacgacgaggaguucugcgacaugcuccgccuguucgacuucugcaagcaggccauccagcggcugaagacccccgcgcagauguccauccagcucaucaacaaggccgugaacgcccugaucaacgaccagcugaucaugaagaaccaccuccgcgacaucauggggauccccuacugcaacuacagcaaguacugguaccugaaccacacgaccaccggcaagaccucccugcccaagugcuggcucgugagcaacggcuccuaccugaacgagacgcacuucagcgacgacaucgagcagcaggccgacaacaugaucaccgagaugcugcagaaggaguacauggagcggcaggggaagaccccgcucggccuggucgaccuguucguguucuccaccagcuucuaccugaucuccaucuuccuccaccuggugaagauccccacgcaccgccacaucgucggcaagagcugccccaagccccaccggcugaaccacauggggaucugcuccugcgggcucuacaagcagccgggcgugcccgugcgcuggaagcggugaggacuaguaauaaggaaacuguaugaaugucugugggcaggaagugaagagauccuucuguaaagguuuuuggaauuaugucugcugaauaauaaacuuuuuugaaauaauaaaucugguagaaaaaugagaucucaaaggcucuuuucagagccaccaaaaaaaaaaaaaaaaaaaaaaaaaaaaaaaaaaaaaaaaaaaaaaaaaaaaaaaaaaaaaaaaaaaaaaaaaaaaaaaaaaaaaaaaaaaaaaaaaaaaa

SEQ ID NO: 24062 - RNA, 1812 nt, Artificial Sequence
  mRNA product Design b-4 (hSL-A100) comprising derived and/or modified sequence from LASV(G502-SLE-2009;Clade IV)__AIT17126__GPCmut2 (opt1)
aggagagucccgcagucggcguccagcggcucugcuuguucgugugugugucguugcaggccuuauucaagcuuaccaugggccagaucgugaccuucuuccaggaggucccccacgugaucgaggaggugaugaacaucguccugaucgcccucagcauccuggccgugcugaaggggcucuacaacuucgcgaccugcggccugguggggcugcucacguuccugcugcucugcggccgcuccugcaccaccgggcuguacaagggcgucuacgagcugcagacccucgagcugaacauggagacgcugaacaugugcaugccgcucagcugcaccaagaacaacucccaccacuacaucauggugggcaacgagaccgggcuggagcugacccucacgaacaccagcaucaucaaccacaaguucugcaaccuguccgacgcccacaagaagaaccuguacgaccacgcccucaugagcaucaucuccaccuuccaccugagcauccccaacuucaaccaguacgaggccauguccugcgacuucaacggcgggaagaucagcgugcaguacaaccugucccacagcuacgccggcgacgcggccgaccacugcgggaccgucgccaacggcgugcuccagacguucaugcggauggccuggggcggguccuacaucgcgcuggacagcggccgcgggcggugggacugcaucaugaccuccuaccaguaccugaucauccagaacaccaccugggaggaccacugccaguucagccgccccucccccaucggcuaccucggccugcugagccagcggacgcgcgacaucuacaucucccggcgccggcgcgggaccuucaccuggacccucagcgacagcgagggcaaggacacgcccgggggcuacugccugacccgguggaugcugaucgaggccgagcucaagugcuucgggaacaccgccguggccaagugcaacgagaagcacgacgaggaguucugcgacaugcugcgccuguucgacuucugcaagcaggccauccagcggcucaaggcgccggcccagauguccauccagcugaucaacaaggccgucaacgcccugaucaacgaccagcucgugaugaagaaccaccuccgcgacaucaugggcauccccuacugcaacuacagccgguacugguaccugaaccacaccacgaccggccgcaccucccugcccaagugcuggcuggugagcaacggguccuaccugaacgagacccacuucagcgacgacaucgagcagcaggccgacaacaugaucacggagaugcuccagaaggaguacauggagcggcagggcaagaccccgcuggggcuggucgaccuguucguguucuccaccagcuucuaccucaucuccaucuuccugcaccuggugaagauccccacccaccgccacaucgucggcaagagcugccccaagccccaccggcucaaccacauggggaucugcuccugcggccuguacaagcagccgggcgugcccgugaaguggaagcgcugaggacuaguaauaaggaaacuguaugaaugucugugggcaggaagugaagagauccuucuguaaagguuuuuggaauuaugucugcugaauaauaaacuuuuuugaaauaauaaaucugguagaaaaaugagaucucaaaggcucuuuucagagccaccaaaaaaaaaaaaaaaaaaaaaaaaaaaaaaaaaaaaaaaaaaaaaaaaaaaaaaaaaaaaaaaaaaaaaaaaaaaaaaaaaaaaaaaaaaaaaaaaaaaaa

SEQ ID NO: 24063 - RNA, 1812 nt, Artificial Sequence
  mRNA product Design b-4 (hSL-A100) comprising derived and/or modified sequence from LASV(G733-SLE-2010;Clade IV)__AIT17154__GPCmut2 (opt1)
aggagagucccgcagucggcguccagcggcucugcuuguucgugugugugucguugcaggccuuauucaagcuuaccaugggccagaucgugaccuucuuccaggaggucccccacgugaucgaggaggugaugaacaucguccugaucgcccucagcauccuggccgugcugaaggggcucuacaacuucgcgaccugcggcaucguggggcuggucuccuuccugcuccugugcggccgcagcugcacgaccucccuguacaaggggguguacgagcuccagacccuggagcugaacauggagacccucaacaugugcaugccgcugagcugcacgaagaacaacucccaccacuacaucauggugggcaacgagaccggccuggagcucacccugaccaacacgagcaucaucaaccacaaguucugcaaccuguccgacgcccacaagaagaaccucuacgaccacgcccugaugagcaucaucuccaccuuccaccugagcauccccaacuucaaccaguacgaggccauguccugcgacuucaacgggggcaagaucagcguccaguacaaccucucccacagcuacgccggggacgcggccaaccacugcggcaccaucgccaacggggugcugcagaccuucaugcggauggccuggggcggcuccuacaucgcgcuggacagcgggcgcgaccggugggacugcaucaugacguccuaccaguaccucaucauccagaacaccaccugggaggaccacugccaguucagccgccccucccccaucggcuaccuggggcugcucagccagcggacccgcgacaucuacaucagccggcgccggcgcggcacguucaccuggacccuguccgacagcgagggcaaggacacccccgggggcuacugccugacgcgguggaugcucaucgaggccgagcugaagugcuucgggaacaccgccguggccaagugcaacgagaagcacgacgaggaguucugcgacaugcugcgccucuucgacuucugcaagcaggccauccagcggcugaaggcgccggcccagauguccauccagcugaucaacaaggccgucaacgcccucaucaacgaccagcugaucaugaagaaccaccuccgcgacaucaugggcauccccuacugcaacuacagcaaguacugguaccugaaccacaccaccacggggaagaccucccugcccaagugcuggcuggugagcaacggcuccuaccucaacgagacccacuucagcgacgacaucgagcagcaggccgacaacaugaucaccgagaugcugcagaaggaguacauggagcggcagggcaagacgccgcuggggcucguggaccuguucgucuucuccaccagcuucuaccugaucuccaucuuccugcaccucgugaagauccccacccaccgccacguggucggcaagagcugccccaagccccaccggcugaaccacauggggaucugcuccugcggccuguacgggcagccgggcgugcccgugaaguggaagcgcugaggacuaguaauaaggaaacuguaugaaugucugugggcaggaagugaagagauccuucuguaaagguuuuuggaauuaugucugcugaauaauaaacuuuuuugaaauaauaaaucugguagaaaaaugagaucucaaaggcucuuuucagagccaccaaaaaaaaaaaaaaaaaaaaaaaaaaaaaaaaaaaaaaaaaaaaaaaaaaaaaaaaaaaaaaaaaaaaaaaaaaaaaaaaaaaaaaaaaaaaaaaaaaaaa

SEQ ID NO: 24064 - RNA, 1812 nt, Artificial Sequence
  mRNA product Design b-4 (hSL-A100) comprising derived and/or modified sequence from MOPV/LASV reassortant(IGS-1;Clade IV)__AFY05576__GPCmut2 (opt1)
aggagagucccgcagucggcguccagcggcucugcuuguucgugugugugucguugcaggccuuauucaagcuuaccaugggccagaucgugaccuucuuccaggaggucccccacgugaucgaggaggugaugaacaucguccugaucgcccucagcgugcuggccgugcugaaggggcucuacaacuucgcgaccugcggccuggucgggcuggugacguuccuccugcugugcggccgcuccugcaccaccagccucuacaaggggguguacgagcugcagacccuggagcucaacauggagacgcugaacaugugcaugccgcuguccugcaccaagaacaacagccaccacuacaucauggucggcaacgagaccggccucgagcugacccugacgaacaccuccaucaucaaccacaaguucugcaaccucagcgacgcccacaagaagaaccuguacgaccacgcccugauguccaucaucagcaccuuccaccucuccauccccaacuucaaccaguacgaggccaugagcugcgacuucaacgggggcaagaucuccgugcaguacaaccugagccacuccuacgccggggacgcggccaaccacugcggcaccguggccaacgggguccugcagacguucaugcggauggccuggggcggcagcuacaucgcgcucgacuccgggcgcggcaacugggacugcaucaugaccagcuaccaguaccugaucauccagaacaccaccugggaggaccacugccaguucucccggcccagccccaucggguaccugggccuccugucccagcgcacgcgggacaucuacaucagccgccggcgccggggcaccuucaccuggacccugagcgacuccgagggggaggacacgccgggcggguacugccucacccgcuggaugcugaucgaggccgagcugaagugcuucggcaacaccgccguggccaagugcaacgagaagcacgacgaggaguucugcgacaugcuccggcuguucgacuucugcaagcaggccauccagcgccugaaggcgcccgcccagaugagcauccagcucaucaacaaggccgugaacgcccugaucaacgaccagcugaucaugaagaaccaccuccgggacaucauggggauccccuacugcaacuacuccaaguacugguaccugaaccacaccacgaccggccgcaccagccugcccaagugcuggcucgucuccaacggcagcuaccugaacgagacccacuucuccgacgacaucgagcagcaggccgacaacaugaucacggagaugcugcagaaggaguacauggagcggcaggggaagaccccgcucggccugguggaccuguucguguucagcaccuccuucuaccugaucagcaucuuccuccaccuggucaagauccccacccaccgccacaucguggggaaguccugccccaagccccaccggcugaaccacaugggcaucugcagcugcgggcucuacaagcagccgggcgugcccgucaaguggaagcgcugaggacuaguaauaaggaaacuguaugaaugucugugggcaggaagugaagagauccuucuguaaagguuuuuggaauuaugucugcugaauaauaaacuuuuuugaaauaauaaaucugguagaaaaaugagaucucaaaggcucuuuucagagccaccaaaaaaaaaaaaaaaaaaaaaaaaaaaaaaaaaaaaaaaaaaaaaaaaaaaaaaaaaaaaaaaaaaaaaaaaaaaaaaaaaaaaaaaaaaaaaaaaaaaaa

SEQ ID NO: 24065 - RNA, 1812 nt, Artificial Sequence
  mRNA product Design b-4 (hSL-A100) comprising derived and/or modified sequence from LASV(LM765-SLE-2012;Clade IV)__AIT17814__GPCmut2 (opt1)
aggagagucccgcagucggcguccagcggcucugcuuguucgugugugugucguugcaggccuuauucaagcuuaccaugggccagaucgugaccuucuuccaggaggucccccacgugaucgaggaggugaugaacaucguccugaucgcccucagcauccuggccgugcugaaggggcucuacaacuucgcgaccugcggccugguggggcuggucacguuccuccugcugugcggccgcuccugcaccaccagccucuacaaggggguguacgagcugcagacccuggagcucaacauggagacgcugaacaugugcaugccgcuguccugcaccaagaacaacagccaccacuacaucauggugggcaacgagaccggccucgagcugacccugacgaacaccuccaucaucgaccacaaguucugcaaccucagcgacgcccaccggaagaaccuguacgaccacgcccugauguccaucaucagcaccuuccaccucuccauccccaacuucaaccaguacgaggccaugagcugcgacuucaacgggggcaagaucuccguccaguacaaccugagccacuccuacgccaaggacgcggccgaccacugcgggaccguggccaacggcgugcugcagacguucaugcgcauggccuggggcgggagcuacaucgcgcucgacuccggccgggggcgcugggacugcaucaugaccagcuaccaguaccugaucauccagaacaccaccugggaggaccacugccaguucucccggcccagccccaucggcuaccuggggcuccugucccagcgcacgcgggacaucuacaucagccgccggcgccggggcaccuucaccuggacccugagcgacuccgagggcaaggacacgcccgggggcuacugccucacccgcuggaugcugaucgaggccgagcugaagugcuucgggaacaccgccgucgccaagugcaacgagaagcacgacgaggaguucugcgacaugcuccggcuguucgacuucugcaagcaggccauccagcgccugaaggcgccggcccagaugagcauccagcucaucaacaaggccgugaacgcccugaucaacgaccagcugaucaugaagaaccaccuccgggacaucaugggcauccccuacugcaacuacuccaaguacugguaccugaaccacaccacgaccgggaagaccagccugcccaagugcuggcucguguccaacggcagcuaccugaacgagacccacuucuccgacgacaucgagcagcaggccgacaacaugaucacggagaugcugcagaaggaguacauggagcgccagggcaagaccccgcucgggcuggucgaccuguucguguucagcaccuccuucuaccugaucagcaucuuccuccaccuggugaagauccccacccaccggcacaucgucggcaagcccugccccaagccgcaccgccugaaccacauggggaucugcuccugcggccucuacaagcagcccggggugcccgugaaguggaagcggugaggacuaguaauaaggaaacuguaugaaugucugugggcaggaagugaagagauccuucuguaaagguuuuuggaauuaugucugcugaauaauaaacuuuuuugaaauaauaaaucugguagaaaaaugagaucucaaaggcucuuuucagagccaccaaaaaaaaaaaaaaaaaaaaaaaaaaaaaaaaaaaaaaaaaaaaaaaaaaaaaaaaaaaaaaaaaaaaaaaaaaaaaaaaaaaaaaaaaaaaaaaaaaaaa

SEQ ID NO: 24066 - RNA, 1812 nt, Artificial Sequence
  mRNA product Design b-4 (hSL-A100) comprising derived and/or modified sequence from LASV(LM776-SLE-2012;Clade IV)__AIT17824__GPCmut2 (opt1)
aggagagucccgcagucggcguccagcggcucugcuuguucgugugugugucguugcaggccuuauucaagcuuaccaugggccagaucgugaccuucuuccaggaggucccccacgugaucgaggaggugaugaacaucguccugaucgcccucagcauccuggccgugcugaaggggcucuacaacuucgcgaccugcggccugguggggcuggucacguuccuccugcugugcggccgcuccugcaccaccagcguguacaaggggguguacgagcuccagacccuggagcugaacauggagacgcucaacaugugcaugccgcuguccugcaccaagaacaacagccaccacuacaucauggucggcaacgagaccggccuggagcucacccugacgaacaccuccaucaucaaccacaaguucugcaaccugagcgacgcccacaagaagaaccucuacgaccacgcccugauguccaucaucagcaccuuccaccuguccauccccaacuucaaccaguacgaggccaugagcugcgacuucaacgggggcaagaucuccgugcaguacaaccucagccacuccuacgccggggacgcggccaaccacugcggcaccguggccaacgggguccugcagacguucaugcggauggccuggggcggcagcuacaucgcgcuggacuccgggcacggcaagugggacugcaucaugaccagcuaccaguaccucaucauccagaacaccaccugggaggaccacugccaguucucccgccccagccccaucggguaccugggccugcucucccagcggacgcgcgacaucuacaucagccggcgccggcgcggcaccuucaccuggacccugagcgacuccgaggggaaggacacgccgggcggguacugccugacccgguggaugcucaucgaggccgagcugaagugcuucggcaacaccgccguggccaagugcaacgagaagcacgacgaggaguucugcgacaugcugcgccucuucgacuucugcaagcaggccauccagcggcugaaggcgcccgcccagaugagcauccagcugaucaacaaggccgugaacgcccucaucaacgaccagcugaucaugaagaaccaccuccgcgacaucauggggauccccuacugcaacuacuccaaguacugguaccugaaccacaccacgaccggcaagaccagccugcccaagugcuggcuggucuccaacggcagcuaccucaacgagacccacuucuccgacgacaucgagcagcaggccgacaacaugaucacggagaugcugcagaaggaguacauggagcggcaggggaagaccccgcugggccucguggaccuguucguguucagcaccuccuucuaccugaucagcaucuuccugcaccucgucaagauccccacccaccgccacaucguggggaaguccugccccaagccccaccggcugaaccacaugggcaucugcagcugcgggcuguacaagcagccgggcgugcccguccgcuggaagcggugaggacuaguaauaaggaaacuguaugaaugucugugggcaggaagugaagagauccuucuguaaagguuuuuggaauuaugucugcugaauaauaaacuuuuuugaaauaauaaaucugguagaaaaaugagaucucaaaggcucuuuucagagccaccaaaaaaaaaaaaaaaaaaaaaaaaaaaaaaaaaaaaaaaaaaaaaaaaaaaaaaaaaaaaaaaaaaaaaaaaaaaaaaaaaaaaaaaaaaaaaaaaaaaaa

SEQ ID NO: 24067 - RNA, 1812 nt, Artificial Sequence
  mRNA product Design b-4 (hSL-A100) comprising derived and/or modified sequence from LASV(Mad39;Clade IV)__ANH09722__GPCmut2 (opt1)
aggagagucccgcagucggcguccagcggcucugcuuguucgugugugugucguugcaggccuuauucaagcuuaccaugggccagaucgugaccuucuuccaggaggucccccacgugaucgaggaggugaugaacaucguccugaucgcccucagcauccuggccgugcugaaggggcucuacaacguggcgaccugcggccugaucgggcuggucacguuccuccugcugugcggccgcuccugcaccaccacccucuacaaggggguguacgagcugcaggcccuggagcucaacauggagacgcugaacaugugcaugccgcugagcugcaccaagaacaacucccaccacuacauccgggugggcaacgagaccggccucgagcugacccugacgaacaccagccucaucaaccacaaguucugcaaccuguccgacgcccacaagaagaaccuguacgaccacgcccucaugagcaucaucuccaccuuccaccugagcauccccaacuucaaccaguacgaggccauguccugcgacuucaacgacgggaagaucagcguccaguacaaccugucccacaccuacgcgggcgacacggccaaccacugcgggaccguggccaacggcgugcuccagaccuucaugcgcauggccuggggcgggagcuacaucgcgcuggacuccggccgcgggggcugggacugcaucaugaccagcuaccaguaccugaucauccagaacacgaccugggaggaccacugccaguucucccggcccagccccaucggguaccucggccugcugucccagcggacccgcgacaucuacaucagccggcgccggcgcggcaccuucacguggacccucuccgacagcgaggggaaggacaccccgggcggguacugccugacccgguggaugcugaucgaggccgagcucaagugcuucggcaacacggccgucgccaagugcaacgagaagcacgacgaggaguucugcgacaugcugcgccuguucgacuucugcaagcaggccauccagcggcucaaggcgcccgcccagaugagcauccagcugaucaacaaggccgugaacgcccugaucaacgaccagcucaucaugaagaaccaccuccgcgacaucauggggauccccuacugcaacuacuccaaguacugguaccugaaccacaccgugaccggcaagaccagccugcccaagugcuggcuggucuccaacggcagcuaccugaacgagacgcacuucuccgacgacaucgagcagcaggccgacaacaugaucaccgagaugcuccagaaggaguacauggagcggcaggggaagaccccgcugggccugguggaccuguucguguucagcaccuccuucuaccucaucagcaucuuccugcaccuggucaagauccccacgcaccgccacgugguggggaagcccugccccaagccgcaccggcucaaccacaugggcaucugcuccugcggguucuacaagcagcccggcguccccgugcgcuggaagcggugaggacuaguaauaaggaaacuguaugaaugucugugggcaggaagugaagagauccuucuguaaagguuuuuggaauuaugucugcugaauaauaaacuuuuuugaaauaauaaaucugguagaaaaaugagaucucaaaggcucuuuucagagccaccaaaaaaaaaaaaaaaaaaaaaaaaaaaaaaaaaaaaaaaaaaaaaaaaaaaaaaaaaaaaaaaaaaaaaaaaaaaaaaaaaaaaaaaaaaaaaaaaaaaaa

SEQ ID NO: 24068 - RNA, 1812 nt, Artificial Sequence
  mRNA product Design b-4 (hSL-A100) comprising derived and/or modified sequence from LASV(Z0947-SLE-2011;Clade IV)__AIT17840__GPCmut2 (opt1)
aggagagucccgcagucggcguccagcggcucugcuuguucgugugugugucguugcaggccuuauucaagcuuaccaugggccagaucgugaccuucuuccaggaggucccccacgugaucgaggaggugaugaacaucguccugaucgcccucagcauccuggccgugcugaaggggcucuacaacuucgcgaccugcggccugguggggcuggucacguuccuccugcugugcggccgcuccugcaccaucagccucuacaaggggguguacgagcugcagacccuggagcucaacauggagacccugaacaugugcaugccgcuguccugcacgaagaacaacagccaccacuacaucauggugggcaacgagaccggccucgagcugacccugaccaacacguccaucaucaaccacaaguucugcaaccucagcgacgcccacaagaagaaccuguacgaccacgcccugauguccaucaucagcaccuuccaccucuccauccccaacuucaaccaguacgaggccaugagcugcgacuucaacgggggcaagaucuccguccaguacaaccugagccacuccuacgccggggacgcggccaaccacugcggcaccguggccaacggggugcugcagaccuucaugcggauggccuggggcggcagcuacaucgcgcucgacuccgggcgcgaccggugggacugcaucaugacgagcuaccaguaccugaucauccagaacaccaccugggaggaccacugccaguucucccgccccagccccaucggcuaccuggggcuccugucccagcggacccgcgacaucuacaucagccggcgccggcgcggcacguucaccuggacccugagcgacuccgagggcaaggacacccccgggggcuacugccucacgcgguggaugcugaucgaggccgagcugaagugcuucgggaacaccgccgucgccaagugcaacgagaagcacgacgaggaguucugcgacaugcuccgccuguucgacuucugcaagcaggccauccagcggcugaaggcgccggcccagaugagcauccagcucaucaacaaggccgugaacgcccugaucaacgaccagcugaucaugaagaaccaccuccgcgacaucaugggcauccccuacugcaacuacuccaaguacugguaccugaaccacaccaccacggggaagaccagccugcccaagugcuggcucguguccaacggcagcuaccugaacgagacccacuucuccgacgacaucgagcagcaggccgacaacaugaucaccgagaugcugcagaaggaguacauggagcggcagggcaagacgccgcucgggcuggucgaccuguucguguucagcaccuccuucuaccugaucagcaucuuccuccaccuggugaagauccccacccaccgccacaucgucggcaagcccugccccaagccgcaccggcugaaccacauggggaucugcuccugcggccucuacaagcagcccggggugcccgugaaguggaagcgcugaggacuaguaauaaggaaacuguaugaaugucugugggcaggaagugaagagauccuucuguaaagguuuuuggaauuaugucugcugaauaauaaacuuuuuugaaauaauaaaucugguagaaaaaugagaucucaaaggcucuuuucagagccaccaaaaaaaaaaaaaaaaaaaaaaaaaaaaaaaaaaaaaaaaaaaaaaaaaaaaaaaaaaaaaaaaaaaaaaaaaaaaaaaaaaaaaaaaaaaaaaaaaaaaa

SEQ ID NO: 24069 - RNA, 1812 nt, Artificial Sequence
  mRNA product Design b-4 (hSL-A100) comprising derived and/or modified sequence from LASV(Josiah;Clade IV)__NP_694870__GPCmut2 (opt4)
aggagagucccgcagucggcguccagcggcucugcuuguucgugugugugucguugcaggccuuauucaagcuuaccaugggccagaucgugaccuucuuccaggaggugccccacgugaucgaggaggugaugaacaucgugcugaucgcccugagcgugcuggccgugcugaagggccuguacaacuucgccaccugcggccuggugggccuggugaccuuccugcugcugugcggcagaagcugcaccaccagccuguacaagggcguguacgagcugcagacccuggagcugaacauggagacccugaacaugugcaugccccugagcugcaccaagaacaacagccaccacuacaucauggugggcaacgagaccggccuggagcugacccugaccaacaccagcaucaucaaccacaaguucugcaaccugagcgacgcccacaagaagaaccuguacgaccacgcccugaugagcaucaucagcaccuuccaccugagcauccccaacuucaaccaguacgaggccaugagcugcgacuucaacggcggcaagaucagcgugcaguacaaccugagccacagcuacgccggcgacgccgccaaccacugcggcaccguggccaacggcgugcugcagaccuucaugagaauggccuggggcggcagcuacaucgcccuggacagcggcagaggcaacugggacugcaucaugaccagcuaccaguaccugaucauccagaacaccaccugggaggaccacugccaguucagcagacccagccccaucggcuaccugggccugcugagccagagaaccagagacaucuacaucagcagaagaagaagaggcaccuucaccuggacccugagcgacagcgagggcaaggacacccccggcggcuacugccugaccagauggaugcugaucgaggccgagcugaagugcuucggcaacaccgccguggccaagugcaacgagaagcacgacgaggaguucugcgacaugcugagacuguucgacuucugcaagcaggccauccagagacugaaggcccccgcccagaugagcauccagcugaucaacaaggccgugaacgcccugaucaacgaccagcugaucaugaagaaccaccugagagacaucaugggcauccccuacugcaacuacagcaaguacugguaccugaaccacaccaccaccggcagaaccagccugcccaagugcuggcuggugagcaacggcagcuaccugaacgagacccacuucagcgacgacaucgagcagcaggccgacaacaugaucaccgagaugcugcagaaggaguacauggagagacagggcaagaccccccugggccugguggaccuguucguguucagcaccagcuucuaccugaucagcaucuuccugcaccuggugaagauccccacccacagacacaucgugggcaagagcugccccaagccccacagacugaaccacaugggcaucugcagcugcggccuguacaagcagcccggcgugcccgugaaguggaagagaugaggacuaguaauaaggaaacuguaugaaugucugugggcaggaagugaagagauccuucuguaaagguuuuuggaauuaugucugcugaauaauaaacuuuuuugaaauaauaaaucugguagaaaaaugagaucucaaaggcucuuuucagagccaccaaaaaaaaaaaaaaaaaaaaaaaaaaaaaaaaaaaaaaaaaaaaaaaaaaaaaaaaaaaaaaaaaaaaaaaaaaaaaaaaaaaaaaaaaaaaaaaaaaaaa

SEQ ID NO: 24070 - RNA, 1809 nt, Artificial Sequence
  mRNA product Design b-4 (hSL-A100) comprising derived and/or modified sequence from LASV(LP;Clade I)__AAF86701__GPCmut2 (opt4)
aggagagucccgcagucggcguccagcggcucugcuuguucgugugugugucguugcaggccuuauucaagcuuaccaugggccagaucaucaccuucuuccaggaggugccccacgugaucgaggaggugaugaacaucgugcugaucgcccugagccugcuggccauccugaagggccuguacaacaucgccaccugcggcaucaucggccugguggccuuccuguuccugugcggcaagagcugcagccugacccugaagggcggcuacgagcugcagacccuggagcugaacauggagacccugaacaugugcaugccccugagcugcaccaagaacagcagccaccacuacaucagagugggcaacgagaccggccuggagcugacccugaccaacaccagcaucaucaaccacaaguucugcaaccugagcgacgcccacaagaagaaccuguacgaccacgcccugaugagcaucaucagcaccuuccaccugagcauccccaacuucaaccaguacgaggccaugagcugcgacuucaacggcggcaagaucagcgugcaguacaaccugagccacagcuacgccggcgacgccgccgagcacugcggcaccguggccaacggcgugcugcagaccuucaugagaauggccuggggcggcagauacaucgcccuggacagcggcaagggcaacugggacugcaucaugaccagcuaccaguaccugaucauccagaacaccaccugggaggaccacugccaguucagcagacccagccccaucggcuaccugggccugcugagccagagaaccagagacaucuacaucagcagaagaagaagaggcaccuucaccuggacccugagcgacagcgagggcaacgagacccccggcggcuacugccugaccagauggaugcugaucgaggccgagcugaagugcuucggcaacaccgccguggccaagugcaacgagaagcacgacgaggaguucugcgacaugcugagacuguucgacuucugcaagcaggccaucagaagacugaaggcccccgcccagaugagcauccagcugaucaacaaggccgugaacgcccugaucaacgaccagcugaucaugaagaaccaccugagagacaucaugggcauccccuacugcaacuacagcaaguacugguaccugaaccacaccagcagcggcagaaccagccugcccaagugcuggcugaucagcaacggcagcuaccugaacgagacccaguucagcgacgacaucgagcagcaggccgacaacaugaucaccgagaugcugcagaaggaguacaucgagagacagggcaagaccccccugggccugguggacaucuucaucuucagcaccagcuucuaccugaucagcaucuuccugcaccugaucaagauccccacccacagacacaucgugggcaagcccugccccaagccccacagacugaaccacaugggcgugugcagcugcggccuguacaagcaccccggcgugcccaccaaguggaagagaugaggacuaguaauaaggaaacuguaugaaugucugugggcaggaagugaagagauccuucuguaaagguuuuuggaauuaugucugcugaauaauaaacuuuuuugaaauaauaaaucugguagaaaaaugagaucucaaaggcucuuuucagagccaccaaaaaaaaaaaaaaaaaaaaaaaaaaaaaaaaaaaaaaaaaaaaaaaaaaaaaaaaaaaaaaaaaaaaaaaaaaaaaaaaaaaaaaaaaaaaaaaaaaaaa

SEQ ID NO: 24071 - RNA, 1809 nt, Artificial Sequence
  mRNA product Design b-4 (hSL-A100) comprising derived and/or modified sequence from LASV(803213;Clade II)__AAF86703__GPCmut2 (opt4)
aggagagucccgcagucggcguccagcggcucugcuuguucgugugugugucguugcaggccuuauucaagcuuaccaugggccagaucaucaccuucuuccaggaggugccccacgugaucgaggaggugaugaacaucgugcugaucgcccugagccugcuggccauccugaagggcaucuacaacguggccaccugcggccuguucggccugaucagcuuccugcugcugugcggcagaagcugcagcgugaccuacaagggcguguacgagcugcagacccuggagcugaacauggccaaccugaacaugugcaugccccugagcugcaccaagaacaacagccaccacuacaucauggugggcaacgagaccggccuggagcugacccugaccaacaccagcaucaucaaccacaaguucugcaaccugagcgacgcccacaagaagaaccuguacgaccacgcccugaugagcaucaucagcaccuuccaccugagcauccccaacuucaaccaguacgaggccaugagcugcgacuucaacggcggcaagaucagcgugcaguacaaccugagccacagcuucgccguggacgccgccaaccacugcggcaccaucgccaacggcgugcugcagaccuucaugagaauggccuggggcggcagcuacaucgcccuggacagcggcaagggcaacugggacugcaucaugaccagcuaccaguaccugaucauccagaacaccaccugggaggaccacugccaguucagcagacccagccccaucggcuaccugggccugcugagccagagaaccagagacaucuacaucagcagaagaagaagaggcaccuucaccuggacccugagcgacagcgagggcaacgaggcccccggcggcuacugccugaccagauggaugcugaucgaggccgagcugaagugcuucggcaacaccgccguggccaagugcaacgagaagcacgacgaggaguucugcgacaugcugagacuguucgacuucugcaagcaggccaucaagagacugaagacccccgcccagaugagcauccagcugaucaacaaggccgugaacgcccugaucaacgaccagcugaucaugaagaaccaccugagagacaucaugggcauccccuacugcaacuacagcagauacugguaccugaaccacaccgugaccggcaagaccagccugcccagaugcuggcuggugagcaacggcagcuaccugaacgagacccacuucagcgacgacaucgagcagcaggccgacaacaugaucaccgagaugcugcagaaggaguacauggacagacagggcaagaccccccugggccugguggaccuguucguguucagcaccagcuucuaccugaucagcaucuuccugcaccuggugaagauccccacccacagacacaucgugggcaagcccugccccaagccccacagacugaaccacaugggcaucugcagcugcggccuguacaagcaccccggcgugcccgugaaguggaagagaugaggacuaguaauaaggaaacuguaugaaugucugugggcaggaagugaagagauccuucuguaaagguuuuuggaauuaugucugcugaauaauaaacuuuuuugaaauaauaaaucugguagaaaaaugagaucucaaaggcucuuuucagagccaccaaaaaaaaaaaaaaaaaaaaaaaaaaaaaaaaaaaaaaaaaaaaaaaaaaaaaaaaaaaaaaaaaaaaaaaaaaaaaaaaaaaaaaaaaaaaaaaaaaaaa

SEQ ID NO: 24072 - RNA, 1809 nt, Artificial Sequence
  mRNA product Design b-4 (hSL-A100) comprising derived and/or modified sequence from LASV(GA391;Clade III)__CAA36645__GPCmut2 (opt4)
aggagagucccgcagucggcguccagcggcucugcuuguucgugugugugucguugcaggccuuauucaagcuuaccaugggccagaucgugaccuucuuccaggaggugccccacgugaucgaggaggugaugaacaucgugcugaucgcccugagcauccuggccauccugaagggccuguacaacguggccaccugcggccugaucggccuggugaccuuccugcugcugagcggcagaagcugcagccugaucuacaagggcaccuacgagcugcagacccuggagcugaacauggagacccugaacaugugcaugccccugagcugcaccaagaacaacagccaccacuacaucagagugggcaacgagaccggccuggagcugacccugaccaacaccagcauccugaaccacaaguucugcaaccugagcgacgcccacaagagaaaccuguacgaccacagccugaugagcaucaucagcaccuuccaccugagcauccccaacuucaaccaguacgaggccaugagcugcgacuucaacggcggcaagaucaccgugcaguacaaccugagccacagcuucgccguggacgccgccggccacugcggcacccuggccaacggcgugcugcagaccuucaugagaauggccuggggcggcagcuacaucgcccuggacagcggcagaggcaacugggacugcaucaugaccagcuaccaguaccugaucauccagaacaccaccugggacgaccacugccaguucagcagacccagccccaucggcuaccugggccugcugagccagagaaccagagacaucuacaucagcagaagaagaagaggcaccuucaccuggacccugagcgacagcgagggcaacgagacccccggcggcuacugccugaccagauggaugcugaucgaggccgagcugaagugcuucggcaacaccgccguggccaagugcaacgagaagcacgacgaggaguucugcgacaugcugagacuguucgacuucugcaagcaggccaucagaagacugaagacccccgcccagaugagcauccagcugaucaacaaggccgugaacgcccugaucaacgaccagcugaucaugaagaaccaccugagagacaucaugggcauccccuacugcaacuacagcagauacugguaccugaaccacaccagcaccggcaagaccagccugcccagaugcuggcugaucagcaacggcagcuaccugaacgagaccaaguucagcgacgacaucgagcagcaggccgacaacaugaucaccgagaugcugcagaaggaguacaucgacagacagggcaagaccccccugggccugguggaccuguucguguucagcaccagcuucuaccugaucagcaucuuccugcaccuggugaagauccccacccacagacacaucgugggcaagcccugccccaagccccacagacugaaccacaugggcaucugcagcugcggccuguacaagcagcccggcgugcccgugagauggaagagaugaggacuaguaauaaggaaacuguaugaaugucugugggcaggaagugaagagauccuucuguaaagguuuuuggaauuaugucugcugaauaauaaacuuuuuugaaauaauaaaucugguagaaaaaugagaucucaaaggcucuuuucagagccaccaaaaaaaaaaaaaaaaaaaaaaaaaaaaaaaaaaaaaaaaaaaaaaaaaaaaaaaaaaaaaaaaaaaaaaaaaaaaaaaaaaaaaaaaaaaaaaaaaaaaa

SEQ ID NO: 24073 - RNA, 1812 nt, Artificial Sequence
  mRNA product Design b-4 (hSL-A100) comprising derived and/or modified sequence from LASV(AV;Clade V)__CCA30314__GPCmut2 (opt4)
aggagagucccgcagucggcguccagcggcucugcuuguucgugugugugucguugcaggccuuauucaagcuuaccaugggccagaucgugaccuucuuccaggaggugccccacgugaucgaggaggugaugaacaucgugcugaucgcccugagcauccuggccgugcugaagggccuguacaacaucgccaccugcggccugaucggccugaucaccuuccugcugcugugcggcagaagcugcagcagcaaccuguacaagggcguguacgagcugcagagccuggaccugaacauggagacccugaacaugugcaugccccugagcugcaccaagaacaacagccaccacuacaucagagugggcaacgacaccggccuggagcugacccugaccaacaccagcauccugaaccacaaguucugcaaccugagcgacgcccacaagaaggaccuguacgaccacgcccugaugagcaucaucagcaccuuccaccugagcauccccaacuucaaccaguacgaggccaugagcugcgacuucaacggcggcaagaucagcgugcaguacaaccugagccacagcuacgccaucgacgccgccaaccacugcggcaccguggccaacggcauccugcagaccuucaugagaauggccuggggcggcagcuacaucgcccuggacagcggcagaggcaacugggacugcaucaugaccagcuaccaguaccugaucauccagaacaccaccugggagaaccacugccaguucagcagacccagccccaucggcuaccugggccugcugagccagagaaccagagacaucuacaucagcagaagaagaagaggcaccuucaccuggacccugagcgacagcgagggcaacgccacccccggcggcuacugccugaccagauggaugcugaucgaggccgagcugaagugcuucggcaacaccgccguggccaagugcaacgagaagcacgacgaggaguucugcgacaugcugagacuguucgacuucugcaagcaggccaucagcagacugaagagccccgcccagaugagcauccagcugaucaacaaggccgugaacgcccugaucaacgaccagcugaucaugaagaaccaccugagagacaucaugggcauccccuacugcaacuacagcaaguacugguaccugaaccacaccaucaccggcaagaccagccugcccaagugcuggcuggugagcaacggcagcuaccugaacgagacccacuucagcgacgacaucgagcagcaggccgacaacaugaucaccgagaugcugcagaaggaguacauggagagacagggcaagaccccccugggccugguggaccuguucguguucagcaccagcuucuaccugaucagcaucuuccugagacuggugaagauccccacccacagacacaucgugggcaagcccugccccaagccccacagacugaaccacaugggcaucugcagcugcggccuguacaagcagcccggcgugcccgugagauggaagagaugaggacuaguaauaaggaaacuguaugaaugucugugggcaggaagugaagagauccuucuguaaagguuuuuggaauuaugucugcugaauaauaaacuuuuuugaaauaauaaaucugguagaaaaaugagaucucaaaggcucuuuucagagccaccaaaaaaaaaaaaaaaaaaaaaaaaaaaaaaaaaaaaaaaaaaaaaaaaaaaaaaaaaaaaaaaaaaaaaaaaaaaaaaaaaaaaaaaaaaaaaaaaaaaaa

SEQ ID NO: 24074 - RNA, 1809 nt, Artificial Sequence
  mRNA product Design b-4 (hSL-A100) comprising derived and/or modified sequence from LASV(Togo/2016/7082;Clade VI)__AMR44577__GPCmut2 (opt4)
aggagagucccgcagucggcguccagcggcucugcuuguucgugugugugucguugcaggccuuauucaagcuuaccaugggccagaucaucaccuucuuccaggaggugccccacgugaucgaggaggugaugaacaucgugcugaucgcccugagccugcuggccauccugaagggcguguacaacguggccaccugcggcaucaucggccuggugaccuuccuguuccugugcggcagaagcugcagccugaucuacaagggcagcuacgagcugcagacccuggagcugaacauggagacccugaacaugugcaugccccugagcugcaccaagaacagcagccaccacuacaucagagugggcaacgagaccggccuggagcugacccugaccaacaccagcaucaucaaccacaaguucugcaaccugagcgacgcccacaagagaaaccuguacgaccacgcccugaugagcauccugagcaccuuccaccugagcauccccaacuucaaccaguacgaggccaugagcugcgacuucaacggcggcaagaucagcgugcaguacaaccugagccacgccuacgccguggacgccgccgagcacugcggcaccguggccaacggcgugcugcagaccuucaugagaauggccuggggcggcagcuacaucgcccuggacagcggcagaggcaacugggacugcaucaugaccagcuaccaguaccugaucauccagaacaccaccugggaggaccacugccaguucagcagacccagccccaucggcuaccugggccugcugagccagagaaccagagacaucuacaucagcagaagaagaagaggcaccuucaccuggacccugagcgacagcgagggcaacgagacccccggcggcuacugccugaccagauggaugcugaucgaggccgagcugaagugcuucggcaacaccgccguggccaagugcaacgagaagcacgacgaggaguucugcgacaugcugagacuguucgacuucugcaagcaggccauccagagacugaagagccccgcccagaugagcauccagcugaucaacaaggccgugaacgcccugaucaacgaccagcugaucaugaagaaccaccugagagacaugaugggcauccccuacugcaacuacagcaaguacugguaccugaaccacaccagcagcggcagaaccagccugcccaagugcuggcuggugagcaacggcagcuaccugaacgagacccacuucagcgacgacaucgagcagcaggccgacaacaugaucaccgagaugcugcagaaggaguacaucgacagacagggcaagaccccccugggccugguggaccuguucguguucagcaccagcuucuaccugaucagcaucuuccugcaccugaucaagauccccacccacagacacaucgugggcaagcccugccccaagccccacagacugaaccacaugggcaucugcagcugcggccuguacaagcagcccggcgugcccaccagauggaagagaugaggacuaguaauaaggaaacuguaugaaugucugugggcaggaagugaagagauccuucuguaaagguuuuuggaauuaugucugcugaauaauaaacuuuuuugaaauaauaaaucugguagaaaaaugagaucucaaaggcucuuuucagagccaccaaaaaaaaaaaaaaaaaaaaaaaaaaaaaaaaaaaaaaaaaaaaaaaaaaaaaaaaaaaaaaaaaaaaaaaaaaaaaaaaaaaaaaaaaaaaaaaaaaaaa

SEQ ID NO: 24075 - RNA, 1809 nt, Artificial Sequence
  mRNA product Design b-4 (hSL-A100) comprising derived and/or modified sequence from LASV(KAK-428;Clade n.d. (VII))__ANH09740__GPCmut2 (opt4)
aggagagucccgcagucggcguccagcggcucugcuuguucgugugugugucguugcaggccuuauucaagcuuaccaugggccagaucgugaccuucuuccaggaggugccccacgugaucgaggaggugaugaacaucgugcugaucgcccugagccugcuggccauccugaagggccuguacaacuucgccaccugcggcgugaucggccugaucaccuuccugcugcugugcggcagaagcugcagcgccaccuacaagggccaguacgagcugcagacccuggagcugaacauggagagccugaacaugugcaugccccugagcugcaccaagaacaacagccaccacuacaucagagccggcaacaacaccggccuggagcugacccugaccaacaccagcaucaucagccacaaguucugcaaccugagcgacgcccacaagaagaaccuguacgaccacacccugaugagcaucaucaccaccuuccaccugagcauccccaacuucaaccaguacgaggccaugagcugcgacuucaacggcggcaagaucagcauccaguacaaccugagccacagcuacgccggcgacgccgcccagcacugcggcaccguggccaacggcgugcugcagaccuucaugagaauggccuggggcggcagcuaccuggcccuggacagcggcagaagaggcugggacugcaucaucagcagcuaccaguaccugaucauccagaacaccaccugggacgaccacugccaguucagcagacccagccccaucggcuaccugggcuucgugagccagaagaccagagacaucuacaucagcagaagaagaagaggcaccuucaccuggacccugagcgacagcgagggccacgacaugcccggcggcuacugccugaccagauggaugcugaucgaggccgaccugaagugcuucggcaacaccgccguggccaagugcaacgagaagcacgacgaggaguucugcgacauguggagacuguucgacuucugcaagcaggccauccagagacugaaggcccccgcccagaugaacauccagcugaucaacaaggccgugaacgcccugaucaacgaccagcugaugaugaagaaccaccugagagacaucaugggcauccccuacugcaacuacagcaaguucugguaccugaacaacaccaccaccggcagaaccagccugcccagaugcuggcugaucagcaacggcagcuaccugaacgagacccacuucagcgacgacaucgagcagcaggccgacaacaugaucaccgagaugcugcagaaggaguacauggacagacagggcaagaccccccugggccugguggaccuguucguguucagcaccagcuucuaccugaucaccaucuuccugcaccuggugaagauccccacccacagacacaucgugggcaagcccugccccaagccccacagacugaaccacaugggcaucugcagcugcggccuguacaagcagcccggcgugcccgugagauggaagagaugaggacuaguaauaaggaaacuguaugaaugucugugggcaggaagugaagagauccuucuguaaagguuuuuggaauuaugucugcugaauaauaaacuuuuuugaaauaauaaaucugguagaaaaaugagaucucaaaggcucuuuucagagccaccaaaaaaaaaaaaaaaaaaaaaaaaaaaaaaaaaaaaaaaaaaaaaaaaaaaaaaaaaaaaaaaaaaaaaaaaaaaaaaaaaaaaaaaaaaaaaaaaaaaaa

SEQ ID NO: 24076 - RNA, 1809 nt, Artificial Sequence; identical to SEQ ID NO: 24070
  mRNA product Design b-4 (hSL-A100) comprising derived and/or modified sequence from LASV(Pinneo-NIG-1969;Clade I)__AIT17836__GPCmut2 (opt4)

SEQ ID NO: 24077 - RNA, 1809 nt, Artificial Sequence
  mRNA product Design b-4 (hSL-A100) comprising derived and/or modified sequence from LASV(ISTH0009-NIG-2011;Clade II)__AIT17404__GPCmut2 (opt4)
aggagagucccgcagucggcguccagcggcucugcuuguucgugugugugucguugcaggccuuauucaagcuuaccaugggccagaucaucaccuucuuccaggaggugccccacgugaucgaggaggugaugaacaucgugcugaucgcccugagccugcuggccauccugaagggcaucuacaacguggccaccugcggccuguucggccuggugagcuuccugcugcugugcggcagaagcugcagcaccaccuacaagggcguguacgagcugcagacccuggagcuggacauggccagccugaacaugugcaugccccugagcugcaccaagaacaacagccaccacuacaucauggugggcaacgagaccggccuggagcugacccugaccaacaccagcaucaucaaccacaaguucugcaaccugagcgacgcccacaagaagaaccuguacgaccacgcccugaugagcaucaucagcaccuuccaccugagcauccccaacuucaaccaguacgaggccaugagcugcgacuucaacggcggcaagaucagcgugcaguacaaccugagccacgccuacgccguggacgccgccaaccacugcggcaccaucgccaacggcgugcugcagaccuucaugagaauggccuggggcggcagcuacaucgcccuggacagcggcaagggcagcugggacugcaucaugaccagcuaccaguaccugaucauccagaacaccaccugggaggaccacugccaguucagcagacccagccccaucggcuaccugggccugcugagccagagaaccagagacaucuacaucagcagaagaagaagaggcaccuucaccuggacccugagcgacagcgagggcaacgagacccccggcggcuacugccugaccagauggaugcugaucgaggccgagcugaagugcuucggcaacaccgccguggccaagugcaacgagaagcacgacgaggaguucugcgacaugcugagacuguucgacuucugcaagcaggccaucagaagacugaagacccccgcccagaugagcauccagcugaucaacaaggccgugaacgcccugaucaacgaccagcugaucaugaagaaccaccugagagacaucaugggcauccccuacugcaacuacagcaaguacugguaccugaaccacaccgugaccggcaagaccagccugcccagaugcuggcuggugagcaacggcagcuaccugaacgagacccacuucagcgacgacaucgagcagcaggccgacaacaugaucaccgagcugcugcagaaggaguacauggacagacagggcaagaccccccugggccugguggaccuguucguguucagcaccagcuucuaccugaucagcaucuuccugcaccugaucaagauccccacccacagacacaucaccggcaagcccugccccaagccccacagacugaaccacaugggcaucugcagcugcggccuguacaagcaccccggcgugcccgugaaguggaagagaugaggacuaguaauaaggaaacuguaugaaugucugugggcaggaagugaagagauccuucuguaaagguuuuuggaauuaugucugcugaauaauaaacuuuuuugaaauaauaaaucugguagaaaaaugagaucucaaaggcucuuuucagagccaccaaaaaaaaaaaaaaaaaaaaaaaaaaaaaaaaaaaaaaaaaaaaaaaaaaaaaaaaaaaaaaaaaaaaaaaaaaaaaaaaaaaaaaaaaaaaaaaaaaaaa

SEQ ID NO: 24078 - RNA, 1809 nt, Artificial Sequence
  mRNA product Design b-4 (hSL-A100) comprising derived and/or modified sequence from LASV(ISTH2010-NIG-2012;Clade II)__AIT17482__GPCmut2 (opt4)
aggagagucccgcagucggcguccagcggcucugcuuguucgugugugugucguugcaggccuuauucaagcuuaccaugggccagaucaucaccuucuuccaggaggugccccacgugaucgaggaggugaugaacaucgugcugaucgcccugagccugcuggccauccugaagggcaucuacaacguggccaccugcggccuguucggccuggugagcuuccugcugcugugcggcagaagcugcagcaccaccuacaagggcguguacgagcugcagacccuggagcuggacauggccagccugaacaugugcaugccccugagcugcaccaagaacaacagccaccacuacaucauggugggcaacgagaccggccuggagcugacccugaccaacaccagcaucaucaaccacaaguucugcaaccugagcgacgcccacaagaagaaccuguacgaccacgcccugaugagcaucaucagcaccuuccaccugagcauccccaacuucaaccaguacgaggccaugagcugcgacuucaacggcggcaagaucagcgugcaguacaaccugagccacgccuacgccguggacgccgccaaccacugcggcaccaucgccaacggcgugcugcagaccuucaugagaauggccuggggcggcagcuacaucgcccuggacagcggcaagggcagcugggacugcaucaugaccagcuaccaguaccugaucauccagaacaucaccugggaggaccacugccaguucagcagacccagccccaucggcuaccugggccugcugagccagagaaccagagacaucuacaucagcagaagaagaagaggcaccuucaccuggacccugagcgacagcgagggcaacgagacccccggcggcuacugccugaccagauggaugcugaucgaggccgagcugaagugcuucggcaacaccgccguggccaagugcaacgagaagcacgacgaggaguucugcgacaugcugagacuguucgacuucugcaagcaggccaucagaagacugaagacccccgcccagaugagcauccagcugaucaacaaggccgugaacgcccugaucaacgaccagcugaucaugaagaaccaccugagagacaucaugggcauccccuacugcaacuacagcaaguacugguaccugaaccacaccgugaccggcaagaccagccugcccagaugcuggcuggugagcaacggcagcuaccugaacgagacccacuucagcgacgacaucgagcagcaggccgacaacaugaucaccgagcugcugcagaaggaguacaucgacagacagggcaagaccccccugggccugguggaccuguucguguucagcaccagcuucuaccugaucagcaucuuccugcaccuggugaagauccccacccacagacacguggugggcaagcccugccccaagccccacagacugaaccacaugggcaucugcagcugcggccuguacaagcaccccggcgugcccgugaaguggaagagaugaggacuaguaauaaggaaacuguaugaaugucugugggcaggaagugaagagauccuucuguaaagguuuuuggaauuaugucugcugaauaauaaacuuuuuugaaauaauaaaucugguagaaaaaugagaucucaaaggcucuuuucagagccaccaaaaaaaaaaaaaaaaaaaaaaaaaaaaaaaaaaaaaaaaaaaaaaaaaaaaaaaaaaaaaaaaaaaaaaaaaaaaaaaaaaaaaaaaaaaaaaaaaaaaa

SEQ ID NO: 24079 - RNA, 1809 nt, Artificial Sequence
  mRNA product Design b-4 (hSL-A100) comprising derived and/or modified sequence from LASV(Lassa virus/H.sapiens-wt/NGA/2015/ISTH_0543;Clade II)__AVO03639__GPCmut2 (opt4)
aggagagucccgcagucggcguccagcggcucugcuuguucgugugugugucguugcaggccuuauucaagcuuaccaugggccagaucaucaccuucuuccaggaggugccccacgugaucgaggaggugaugaacaucgugcugaucgcccugagccugcuggccauccugaagggcaucuacaacguggccaccugcggccuguucggccuggugagcuuccugcugcugugcggcagaagcugcagcaccaccuacaagggcguguacgagcugcagacccuggagcuggacauggccaaccugaacaugugcaugccccugagcugcaccaagaacaacagccaccacuacaucauggugggcaacgagaccggccuggagcugacccugaccaacaccagcaucaucaaccacaaguucugcaaccugagcgacgcccacaagaagaaccuguacgaccacgcccugaugagcaucaucagcaccuuccaccugagcauccccaacuucaaccaguacgaggccaugagcugcgacuucaacggcggcaagaucagcgugcaguacaaccugagccacaccuacgccguggacgccgccaaccacugcggcaccaucgccaacggcgugcugcagaccuucaugagaauggccuggggcggcagcuacaucgcccuggacagcggcaagggcagcugggacugcaucaugaccagcuaccaguaccuggugauccagaacaccaccugggaggaccacugccaguucagcagacccagccccaucggcuaccugggccugcugagccagagaaccagagacaucuacaucagcagaagaagaagaggcaccuucaccuggacccugagcgacagcgagggcaacgagacccccggcggcuacugccugaccagauggaugcugaucgaggccgagcugaagugcuucggcaacaccgccguggccaagugcaacgagaagcacgacgaggaguucugcgacaugcugagacuguucgacuucugcaagcaggccaucagaagacugaagacccccgcccagaugagcauccagcugaucaacaaggccgugaacgcccugaucaacgaccagcugaucaugaagaaccaccugagagacaucaugggcauccccuacugcaacuacagcaaguacugguaccugaaccacaccgugaccggcaagaccagccugcccagaugcuggcuggugagcaacggcagcuaccugaacgagacccacuucagcgacgacaucgagcagcaggccgacaacaugaucaccgagcugcugcagaaggaguacaucgacagacagggcaagaccccccugggccugguggaccuguucguguucagcaccagcuucuaccugaucagcaucuuccugcaccuggugaagauccccacccacagacacaucaccggcaagcccugccccaagccccacagacugaaccacaugggcaucugcagcugcggccuguacaagcaccccggcgugcccgugaaguggaagagaugaggacuaguaauaaggaaacuguaugaaugucugugggcaggaagugaagagauccuucuguaaagguuuuuggaauuaugucugcugaauaauaaacuuuuuugaaauaauaaaucugguagaaaaaugagaucucaaaggcucuuuucagagccaccaaaaaaaaaaaaaaaaaaaaaaaaaaaaaaaaaaaaaaaaaaaaaaaaaaaaaaaaaaaaaaaaaaaaaaaaaaaaaaaaaaaaaaaaaaaaaaaaaaaaa

SEQ ID NO: 24080 - RNA, 1809 nt, Artificial Sequence
  mRNA product Design b-4 (hSL-A100) comprising derived and/or modified sequence from LASV(Lassa virus/H.sapiens-wt/NGA/2016/ISTH_0009;Clade II)__AVO03571__GPCmut2 (opt4)
aggagagucccgcagucggcguccagcggcucugcuuguucgugugugugucguugcaggccuuauucaagcuuaccaugggccagaucaucaccuucuuccaggaggugccccacgugaucgaggaggugaugaacaucgugcugaucgcccugagccugcuggccauccugaagggcaucuacaacguggccaccugcggccugcugggccuggugagcuuccugcugcugugcggcagaagcugcagcaccaccuacaagggcguguacgagcugcagacccuggagcuggacauggccagccugaacaugugcaugccccugagcugcaccaagaacaacagccaccacuacaucauggugggcaacgagaccggccuggagcugacccugaccaacaccagcaucaucaaccacaaguucugcaaccugagcgacgcccacaagaagaaccuguacgaccacgcccugaugagcaucaucagcaccuuccaccugagcauccccaacuucaaccaguacgaggccaugagcugcgacuucaacggcggcagaaucagcgugcaguacaaccugagccacagcuacgccguggacgccgccaaccacugcggcaccaucgccaacggcgugcugcagaccuucaugagaauggccuggggcggcagcuacaucgcccuggacagcggcaagggcagcugggacugcaucaugaccagcuaccaguaccugaucauccagaacaccaccugggaggaccacugccaguucagcagacccagccccaucggcuaccugggccugcugagccagagaaccagagacaucuacaucagcagaagaagaagaggcaccuucaccuggacccugagcgacagcgagggcaacgagacccccggcggcuacugccugaccagauggaugcugaucgaggccgagcugaagugcuucggcaacaccgccguggccaagugcaacgagaagcacgacgaggaguucugcgacaugcugagacuguucgacuucugcaagcaggccaucagaagacugaagacccccgcccagaugagcauccagcugaucaacaaggccgugaacgcccugaucaacgaccagcugaucaugaagaaccaccugagagacaucaugggcauccccuacugcaacuacagcaaguacugguaccugaaccacaccgugaccggcaagaccagccugcccagaugcuggcuggugagcaacggcagcuaccugaacgagacccacuucagcgacgacaucgagcagcaggccgacaacaugaucaccgagcugcugcagaaggaguacaucgacagacagggcaagaccccccugggccugguggaccuguucguguucagcaccagcuucuaccugaucagcaucuuccugcaccuggugaagauccccacccacagacacaucaccggcaagcccugccccaagccccacagacugaaccacaugggcaucugcagcugcggccuguacaaccaccccggcgugcccgugaaguggaagagaugaggacuaguaauaaggaaacuguaugaaugucugugggcaggaagugaagagauccuucuguaaagguuuuuggaauuaugucugcugaauaauaaacuuuuuugaaauaauaaaucugguagaaaaaugagaucucaaaggcucuuuucagagccaccaaaaaaaaaaaaaaaaaaaaaaaaaaaaaaaaaaaaaaaaaaaaaaaaaaaaaaaaaaaaaaaaaaaaaaaaaaaaaaaaaaaaaaaaaaaaaaaaaaaaa

SEQ ID NO: 24081 - RNA, 1809 nt, Artificial Sequence
  mRNA product Design b-4 (hSL-A100) comprising derived and/or modified sequence from LASV(Lassa virus/H.sapiens-wt/NGA/2016/ISTH_0017;Clade II)__AVO03567__GPCmut2 (opt4)
aggagagucccgcagucggcguccagcggcucugcuuguucgugugugugucguugcaggccuuauucaagcuuaccaugggccagaucaucaccuucuuccaggaggugccccacgugaucgaggaggugaugaacaucgugcugaucgcccugagccugcuggccauccugaagggcaucuacaacguggccaccugcggccuguucggccuggugagcuuccugcugcugugcggcagaagcugcagcaccaccuacaagggcguguacgagcugcagacccuggagcuggacauggccagccugaacaugugcaugccccugagcugcaccaagaacaacagccaccacuacaucauggugggcaacgagaccggccuggagcugacccugaccaacaccagcaucaucaaccacaaguucugcaaccugagcgacgcccacaagaagaaccuguacgaccacgcccugaugagcaucaucagcaccuuccaccugagcauccccaacuucaaccaguacgaggccaugagcugcgacuucaacggcggcaagaucagcgugcaguacaaccugagccacaccuacgccaucgacgccgccaaccacugcggcaccaucgccaacggcgugcugcagaccuucaugagaauggccuggggcggcagcuacaucgcccuggacagcggcaagggcagcugggacugcaucaugaccagcuaccaguaccugaucauccagaacaccaccugggaggaccacugccaguucagcagacccagccccaucggcuaccugggccugcugagccagagaaccagagacaucuacaucagcagaagaagaagaggcaccuucaccuggacccugagcgacagcgagggcaacgagacccccggcggcuacugccugaccagauggaugcugaucgaggccgagcugaagugcuucggcaacaccgccguggccaagugcaacgagaagcacgacgaggaguucugcgacaugcugagacuguucgacuucugcaagcaggccaucagaagacugaagacccccgcccagaugagcauccagcugaucaacaaggccgugaacgcccugaucaacgaccagcugaucaugaagaaccaccugagagacaucaugggcauccccuacugcaacuacagcaaguacugguaccugaaccacaccgugaccggcaagaccagccugcccagaugcuggcuggugagcaacggcagcuaccugaacgagacccacuucagcgacgacaucgagcagcaggccgacaacaugaucaccgagcugcugcagaaggaguacauggacagacagggcaagaccccccugggccugguggaccuguucguguucagcaccagcuucuaccugaucagcaucuuccugcaccuggugagaauccccacccacagacacgugaucggcaagcccugccccaagccccacagacugaaccacaugggcaucugcagcugcggccuguacaagcaccccggcgugcccgugaaguggaagagaugaggacuaguaauaaggaaacuguaugaaugucugugggcaggaagugaagagauccuucuguaaagguuuuuggaauuaugucugcugaauaauaaacuuuuuugaaauaauaaaucugguagaaaaaugagaucucaaaggcucuuuucagagccaccaaaaaaaaaaaaaaaaaaaaaaaaaaaaaaaaaaaaaaaaaaaaaaaaaaaaaaaaaaaaaaaaaaaaaaaaaaaaaaaaaaaaaaaaaaaaaaaaaaaaa

SEQ ID NO: 24082 - RNA, 1809 nt, Artificial Sequence
  mRNA product Design b-4 (hSL-A100) comprising derived and/or modified sequence from LASV(Lassa virus/H.sapiens-wt/NGA/2018/ISTH_0959;Clade II)__AVV65099__GPCmut2 (opt4)
aggagagucccgcagucggcguccagcggcucugcuuguucgugugugugucguugcaggccuuauucaagcuuaccaugggccagaucaucaccuucuuccaggaggugccccacgugaucgaggaggugaugaacaucgugcugaucgcccugagccugcuggccauccugaagggcaucuacaacguggugaccugcggccuguucggccuggugagcuuccugcugcugugcggcagaagcugcagcaccaccuacaagggcguguacgagcugcagacccuggagcuggacauggccagccugaacaugugcaugccccugagcugcaccaagaacaacagccaccacuacaucauggugggcaacgagaccggccuggagcugacccugaccaacaccagcaucaucaaccacaaguucugcaaccugagcgacgcccacaagaagaaccuguacgaccacgcccugaugagcaucaucagcaccuuccaccugagcauccccaacuucaaccaguacgaggccaugagcugcgacuucaacggcggcaagaucagcgugcaguacaaccugagccacgccuacgccaucgacgccgccaaccacugcggcaccaucgccaacggcgugcugcagaccuucaugagaauggccuggggcggcagcuacaucgcccuggacagcggcaagggcagcugggacugcaucaugaccagcuaccaguaccugaucauccagaacaccaccugggaggaccacugccaguucagcagacccagccccaucggcuaccugggccugcugagccagagaaccagagacaucuacaucagcagaagaagaagaggcaccuucaccuggacccugagcgacagcgagggcaacgagacccccggcggcuacugccugaccagauggaugcugaucgaggccgagcugaagugcuucggcaacaccgccguggccaagugcaacgagaagcacgacgaggaguucugcgacaugcugagacuguucgacuucugcaagcaggccaucagaagacugaagacccccgcccagaugagcauccagcugaucaacaaggccgugaacgcccugaucaacgaccagcugaucaugaagaaccaccugagagacaucaugggcauccccuacugcaacuacagcaaguacugguaccugaaccacaccgugaccggcaagaccagccugcccagaugcuggcuggugagcaacggcagcuaccugaacgagacccacuucagcgacgacaucgagcagcaggccgacaacaugaucaccgagcugcugcagaaggaguacaucgacagacagggcaagaccccccugggccugguggaccuguucguguucagcaccagcuucuaccugaucagcaucuuccugcaccuggugaagauccccacccacagacacgugaucggcaagcccugccccaagccccacagacugaaccacaugggcaucugcagcugcggccuguacaagcaccccggcgugcccgugaaguggaagagaugaggacuaguaauaaggaaacuguaugaaugucugugggcaggaagugaagagauccuucuguaaagguuuuuggaauuaugucugcugaauaauaaacuuuuuugaaauaauaaaucugguagaaaaaugagaucucaaaggcucuuuucagagccaccaaaaaaaaaaaaaaaaaaaaaaaaaaaaaaaaaaaaaaaaaaaaaaaaaaaaaaaaaaaaaaaaaaaaaaaaaaaaaaaaaaaaaaaaaaaaaaaaaaaaa

SEQ ID NO: 24083 - RNA, 1809 nt, Artificial Sequence
  mRNA product Design b-4 (hSL-A100) comprising derived and/or modified sequence from LASV(LASV003-NIG-2008;Clade II)__AIT17580__GPCmut2 (opt4)
aggagagucccgcagucggcguccagcggcucugcuuguucgugugugugucguugcaggccuuauucaagcuuaccaugggccagaucaucaccuucuuccaggaggugccccacgugaucgaggaggugaugaacaucgugcugaucgcccugagccugcuggccauccugaagggcaucuacaacguggccaccugcggccuguucggccuggugagcuuccugcugcugugcggcagaagcugcagcaccaccuacaagggcguguacgagcugcagacccuggagcuggacauggccagccugaacaugugcaugccccugagcugcaccaagaacaacagccaccacuacaucauggugggcaacgagaccggccuggagcugacccugaccaacaccagcaucaucaaccacaaguucugcaaccugagcgacgcccacaagaagaaccuguacgaccacgcccugaugagcaucaucagcaccuuccaccugagcauccccaacuucaaccaguacgaggccaugagcugcgacuucaacggcggcaagaucagcgugcaguacaaccugagccacaccuacgccguggacgccgccaaccacugcggcaccaucgccaacggcgugcugcagaccuucaugagaauggccuggggcggcagcuacaucgcccuggacagcggcaagggcagcugggacugcaucaugaccagcuaccaguaccugaucauccagaacaccaccugggaggaccacugccaguucagcagacccagccccaucggcuaccugggccugcugagccagagaaccagagacaucuacaucagcagaagaagaagaggcaccuucaccuggacccugagcgacagcgagagcaacgagacccccggcggcuacugccugaccagauggaugcugaucgaggccgagcugaagugcuucggcaacaccgccguggccaagugcaacgagaagcacgacgaggaguucugcgacaugcugagacuguucgacuucugcaagcaggccaucagaagacugaaggcccccgcccagaugagcauccagcugaucaacaaggccgugaacgcccugaucaacgaccagcugaucaugaagaaccaccugagagacaucaugggcauccccuacugcaacuacagcaaguacugguaccugaaccacaccgugaccggcagaaccagccugcccagaugcuggcuggugagcaacggcagcuaccugaacgagacccacuucagcgacgacaucgagcagcaggccgacaacaugaucaccgagcugcugcagaaggaguacauggacagacagggcaagaccccccugggccugguggaccuguucguguucagcaccagcuucuaccugaucagcaucuuccugcaccuggugaagauccccacccacagacacgugaucggcaagcccugccccaagccccacagacugaaccacaugggcaucugcagcugcggccuguacaagcaccccggcgugcccgugaaguggaagagaugaggacuaguaauaaggaaacuguaugaaugucugugggcaggaagugaagagauccuucuguaaagguuuuuggaauuaugucugcugaauaauaaacuuuuuugaaauaauaaaucugguagaaaaaugagaucucaaaggcucuuuucagagccaccaaaaaaaaaaaaaaaaaaaaaaaaaaaaaaaaaaaaaaaaaaaaaaaaaaaaaaaaaaaaaaaaaaaaaaaaaaaaaaaaaaaaaaaaaaaaaaaaaaaaa

SEQ ID NO: 24084 - RNA, 1809 nt, Artificial Sequence
  mRNA product Design b-4 (hSL-A100) comprising derived and/or modified sequence from LASV(LASV035-NIG-2009;Clade II)__AIT17588__GPCmut2 (opt4)
aggagagucccgcagucggcguccagcggcucugcuuguucgugugugugucguugcaggccuuauucaagcuuaccaugggccagaucaucaccuucuuccaggaggugccccacgugaucgaggaggugaugaacaucgugcugaucgcccugagccugcuggccauccugaagggcaucuacaacguggccaccugcggccuguucggccuggugagcuuccugcugcugugcggcagaagcugcagcaccaccuacaagggcguguacgagcugcagacccuggagcuggacauggccagccugaacaugugcaugccccugagcugcaccaagaacaacagccaccacuacaucauggugggcaacgagaccggccuggagcugacccugaccaacaccagcaucaucaaccacaaguucugcaaccugagcgacgcccacaagaagaaccuguacgaccacgcccugaugagcaucaucagcaccuuccaccugagcauccccaacuucaaccaguacgaggccaugagcugcgacuucaacggcggcaagaucagcgugcaguacaaccugagccacgccuacgccguggacgccgccaaccacugcggcaccaucgccaacggcgugcugcagaccuucaugagaauggccuggggcggcagcuacaucgcccuggacagcggcaagggcagcugggacugcaucaugaccagcuaccaguaccugaucauccagaacaccaccugggaggaccacugccaguucagcagacccagccccaucggcuaccugggccugcugagccagagaaccagagacaucuacaucagcagaagaagaagaggcaccuucaccuggacccugagcgacagcgagggcaacgagacccccggcggcuacugccugaccagauggaugcugaucgaggccgagcugaagugcuucggcaacaccgccguggccaagugcaacgagaagcacgacgaggaguucugcgacaugcugagacuguucgacuucugcaagcaggccaucagaagacugaaggcccccgcccagaugagcauccagcugaucaacaaggccgugaacgcccugaucaacgaccagcugaucaugaagaaccaccugagagacaucaugggcauccccuacugcaacuacagcaaguacugguaccugaaccacaccgugaccggcaagaccagccugcccagaugcuggcuggugagcaacggcagcuaccugaacgagacccacuucagcgacgacaucgagcagcaggccgacaacaugaucaccgagcugcugcagaaggaguacaucgacagacagggcaagaccccccugggccugguggaccuguucguguucagcaccagcuucuaccugaucagcaucuuccugcaccuggugaagauccccacccacagacacgugaucggcaagcccugccccaagccccacagacugaaccacaugggcaucugcagcugcggccuguacaagcaccccggcgugcccgugaaguggaagagaugaggacuaguaauaaggaaacuguaugaaugucugugggcaggaagugaagagauccuucuguaaagguuuuuggaauuaugucugcugaauaauaaacuuuuuugaaauaauaaaucugguagaaaaaugagaucucaaaggcucuuuucagagccaccaaaaaaaaaaaaaaaaaaaaaaaaaaaaaaaaaaaaaaaaaaaaaaaaaaaaaaaaaaaaaaaaaaaaaaaaaaaaaaaaaaaaaaaaaaaaaaaaaaaaa

SEQ ID NO: 24085 - RNA, 1809 nt, Artificial Sequence
  mRNA product Design b-4 (hSL-A100) comprising derived and/or modified sequence from LASV(LASV1000-NIG-2009;Clade II)__AIT17782__GPCmut2 (opt4)
aggagagucccgcagucggcguccagcggcucugcuuguucgugugugugucguugcaggccuuauucaagcuuaccaugggccagaucaucaccuucuuccaggaggugccccacgugaucgaggaggugaugaacaucgugcugaucgcccugagccugcuggccauccugaagggcaucuacaacguggccaccugcggccuguucggccuggugagcuuccugcugcugugcggcagaagcugcagcaccaccuacaagggcguguacgagcugcagacccuggagcuggacauggccagccugaacaugugcaugccccugagcugcaccaagaacaacagccaccacuacaucauggugggcaacgagaccggccuggagcugacccugaccaacaccagcaucaucaaccacaaguucugcaaccugagcgacgcccacaagaagaaccuguacgaccacgcccugaugagcaucaucagcaccuuccaccugagcauccccaacuucaaccaguacgaggccaugagcugcgacuucaacggcggcaagaucagcgugcaguacaaccugagccacaccuacgccguggacgccgccaaccacugcggcaccaucgccaacggcgugcugcagaccuucaugagaauggccuggggcggcagcuacaucgcccuggacagcggcaagggcagcugggacugcaucaugaccagcuaccaguaccugaucauccagaacaccaccugggaggaccacugccaguucagcagacccagccccaucggcuaccugggccugcugagccagagaaccagagacaucuacaucagcagaagaagaagaggcaccuucaccuggacccugagcgacagcgagggcaacgagacccccggcggcuacugccugaccagauggaugcugaucgaggccgagcugaagugcuucggcaacaccgccguggccaagugcaacgagaagcacgacgaggaguucugcgacaugcugagacuguucgacuucugcaagcaggccaucaagagacugaagacccccgcccagaugagcauccagcugaucaacaaggccgugaacgcccugaucaacgaccagcugaucaugaagaaccaccugagagacaucaugggcauccccuacugcaacuacagcaaguacugguaccugaaccacaccgugaccggcaagaccagccugcccagaugcuggcuggugagcaacggcagcuaccugaacgagacccacuucagcgacgacaucgagcagcaggccgacaacaugaucaccgagcugcugcagaaggaguacaucgacagacagggcaagaccccccugggccugguggaccuguucguguucagcaccagcuucuaccugaucagcaucuuccugcaccuggugaagauccccacccacagacacguggugggcaagcccugccccaagccccacagacugaaccacaugggcaucugcagcugcggccuguacaagcaccccggcgugcccgugaaguggaagagaugaggacuaguaauaaggaaacuguaugaaugucugugggcaggaagugaagagauccuucuguaaagguuuuuggaauuaugucugcugaauaauaaacuuuuuugaaauaauaaaucugguagaaaaaugagaucucaaaggcucuuuucagagccaccaaaaaaaaaaaaaaaaaaaaaaaaaaaaaaaaaaaaaaaaaaaaaaaaaaaaaaaaaaaaaaaaaaaaaaaaaaaaaaaaaaaaaaaaaaaaaaaaaaaaa

SEQ ID NO: 24086 - RNA, 1809 nt, Artificial Sequence
  mRNA product Design b-4 (hSL-A100) comprising derived and/or modified sequence from LASV(LASV221-NIG-2010;Clade II)__AIT17624__GPCmut2 (opt4)
aggagagucccgcagucggcguccagcggcucugcuuguucgugugugugucguugcaggccuuauucaagcuuaccaugggccagaucaucaccuucuuccaggaggugccccacgugaucgaggaggugaugaacaucgugcugaucgcccugagccugcuggccauccugaagggcaucuacaacguggccaccugcggccuguucggccuggugagcuuccugcugcugugcggcagaagcugcagcaccaccuacaagggcguguacgagcugcagacccuggagcuggacauggccagccugaacaugugcaugccccugagcugcaccaagaacaacagccaccacuacaucauggugggcaacgagaccggccuggagcugacccugaccaacaccagcaucaucaaccacaaguucugcaaccugagcgacgcccacaagaagaaccuguacgaccacgcccugaugagcaucaucagcaccuuccaccugagcauccccaacuucaaccaguacgaggccaugagcugcgacuucaacggcggcaagaucagcgugcaguacaaccugagccacaccuacgccaucgacgccgccaaccacugcggcaccaucgccaacggcgugcugcagaccuucaugagaauggccuggggcggcagcuacaucgcccuggacagcggcaagggcagcugggacugcaucaugaccagcuaccaguaccugaucauccagaacaccaccugggaggaccacugccaguucagcagacccagccccaucggcuaccugggccugcugagccagagaaccagagacaucuacaucagcagaagaagaagaggcaccuucaccuggacccugagcgacagcgagggcaacgagacccccggcggcuacugccugaccagauggaugcugaucgaggccgagcugaagugcuucggcaacaccgccguggccaagugcaacgagaagcacgacgaggaguucugcgacaugcugagacuguucgacuucugcaagcaggccaucagaagacugaagacccccgcccagaugagcauccagcugaucaacaaggccgugaacgcccugaucaacgaccagcugaucaugaagaaccaccugagagacaucaugggcauccccuacugcaacuacagcaaguacugguaccugaaccacaccgugaccggcaagaccagccugcccagaugcuggcuggugagcaacggcagcuaccugaacgagacccacuucagcgacgacaucgagcagcaggccgacaacaugaucaccgagaugcugcagaaggaguacauggacagacagggcaagaccccccugggccugguggaccuguucguguucagcaccagcuucuaccugaucagcaucuuccugcaccuggugaagauccccacccacagacacgugaucggcaagcccugccccaagccccacagacugaaccacaugggcaucugcagcugcggccuguacaagcaccccggcgugcccgugaaguggaagagaugaggacuaguaauaaggaaacuguaugaaugucugugggcaggaagugaagagauccuucuguaaagguuuuuggaauuaugucugcugaauaauaaacuuuuuugaaauaauaaaucugguagaaaaaugagaucucaaaggcucuuuucagagccaccaaaaaaaaaaaaaaaaaaaaaaaaaaaaaaaaaaaaaaaaaaaaaaaaaaaaaaaaaaaaaaaaaaaaaaaaaaaaaaaaaaaaaaaaaaaaaaaaaaaaa

SEQ ID NO: 24087 - RNA, 1809 nt, Artificial Sequence
  mRNA product Design b-4 (hSL-A100) comprising derived and/or modified sequence from LASV(LASV237-NIG-2010;Clade II)__AIT17638__GPCmut2 (opt4)
aggagagucccgcagucggcguccagcggcucugcuuguucgugugugugucguugcaggccuuauucaagcuuaccaugggccagaucaucaccuucuuccaggaggugccccacgugaucgaggaggugaugaacaucgugcugaucgcccugagccugcuggccauccugaagggcaucuacaacguggccaccugcggccuguucggccuggugagcuuccugcugcugugcggcagaagcugcagcaccaccuacaagggcguguacgagcugcagacccuggagcuggacauggccagccugaacaugugcaugccccugagcugcaccaagaacaacagccaccacuacaucauggugggcaacgagaccggccuggagcugacccugaccaacaccagcaucaucaaccacaaguucugcaaccugagcgacgcccacaagaaggaccuguacgaccacgcccugaugagcaucaucagcaccuuccaccugagcauccccaacuucaaccaguacgaggccaugagcugcgacuucaacggcggcaagaucagcgugcaguacaaccugagccacaccuacgccguggacgccgccaaccacugcggcaccaucgccaacggcgugcugcagaccuucaugagaauggccuggggcggcagcuacaucgcccuggacagcggcaagggcagcugggacugcaucaugaccagcuaccaguaccugaucauccagaacaccaccugggaggaccacugccaguucagcagacccagccccaucggcuaccugggccugcugagccagagaaccagagacaucuacaucagcagaagaagaagaggcaccuucaccuggacccugagcgacagcgagggcaacgagacccccggcggcuacugccugaccagauggaugcugaucgaggccgagcugaagugcuucggcaacaccgccguggccaagugcaacgagaagcacgacgaggaguucugcgacaugcugagacuguucgacuucugcaagcaggccaucagaagacugaagacccccgcccagaugagcauccagcugaucaacaaggccgugaacgcccugaucaacgaccagcugaucaugaagaaccaccugagagacaucaugggcauccccuacugcaacuacagcaaguacugguaccugaaccacaccgugaccggcaagaccagccugcccagaugcuggcuggugagcaacggcagcuaccugaacgagacccacuucagcgacgacaucgagcagcaggccgacaacaugaucaccgagcugcugcagaaggaguacauggacagacagggcaagaccccccugggccugguggaccuguucguguucagcaccagcuucuaccugaucagcaucuuccugcaccugaucaagauccccacccacagacacaucaccggcaagcccugccccaagccccacagacugaaccacaugggcaucugcagcugcggccuguacaagcaccccggcgugcccgugaaguggaagagaugaggacuaguaauaaggaaacuguaugaaugucugugggcaggaagugaagagauccuucuguaaagguuuuuggaauuaugucugcugaauaauaaacuuuuuugaaauaauaaaucugguagaaaaaugagaucucaaaggcucuuuucagagccaccaaaaaaaaaaaaaaaaaaaaaaaaaaaaaaaaaaaaaaaaaaaaaaaaaaaaaaaaaaaaaaaaaaaaaaaaaaaaaaaaaaaaaaaaaaaaaaaaaaaaa

SEQ ID NO: 24088 - RNA, 1809 nt, Artificial Sequence
  mRNA product Design b-4 (hSL-A100) comprising derived and/or modified sequence from LASV(LASV253-NIG-2011;Clade II)__AIT17670__GPCmut2 (opt4)
aggagagucccgcagucggcguccagcggcucugcuuguucgugugugugucguugcaggccuuauucaagcuuaccaugggccagaucaucaccuucuuccaggaggugccccacgugaucgaggaggugaugaacaucgugcugaucgcccugagccugcuggccauccugaagggcaucuacaacguggccaccugcggccuguucggccuggugagcuuccugcugcugugcggcagaagcugcagcaccaccuacaagggcguguacgagcugcagacccuggagcuggacauggccagccugaacaugugcaugccccugagcugcaccaagaacaacagccaccacuacaucauggugggcaacgagaccggccuggagcugacccugaccaacaccagcaucaucaaccacaaguucugcaaccugagcgacgcccacaagaagaaccuguacgaccacgcccugaugagcaucaucagcaccuuccaccugagcauccccaacuucaaccaguacgaggccaugagcugcgacuucaacggcggcaagaucagcgugcaguacaaccugagccacaccuacgccguggacgccgccaaccacugcggcaccaucgccaacggcgugcugcagaccuucaugagaauggccuggggcggcagcuacaucgcccuggacagcggcaagggcagcugggacugcaucaugaccagcuaccaguaccugaucauccagaacaccaccugggaggaccacugccaguucagcagacccagccccaucggcuaccugggccugcugagccagagaaccagagacaucuacaucagcagaagaagaagaggcaccuucaccuggacccugagcgacagcgagggcaacgagacccccggcggcuacugccugaccagauggaugcugaucgaggccgagcugaagugcuucggcaacaccgccguggccaagugcaacgagaagcacgacgaggaguucugcgacaugcugagacuguucgacuucugcaagcaggccaucagaagacugaaggcccccgcccagaugagcauccagcugaucaacaaggccgugaacgcccugaucaacgaccagcugaucaugaagaaccaccugagagacaucaugggcauccccuacugcaacuacagcaaguacugguaccugaaccacaccgugaccggcagaaccagccugcccagaugcuggcuggugagcaacggcagcuaccugaacgagacccacuucagcgacgacaucgagcagcaggccgacaacaugaucaccgagcugcugcagaaggaguacaucgacagacagggcaagaccccccugggccugguggaccuguucguguucagcaccagcuucuaccugaucagcaucuuccugcaccuggugaagauccccacccacagacacaucaucggcaagcccugccccaagccccacagacugaaccacaugggcaucugcagcugcggccuguacaagcaccccggcgugcccgugaaguggaagagaugaggacuaguaauaaggaaacuguaugaaugucugugggcaggaagugaagagauccuucuguaaagguuuuuggaauuaugucugcugaauaauaaacuuuuuugaaauaauaaaucugguagaaaaaugagaucucaaaggcucuuuucagagccaccaaaaaaaaaaaaaaaaaaaaaaaaaaaaaaaaaaaaaaaaaaaaaaaaaaaaaaaaaaaaaaaaaaaaaaaaaaaaaaaaaaaaaaaaaaaaaaaaaaaaa

SEQ ID NO: 24089 - RNA, 1809 nt, Artificial Sequence
  mRNA product Design b-4 (hSL-A100) comprising derived and/or modified sequence from LASV(LASV254-NIG-2011;Clade II)__AIT17674__GPCmut2 (opt4)
aggagagucccgcagucggcguccagcggcucugcuuguucgugugugugucguugcaggccuuauucaagcuuaccaugggccagaucaucaccuucuuccaggaggugccccacgugaucgaggaggugaugaacaucgugcugaucgcccugagccugcuggccauccugaagggcaucuacaacguggccaccugcggccuguucggccuggugagcuuccugcugcugugcggcagaagcugcagcaccaccuacaagggcguguacgagcugcagacccuggagcuggacaugaccaaccugaacaugugcaugccccugagcugcaccaagaacaacagccaccacuacaucauggugggcaacgagaccggccuggagcugacccugaccaacaccagcaucaucaaccacaaguucugcaaccugagcgacgcccacaagaagaaccuguacaaccacgcccugaugagcaucaucagcaccuuccaccugagcauccccaacuucaaccaguacgaggccaugagcugcgacuucaacggcggcaagaucagcgugcaguacaaccugagccacagcuacgccguggacgccgccaaccacugcggcaccaucgccaacggcgugcugcagaccuucaugagaauggccuggggcggcagcuacaucgcccuggacagcggcaagggcaacugggacugcaucaugaccagcuaccaguaccugaucauccagaacaccaccugggaggaccacugccaguucagcagacccagccccaucggcuaccugggccugcugagccagagaaccagagacaucuacaucagcagaagaagaagaggcaccuucaccuggacccugagcgacagcgagggcaacgagacccccggcggcuacugccugaccagauggaugcugaucgaggccgagcugaagugcuucggcaacaccgccguggccaagugcaacgagaagcacgacgaggaguucugcgacaugcugagacuguucgacuucugcaagcaggccaucagaagacugaagacccccgcccaggccaacauccagcugaucaacaaggccgugaacgcccugaucaacgaccagcugaucaugaagaaccaccugagagacaucaugggcauccccuacugcaacuacagcaaguacugguaccugaaccacaccgugaccggcaagaccagccugcccagaugcuggcuggugagcaacggcagcuaccugaacgagacccacuucagcgacgacaucgagcagcaggccgacaacaugaucaccgagcugcugcagaaggaguacauggacagacagggcaagaccccccugggccugguggaccuguucguguucagcaccagcuucuaccugaucagcaucuuccugcaccuggugaagauccccacccacagacacgugaucggcaagcccugccccaagccccacagacugaaccacaugggcaucugcagcugcggccuguacaagcaccccggcgugcccgugaaguggaagagaugaggacuaguaauaaggaaacuguaugaaugucugugggcaggaagugaagagauccuucuguaaagguuuuuggaauuaugucugcugaauaauaaacuuuuuugaaauaauaaaucugguagaaaaaugagaucucaaaggcucuuuucagagccaccaaaaaaaaaaaaaaaaaaaaaaaaaaaaaaaaaaaaaaaaaaaaaaaaaaaaaaaaaaaaaaaaaaaaaaaaaaaaaaaaaaaaaaaaaaaaaaaaaaaaa

SEQ ID NO: 24090 - RNA, 1809 nt, Artificial Sequence
  mRNA product Design b-4 (hSL-A100) comprising derived and/or modified sequence from LASV(Nig08-A19;Clade III)__ADU56618__GPCmut2 (opt4)
aggagagucccgcagucggcguccagcggcucugcuuguucgugugugugucguugcaggccuuauucaagcuuaccaugggccagaucgugaccuucuuccaggaggugccccacgugaucgaggaggugaugaacaucgugcugaucgcccugagcauccuggccauccugaagggccuguacaacaucgccaccugcggccugaucggccuggugaccuuccugcugcugagcggcagaagcugcagcaugaccuacaagggcguguacgagcugcagacccuggagcugaacaugaacacccugaacaugugcaugccccugagcugcaccaagaacaacagccaccacuacaucauggugggcaacgagaccggccuggagcugacccugaccaacaccagccugcugcaccacaaguucugcaaccugagcgacgcccacaagaagaaccuguacgaccacacccugaugagcaucaucagcaccuuccaccugagcauccccaacuucaaccaguacgaggccaugagcugcgacuucaacggcggcaagaucaccgugcaguacaaccugagccacagcuacgccaucgacgccgccaaccacugcggcaccguggccaacggcgugcugcagaccuucaugagaauggccuggggcggcagcuacaucgcccuggacagcggcagaggcaagugggacugcaucaugaccagcuaccaguaccugaucauccagaacaccaccugggaggaccacugccaguucagcagacccagccccaucggcuaccugggccugcugagccagagaaccagagacaucuacaucagcagaagaagaagaggcaccuucaccuggacccugagcgacagcgagggcaacgagacccccggcggcuacugccugaccagauggaugcugaucgaggccgagcugaagugcuucggcaacaccgccguggccaagugcaacgagaagcacgacgaggaguucugcgacaugcugagacuguucgacuucugcaagcaggccaucagaagacugaaggcccccgcccagaugagcauccagcugaucaacaaggccgugaacgcccugaucaacgaccagcugaucaugaagaaccaccugagagacaucaugggcauccccuacugcaacuacagcaaguacugguaccugaaccacaccagcaccggcagaaccagccugcccagaugcuggcuggugagcaacggcagcuaccugaacgagacccacuucagcgacgacaucgagcagcaggccgacaacaugaucaccgagaugcugcagaaggaguaccuggacagacagggcaagaccccccugggccugguggaccuguucguguucagcaccagcuucuaccugaucagcaucuuccugcaccuggugaagauccccacccacagacacaucgugggcaagcccugccccaagccccacagacugaaccacaugggcaucugcagcugcggccuguacaagcagcccggcgugcccgugagauggaagagaugaggacuaguaauaaggaaacuguaugaaugucugugggcaggaagugaagagauccuucuguaaagguuuuuggaauuaugucugcugaauaauaaacuuuuuugaaauaauaaaucugguagaaaaaugagaucucaaaggcucuuuucagagccaccaaaaaaaaaaaaaaaaaaaaaaaaaaaaaaaaaaaaaaaaaaaaaaaaaaaaaaaaaaaaaaaaaaaaaaaaaaaaaaaaaaaaaaaaaaaaaaaaaaaaa

SEQ ID NO: 24091 - RNA, 1812 nt, Artificial Sequence
  mRNA product Design b-4 (hSL-A100) comprising derived and/or modified sequence from LASV(G1180-SLE-2010;Clade IV)__AIT17168__GPCmut2 (opt4)
aggagagucccgcagucggcguccagcggcucugcuuguucgugugugugucguugcaggccuuauucaagcuuaccaugggccagaucgugaccuucuuccaggaggugccccacgugaucgaggaggugaugaacaucgugcugaucgcccugagcauccuggccgugcugaagggccuguacaacuucgccaccugcggccuggugggccugcugaccuuccugcugcugugcggcagaagcugcaccgccagcagauacaagggcguguacgagcugcagacccuggagcugaacauggagacccugaacaugugcaugccccugagcugcaccaagaacaacagccaccacuacaucauggugggcaacgagaccggccuggagcugacccugaccaacaccagcaucaucaaccacaaguucugcaaccugagcgacgcccacaagaagaaccuguacgaccacgcccugaugagcaucaucagcaccuuccaccugagcauccccaacuucaaccaguacgaggccaugagcugcgacuucaacggcggcaagaucagcgugcaguacaaccugagccacagcuacgccggcgacgccgccaaccacugcggcaccguggccaacggcgugcugcagaccuucaugagaauggccuggggcggcagcuacaucgcccuggacagcggccacggcagcugggacugcaucaugaccagcuaccaguaccugaucauccagaacaccaccugggaggaccacugccaguucagcagacccagccccaucggcuaccugggccugcugagccagagaaccagagacaucuacaucagcagaagaagaagaggcaccuucaccuggacccugagcgacagcgagggcaaggacacccccggcggcuacugccugaccagauggaugcugaucgaggccgagcugaagugcuucggcaacaccgccguggccaagugcaacgagaagcacgacgaggaguucugcgacaugcugagacuguucgacuucugcaagcaggccauccagagacugaaggcccccgcccagaugagcauccagcugaucaacaaggccgugaacgcccugaucaacgaccagcugaucaugaagaaccaccugagagacaucaugggcauccccuacugcaacuacagcaaguacugguaccugaaccacaccaccaccggcaagaccagccugcccaagugcuggcuggugagcaacggcagcuaccugaacgagacccacuucagcgacgacaucgagcagcaggccgacaacaugaucaccgagaugcugcagaaggaguacauggagagacagggcaagaccccccugggccugguggaccuguucguguucagcaccagcuucuaccugaucagcaucuuccugcaccuggugaagauccccacccacagacacaucgugggcaagagcugccccaagccccacagacugaaccacaugggcaucugcagcugcggccuguacaagcagcccggcgugcccgugaaguggaagagaugaggacuaguaauaaggaaacuguaugaaugucugugggcaggaagugaagagauccuucuguaaagguuuuuggaauuaugucugcugaauaauaaacuuuuuugaaauaauaaaucugguagaaaaaugagaucucaaaggcucuuuucagagccaccaaaaaaaaaaaaaaaaaaaaaaaaaaaaaaaaaaaaaaaaaaaaaaaaaaaaaaaaaaaaaaaaaaaaaaaaaaaaaaaaaaaaaaaaaaaaaaaaaaaaa

SEQ ID NO: 24092 - RNA, 1812 nt, Artificial Sequence
  mRNA product Design b-4 (hSL-A100) comprising derived and/or modified sequence from LASV(G1442-SLE-2011;Clade IV)__AIT17180__GPCmut2 (opt4)
aggagagucccgcagucggcguccagcggcucugcuuguucgugugugugucguugcaggccuuauucaagcuuaccaugggccagaucgugaccuucuuccaggaggugccccacgugaucgaggaggugaugaacaucgugcugaucgcccugagcauccuggccgugcugaagggccuguacaacguggccaccugcggccugaucggccuggugaccuuccugcugcugugcggcagaagcugcaccaccacccuguacaagggcguguacgagcugcagacccuggagcugaacauggagacccugaacaugugcaugccccugagcugcaccaagaacaacagccaccacuacaucagagugggcaacgagaccggccuggagcugacccugaccaacaccagcaucaucaaccacaaguucugcaaccugagcgacgcccacaagaagaaccuguacgaccacgcccugaugagcaucaucagcaccuuccaccugagcauccccaacuucaaccaguacgaggccaugagcugcgacuucaacggcggcaagaucagcgugcaguacaaccugagccacagcuacgccggcgacgccgccaaccacugcggcaccguggccaacggcgugcugcagaccuucaugagaauggccuggggcggcagcuacaucgcccuggacagcggcagaggcaacugggacugcaucaugaccagcuaccaguaccugaucauccagaacaccaccugggacgaccacugccaguucagcagacccagccccaucggcuaccugggccugcugagccagagaaccagagacguguacaucagcagaagaagaagaggcaccuucaccuggacccugagcgacagcgagggcaaggacacccccggcggcuacugccugaccagauggaugcugaucgaggccgagcugaagugcuucggcaacaccgccguggccaagugcaacgagaagcacgacgaggaguucugcgacaugcugagacuguucgacuucugcaagcaggccauccagagacugaaggcccccgcccagaugagcauccagcugaucaacaaggccgugaacgcccugaucaacgaccagcugaucaugaagaaccaccugagagacaucaugggcauccccuacugcaacuacagcaaguacugguaccugaacaacaccgccaccggcaagaccagccugcccaagugcuggcugaucagcaacggcagcuaccugaacgagacccacuucagcgacgacaucgagcaggaggccgacaacaugaucaccgagaugcugcagaaggaguacauggagagacagggcaagaccccccugggccugguggaccuguucguguucagcaccagcuucuaccugaucagcaucuuccugcaccuggugaagauccccacccacagacacaucgugggcaagagcugccccaagccccacagacugaaccacaugggcaucugcagcugcggccuguacaagcagcccggcgugcccgugagauggaagagaugaggacuaguaauaaggaaacuguaugaaugucugugggcaggaagugaagagauccuucuguaaagguuuuuggaauuaugucugcugaauaauaaacuuuuuugaaauaauaaaucugguagaaaaaugagaucucaaaggcucuuuucagagccaccaaaaaaaaaaaaaaaaaaaaaaaaaaaaaaaaaaaaaaaaaaaaaaaaaaaaaaaaaaaaaaaaaaaaaaaaaaaaaaaaaaaaaaaaaaaaaaaaaaaaa

SEQ ID NO: 24093 - RNA, 1812 nt, Artificial Sequence
  mRNA product Design b-4 (hSL-A100) comprising derived and/or modified sequence from LASV(G3010-SLE-2013;Clade IV)__AIT17344__GPCmut2 (opt4)
aggagagucccgcagucggcguccagcggcucugcuuguucgugugugugucguugcaggccuuauucaagcuuaccaugggccagaucgugaccuucuuccaggaggugccccacgugaucgaggaggugaugaacaucgugcugaucgcccugagcauccuggccgugcugaagggccuguacaacuucgccaccugcggccuggugggccuggugaccuuccugcugcugugcggcagaagcugcaccaccagccuguacaagggcguguacgagcugcagacccuggagcugaacauggagacccugaacaugugcaugccccugagcugcaccaagaacaacagccaccacuacaucauggugggcaacgagaccggccuggagcugacccugaccaacaccagcaucaucaaccacaaguucugcaaccugagcgacgcccacaagaagaaccuguacaaccacgcccugaugagcaucaucagcaccuuccaccugagcauccccaacuucaaccaguacgaggccaugagcugcgacuucaacggcggcaagaucagcgugcaguacaaccugagccacagcuacgccggcgacgccgccagccacugcggcaccguggccaacggcgugcugcagaccuucaugagaauggccuggggcggcagcuacaucgcccuggacagcggcuacggcaagugggacugcaucaugaccagcuaccaguaccugaucauccagaacaccaccugggaggaccacugccaguucagcagacccagccccaucggcuaccugggccugcugagccagagaaccagagacaucuacaucagcagaagaagaagaggcaccuucaccuggacccugagcgacagcgagggcaaggacacccccggcggcuacugccugaccagauggaugcugaucgaggccgagcugaagugcuucggcaacaccgccguggccaagugcaacgagaagcacgacgaggaguucugcgacaugcugagacuguucgacuucugcaagcaggccauccagagacugaagacccccgcccagaugagcauccagcugaucaacaaggccgugaacgcccugaucaacgaccagcugaucaugaagaaccaccugagagacaucaugggcauccccuacugcaacuacagcaaguacugguaccugaaccacaccaccaccggcaagaccagccugcccaagugcuggcuggugagcaacggcagcuaccugaacgagacccacuucagcgacgacaucgagcagcaggccgacaacaugaucaccgagaugcugcagaaggaguacauggagagacagggcaagaccccccugggccugguggaccuguucguguucagcaccagcuucuaccugaucagcaucuuccugcaccuggugaagauccccacccacagacacaucgugggcaagagcugccccaagccccacagacugaaccacaugggcaucugcagcugcggccuguacaagcagcccggcgugcccgugagauggaagagaugaggacuaguaauaaggaaacuguaugaaugucugugggcaggaagugaagagauccuucuguaaagguuuuuggaauuaugucugcugaauaauaaacuuuuuugaaauaauaaaucugguagaaaaaugagaucucaaaggcucuuuucagagccaccaaaaaaaaaaaaaaaaaaaaaaaaaaaaaaaaaaaaaaaaaaaaaaaaaaaaaaaaaaaaaaaaaaaaaaaaaaaaaaaaaaaaaaaaaaaaaaaaaaaaa

SEQ ID NO: 24094 - RNA, 1812 nt, Artificial Sequence
  mRNA product Design b-4 (hSL-A100) comprising derived and/or modified sequence from LASV(G502-SLE-2009;Clade IV)__AIT17126__GPCmut2 (opt4)
aggagagucccgcagucggcguccagcggcucugcuuguucgugugugugucguugcaggccuuauucaagcuuaccaugggccagaucgugaccuucuuccaggaggugccccacgugaucgaggaggugaugaacaucgugcugaucgcccugagcauccuggccgugcugaagggccuguacaacuucgccaccugcggccuggugggccugcugaccuuccugcugcugugcggcagaagcugcaccaccggccuguacaagggcguguacgagcugcagacccuggagcugaacauggagacccugaacaugugcaugccccugagcugcaccaagaacaacagccaccacuacaucauggugggcaacgagaccggccuggagcugacccugaccaacaccagcaucaucaaccacaaguucugcaaccugagcgacgcccacaagaagaaccuguacgaccacgcccugaugagcaucaucagcaccuuccaccugagcauccccaacuucaaccaguacgaggccaugagcugcgacuucaacggcggcaagaucagcgugcaguacaaccugagccacagcuacgccggcgacgccgccgaccacugcggcaccguggccaacggcgugcugcagaccuucaugagaauggccuggggcggcagcuacaucgcccuggacagcggcagaggcagaugggacugcaucaugaccagcuaccaguaccugaucauccagaacaccaccugggaggaccacugccaguucagcagacccagccccaucggcuaccugggccugcugagccagagaaccagagacaucuacaucagcagaagaagaagaggcaccuucaccuggacccugagcgacagcgagggcaaggacacccccggcggcuacugccugaccagauggaugcugaucgaggccgagcugaagugcuucggcaacaccgccguggccaagugcaacgagaagcacgacgaggaguucugcgacaugcugagacuguucgacuucugcaagcaggccauccagagacugaaggcccccgcccagaugagcauccagcugaucaacaaggccgugaacgcccugaucaacgaccagcuggugaugaagaaccaccugagagacaucaugggcauccccuacugcaacuacagcagauacugguaccugaaccacaccaccaccggcagaaccagccugcccaagugcuggcuggugagcaacggcagcuaccugaacgagacccacuucagcgacgacaucgagcagcaggccgacaacaugaucaccgagaugcugcagaaggaguacauggagagacagggcaagaccccccugggccugguggaccuguucguguucagcaccagcuucuaccugaucagcaucuuccugcaccuggugaagauccccacccacagacacaucgugggcaagagcugccccaagccccacagacugaaccacaugggcaucugcagcugcggccuguacaagcagcccggcgugcccgugaaguggaagagaugaggacuaguaauaaggaaacuguaugaaugucugugggcaggaagugaagagauccuucuguaaagguuuuuggaauuaugucugcugaauaauaaacuuuuuugaaauaauaaaucugguagaaaaaugagaucucaaaggcucuuuucagagccaccaaaaaaaaaaaaaaaaaaaaaaaaaaaaaaaaaaaaaaaaaaaaaaaaaaaaaaaaaaaaaaaaaaaaaaaaaaaaaaaaaaaaaaaaaaaaaaaaaaaaa

SEQ ID NO: 24095 - RNA, 1812 nt, Artificial Sequence
  mRNA product Design b-4 (hSL-A100) comprising derived and/or modified sequence from LASV(G733-SLE-2010;Clade IV)__AIT17154__GPCmut2 (opt4)
aggagagucccgcagucggcguccagcggcucugcuuguucgugugugugucguugcaggccuuauucaagcuuaccaugggccagaucgugaccuucuuccaggaggugccccacgugaucgaggaggugaugaacaucgugcugaucgcccugagcauccuggccgugcugaagggccuguacaacuucgccaccugcggcaucgugggccuggugagcuuccugcugcugugcggcagaagcugcaccaccagccuguacaagggcguguacgagcugcagacccuggagcugaacauggagacccugaacaugugcaugccccugagcugcaccaagaacaacagccaccacuacaucauggugggcaacgagaccggccuggagcugacccugaccaacaccagcaucaucaaccacaaguucugcaaccugagcgacgcccacaagaagaaccuguacgaccacgcccugaugagcaucaucagcaccuuccaccugagcauccccaacuucaaccaguacgaggccaugagcugcgacuucaacggcggcaagaucagcgugcaguacaaccugagccacagcuacgccggcgacgccgccaaccacugcggcaccaucgccaacggcgugcugcagaccuucaugagaauggccuggggcggcagcuacaucgcccuggacagcggcagagacagaugggacugcaucaugaccagcuaccaguaccugaucauccagaacaccaccugggaggaccacugccaguucagcagacccagccccaucggcuaccugggccugcugagccagagaaccagagacaucuacaucagcagaagaagaagaggcaccuucaccuggacccugagcgacagcgagggcaaggacacccccggcggcuacugccugaccagauggaugcugaucgaggccgagcugaagugcuucggcaacaccgccguggccaagugcaacgagaagcacgacgaggaguucugcgacaugcugagacuguucgacuucugcaagcaggccauccagagacugaaggcccccgcccagaugagcauccagcugaucaacaaggccgugaacgcccugaucaacgaccagcugaucaugaagaaccaccugagagacaucaugggcauccccuacugcaacuacagcaaguacugguaccugaaccacaccaccaccggcaagaccagccugcccaagugcuggcuggugagcaacggcagcuaccugaacgagacccacuucagcgacgacaucgagcagcaggccgacaacaugaucaccgagaugcugcagaaggaguacauggagagacagggcaagaccccccugggccugguggaccuguucguguucagcaccagcuucuaccugaucagcaucuuccugcaccuggugaagauccccacccacagacacguggugggcaagagcugccccaagccccacagacugaaccacaugggcaucugcagcugcggccuguacggccagcccggcgugcccgugaaguggaagagaugaggacuaguaauaaggaaacuguaugaaugucugugggcaggaagugaagagauccuucuguaaagguuuuuggaauuaugucugcugaauaauaaacuuuuuugaaauaauaaaucugguagaaaaaugagaucucaaaggcucuuuucagagccaccaaaaaaaaaaaaaaaaaaaaaaaaaaaaaaaaaaaaaaaaaaaaaaaaaaaaaaaaaaaaaaaaaaaaaaaaaaaaaaaaaaaaaaaaaaaaaaaaaaaaa

SEQ ID NO: 24096 - RNA, 1812 nt, Artificial Sequence
  mRNA product Design b-4 (hSL-A100) comprising derived and/or modified sequence from MOPV/LASV reassortant(IGS-1;Clade IV)__AFY05576__GPCmut2 (opt4)
aggagagucccgcagucggcguccagcggcucugcuuguucgugugugugucguugcaggccuuauucaagcuuaccaugggccagaucgugaccuucuuccaggaggugccccacgugaucgaggaggugaugaacaucgugcugaucgcccugagcgugcuggccgugcugaagggccuguacaacuucgccaccugcggccuggugggccuggugaccuuccugcugcugugcggcagaagcugcaccaccagccuguacaagggcguguacgagcugcagacccuggagcugaacauggagacccugaacaugugcaugccccugagcugcaccaagaacaacagccaccacuacaucauggugggcaacgagaccggccuggagcugacccugaccaacaccagcaucaucaaccacaaguucugcaaccugagcgacgcccacaagaagaaccuguacgaccacgcccugaugagcaucaucagcaccuuccaccugagcauccccaacuucaaccaguacgaggccaugagcugcgacuucaacggcggcaagaucagcgugcaguacaaccugagccacagcuacgccggcgacgccgccaaccacugcggcaccguggccaacggcgugcugcagaccuucaugagaauggccuggggcggcagcuacaucgcccuggacagcggcagaggcaacugggacugcaucaugaccagcuaccaguaccugaucauccagaacaccaccugggaggaccacugccaguucagcagacccagccccaucggcuaccugggccugcugagccagagaaccagagacaucuacaucagcagaagaagaagaggcaccuucaccuggacccugagcgacagcgagggcgaggacacccccggcggcuacugccugaccagauggaugcugaucgaggccgagcugaagugcuucggcaacaccgccguggccaagugcaacgagaagcacgacgaggaguucugcgacaugcugagacuguucgacuucugcaagcaggccauccagagacugaaggcccccgcccagaugagcauccagcugaucaacaaggccgugaacgcccugaucaacgaccagcugaucaugaagaaccaccugagagacaucaugggcauccccuacugcaacuacagcaaguacugguaccugaaccacaccaccaccggcagaaccagccugcccaagugcuggcuggugagcaacggcagcuaccugaacgagacccacuucagcgacgacaucgagcagcaggccgacaacaugaucaccgagaugcugcagaaggaguacauggagagacagggcaagaccccccugggccugguggaccuguucguguucagcaccagcuucuaccugaucagcaucuuccugcaccuggugaagauccccacccacagacacaucgugggcaagagcugccccaagccccacagacugaaccacaugggcaucugcagcugcggccuguacaagcagcccggcgugcccgugaaguggaagagaugaggacuaguaauaaggaaacuguaugaaugucugugggcaggaagugaagagauccuucuguaaagguuuuuggaauuaugucugcugaauaauaaacuuuuuugaaauaauaaaucugguagaaaaaugagaucucaaaggcucuuuucagagccaccaaaaaaaaaaaaaaaaaaaaaaaaaaaaaaaaaaaaaaaaaaaaaaaaaaaaaaaaaaaaaaaaaaaaaaaaaaaaaaaaaaaaaaaaaaaaaaaaaaaaa

SEQ ID NO: 24097 - RNA, 1812 nt, Artificial Sequence
  mRNA product Design b-4 (hSL-A100) comprising derived and/or modified sequence from LASV(LM765-SLE-2012;Clade IV)__AIT17814__GPCmut2 (opt4)
aggagagucccgcagucggcguccagcggcucugcuuguucgugugugugucguugcaggccuuauucaagcuuaccaugggccagaucgugaccuucuuccaggaggugccccacgugaucgaggaggugaugaacaucgugcugaucgcccugagcauccuggccgugcugaagggccuguacaacuucgccaccugcggccuggugggccuggugaccuuccugcugcugugcggcagaagcugcaccaccagccuguacaagggcguguacgagcugcagacccuggagcugaacauggagacccugaacaugugcaugccccugagcugcaccaagaacaacagccaccacuacaucauggugggcaacgagaccggccuggagcugacccugaccaacaccagcaucaucgaccacaaguucugcaaccugagcgacgcccacagaaagaaccuguacgaccacgcccugaugagcaucaucagcaccuuccaccugagcauccccaacuucaaccaguacgaggccaugagcugcgacuucaacggcggcaagaucagcgugcaguacaaccugagccacagcuacgccaaggacgccgccgaccacugcggcaccguggccaacggcgugcugcagaccuucaugagaauggccuggggcggcagcuacaucgcccuggacagcggcagaggcagaugggacugcaucaugaccagcuaccaguaccugaucauccagaacaccaccugggaggaccacugccaguucagcagacccagccccaucggcuaccugggccugcugagccagagaaccagagacaucuacaucagcagaagaagaagaggcaccuucaccuggacccugagcgacagcgagggcaaggacacccccggcggcuacugccugaccagauggaugcugaucgaggccgagcugaagugcuucggcaacaccgccguggccaagugcaacgagaagcacgacgaggaguucugcgacaugcugagacuguucgacuucugcaagcaggccauccagagacugaaggcccccgcccagaugagcauccagcugaucaacaaggccgugaacgcccugaucaacgaccagcugaucaugaagaaccaccugagagacaucaugggcauccccuacugcaacuacagcaaguacugguaccugaaccacaccaccaccggcaagaccagccugcccaagugcuggcuggugagcaacggcagcuaccugaacgagacccacuucagcgacgacaucgagcagcaggccgacaacaugaucaccgagaugcugcagaaggaguacauggagagacagggcaagaccccccugggccugguggaccuguucguguucagcaccagcuucuaccugaucagcaucuuccugcaccuggugaagauccccacccacagacacaucgugggcaagcccugccccaagccccacagacugaaccacaugggcaucugcagcugcggccuguacaagcagcccggcgugcccgugaaguggaagagaugaggacuaguaauaaggaaacuguaugaaugucugugggcaggaagugaagagauccuucuguaaagguuuuuggaauuaugucugcugaauaauaaacuuuuuugaaauaauaaaucugguagaaaaaugagaucucaaaggcucuuuucagagccaccaaaaaaaaaaaaaaaaaaaaaaaaaaaaaaaaaaaaaaaaaaaaaaaaaaaaaaaaaaaaaaaaaaaaaaaaaaaaaaaaaaaaaaaaaaaaaaaaaaaaa

SEQ ID NO: 24098 - RNA, 1812 nt, Artificial Sequence
  mRNA product Design b-4 (hSL-A100) comprising derived and/or modified sequence from LASV(LM776-SLE-2012;Clade IV)__AIT17824__GPCmut2 (opt4)
aggagagucccgcagucggcguccagcggcucugcuuguucgugugugugucguugcaggccuuauucaagcuuaccaugggccagaucgugaccuucuuccaggaggugccccacgugaucgaggaggugaugaacaucgugcugaucgcccugagcauccuggccgugcugaagggccuguacaacuucgccaccugcggccuggugggccuggugaccuuccugcugcugugcggcagaagcugcaccaccagcguguacaagggcguguacgagcugcagacccuggagcugaacauggagacccugaacaugugcaugccccugagcugcaccaagaacaacagccaccacuacaucauggugggcaacgagaccggccuggagcugacccugaccaacaccagcaucaucaaccacaaguucugcaaccugagcgacgcccacaagaagaaccuguacgaccacgcccugaugagcaucaucagcaccuuccaccugagcauccccaacuucaaccaguacgaggccaugagcugcgacuucaacggcggcaagaucagcgugcaguacaaccugagccacagcuacgccggcgacgccgccaaccacugcggcaccguggccaacggcgugcugcagaccuucaugagaauggccuggggcggcagcuacaucgcccuggacagcggccacggcaagugggacugcaucaugaccagcuaccaguaccugaucauccagaacaccaccugggaggaccacugccaguucagcagacccagccccaucggcuaccugggccugcugagccagagaaccagagacaucuacaucagcagaagaagaagaggcaccuucaccuggacccugagcgacagcgagggcaaggacacccccggcggcuacugccugaccagauggaugcugaucgaggccgagcugaagugcuucggcaacaccgccguggccaagugcaacgagaagcacgacgaggaguucugcgacaugcugagacuguucgacuucugcaagcaggccauccagagacugaaggcccccgcccagaugagcauccagcugaucaacaaggccgugaacgcccugaucaacgaccagcugaucaugaagaaccaccugagagacaucaugggcauccccuacugcaacuacagcaaguacugguaccugaaccacaccaccaccggcaagaccagccugcccaagugcuggcuggugagcaacggcagcuaccugaacgagacccacuucagcgacgacaucgagcagcaggccgacaacaugaucaccgagaugcugcagaaggaguacauggagagacagggcaagaccccccugggccugguggaccuguucguguucagcaccagcuucuaccugaucagcaucuuccugcaccuggugaagauccccacccacagacacaucgugggcaagagcugccccaagccccacagacugaaccacaugggcaucugcagcugcggccuguacaagcagcccggcgugcccgugagauggaagagaugaggacuaguaauaaggaaacuguaugaaugucugugggcaggaagugaagagauccuucuguaaagguuuuuggaauuaugucugcugaauaauaaacuuuuuugaaauaauaaaucugguagaaaaaugagaucucaaaggcucuuuucagagccaccaaaaaaaaaaaaaaaaaaaaaaaaaaaaaaaaaaaaaaaaaaaaaaaaaaaaaaaaaaaaaaaaaaaaaaaaaaaaaaaaaaaaaaaaaaaaaaaaaaaaa

SEQ ID NO: 24099 - RNA, 1812 nt, Artificial Sequence
  mRNA product Design b-4 (hSL-A100) comprising derived and/or modified sequence from LASV(Mad39;Clade IV)__ANH09722__GPCmut2 (opt4)
aggagagucccgcagucggcguccagcggcucugcuuguucgugugugugucguugcaggccuuauucaagcuuaccaugggccagaucgugaccuucuuccaggaggugccccacgugaucgaggaggugaugaacaucgugcugaucgcccugagcauccuggccgugcugaagggccuguacaacguggccaccugcggccugaucggccuggugaccuuccugcugcugugcggcagaagcugcaccaccacccuguacaagggcguguacgagcugcaggcccuggagcugaacauggagacccugaacaugugcaugccccugagcugcaccaagaacaacagccaccacuacaucagagugggcaacgagaccggccuggagcugacccugaccaacaccagccugaucaaccacaaguucugcaaccugagcgacgcccacaagaagaaccuguacgaccacgcccugaugagcaucaucagcaccuuccaccugagcauccccaacuucaaccaguacgaggccaugagcugcgacuucaacgacggcaagaucagcgugcaguacaaccugagccacaccuacgccggcgacaccgccaaccacugcggcaccguggccaacggcgugcugcagaccuucaugagaauggccuggggcggcagcuacaucgcccuggacagcggcagaggcggcugggacugcaucaugaccagcuaccaguaccugaucauccagaacaccaccugggaggaccacugccaguucagcagacccagccccaucggcuaccugggccugcugagccagagaaccagagacaucuacaucagcagaagaagaagaggcaccuucaccuggacccugagcgacagcgagggcaaggacacccccggcggcuacugccugaccagauggaugcugaucgaggccgagcugaagugcuucggcaacaccgccguggccaagugcaacgagaagcacgacgaggaguucugcgacaugcugagacuguucgacuucugcaagcaggccauccagagacugaaggcccccgcccagaugagcauccagcugaucaacaaggccgugaacgcccugaucaacgaccagcugaucaugaagaaccaccugagagacaucaugggcauccccuacugcaacuacagcaaguacugguaccugaaccacaccgugaccggcaagaccagccugcccaagugcuggcuggugagcaacggcagcuaccugaacgagacccacuucagcgacgacaucgagcagcaggccgacaacaugaucaccgagaugcugcagaaggaguacauggagagacagggcaagaccccccugggccugguggaccuguucguguucagcaccagcuucuaccugaucagcaucuuccugcaccuggugaagauccccacccacagacacguggugggcaagcccugccccaagccccacagacugaaccacaugggcaucugcagcugcggcuucuacaagcagcccggcgugcccgugagauggaagagaugaggacuaguaauaaggaaacuguaugaaugucugugggcaggaagugaagagauccuucuguaaagguuuuuggaauuaugucugcugaauaauaaacuuuuuugaaauaauaaaucugguagaaaaaugagaucucaaaggcucuuuucagagccaccaaaaaaaaaaaaaaaaaaaaaaaaaaaaaaaaaaaaaaaaaaaaaaaaaaaaaaaaaaaaaaaaaaaaaaaaaaaaaaaaaaaaaaaaaaaaaaaaaaaaa

SEQ ID NO: 24100 - RNA, 1812 nt, Artificial Sequence
  mRNA product Design b-4 (hSL-A100) comprising derived and/or modified sequence from LASV(Z0947-SLE-2011;Clade IV)__AIT17840__GPCmut2 (opt4)
aggagagucccgcagucggcguccagcggcucugcuuguucgugugugugucguugcaggccuuauucaagcuuaccaugggccagaucgugaccuucuuccaggaggugccccacgugaucgaggaggugaugaacaucgugcugaucgcccugagcauccuggccgugcugaagggccuguacaacuucgccaccugcggccuggugggccuggugaccuuccugcugcugugcggcagaagcugcaccaucagccuguacaagggcguguacgagcugcagacccuggagcugaacauggagacccugaacaugugcaugccccugagcugcaccaagaacaacagccaccacuacaucauggugggcaacgagaccggccuggagcugacccugaccaacaccagcaucaucaaccacaaguucugcaaccugagcgacgcccacaagaagaaccuguacgaccacgcccugaugagcaucaucagcaccuuccaccugagcauccccaacuucaaccaguacgaggccaugagcugcgacuucaacggcggcaagaucagcgugcaguacaaccugagccacagcuacgccggcgacgccgccaaccacugcggcaccguggccaacggcgugcugcagaccuucaugagaauggccuggggcggcagcuacaucgcccuggacagcggcagagacagaugggacugcaucaugaccagcuaccaguaccugaucauccagaacaccaccugggaggaccacugccaguucagcagacccagccccaucggcuaccugggccugcugagccagagaaccagagacaucuacaucagcagaagaagaagaggcaccuucaccuggacccugagcgacagcgagggcaaggacacccccggcggcuacugccugaccagauggaugcugaucgaggccgagcugaagugcuucggcaacaccgccguggccaagugcaacgagaagcacgacgaggaguucugcgacaugcugagacuguucgacuucugcaagcaggccauccagagacugaaggcccccgcccagaugagcauccagcugaucaacaaggccgugaacgcccugaucaacgaccagcugaucaugaagaaccaccugagagacaucaugggcauccccuacugcaacuacagcaaguacugguaccugaaccacaccaccaccggcaagaccagccugcccaagugcuggcuggugagcaacggcagcuaccugaacgagacccacuucagcgacgacaucgagcagcaggccgacaacaugaucaccgagaugcugcagaaggaguacauggagagacagggcaagaccccccugggccugguggaccuguucguguucagcaccagcuucuaccugaucagcaucuuccugcaccuggugaagauccccacccacagacacaucgugggcaagcccugccccaagccccacagacugaaccacaugggcaucugcagcugcggccuguacaagcagcccggcgugcccgugaaguggaagagaugaggacuaguaauaaggaaacuguaugaaugucugugggcaggaagugaagagauccuucuguaaagguuuuuggaauuaugucugcugaauaauaaacuuuuuugaaauaauaaaucugguagaaaaaugagaucucaaaggcucuuuucagagccaccaaaaaaaaaaaaaaaaaaaaaaaaaaaaaaaaaaaaaaaaaaaaaaaaaaaaaaaaaaaaaaaaaaaaaaaaaaaaaaaaaaaaaaaaaaaaaaaaaaaaa

SEQ ID NO: 24101 - RNA, 1812 nt, Artificial Sequence
  mRNA product Design b-4 (hSL-A100) comprising derived and/or modified sequence from LASV(Josiah;Clade IV)__NP_694870__GPCmut2 (opt5)
aggagagucccgcagucggcguccagcggcucugcuuguucgugugugugucguugcaggccuuauucaagcuuaccaugggccagaucgugaccuucuuucaagaggucccccacguuauugaagaggugaugaacaucgugcugauugcccucagcguccuggcugugcuuaaggggcuguacaauuucgccacaugcggacucguuggccuggugacguuucuucugcucugugggagauccugcaccacaucucuguauaaaggagucuacgaacugcagacccucgagcugaacauggaaacacuuaauauguguaugccucugagcugcaccaagaacaauucccaucacuauaucauggugggcaacgagacagggcucgagcugacccuuacgaauaccucuauuaucaaccauaaauucuguaaucugagcgacgcgcacaagaaaaaccucuacgaucaugcucugauguccaucauuucuacauuucaccugagcaucccgaauuucaaccaguaugaagccauguccugcgacuuuaauggaggcaagauuagcguucaguacaaccucucucacuccuaugccggcgaugcugccaaucauugugggaccguggcuaacggaguccugcaaacauucaugcggauggccuggggcgggagcuacaucgcgcuugacucuggacgcggcaacugggauugcauuaugaccuccuaccaguaucugaucauucagaauacgacaugggaggaccacugucaguuuagcagacccucuccuaucggguaccucggacugcuuucccaacggacccgcgauaucuauauuagcagacggcgcagaggcacauucaccuggacccuguccgacucugaaggcaaggauacacccgggggauacugccucacgcgguggaugcugaucgaggccgagcugaaauguuuuggcaacaccgcuguggccaagugcaaugaaaaacaugacgaggaguucugcgauaugcuccgccuguuugacuucuguaagcaggcuauucagagacuuaaagccccugcgcagaugagcauccaacugauuaacaaggccgugaaugcucucaucaacgaucagcugaucaugaagaaucaccuucgggacauuauggggauccccuauugcaacuacuccaaauauugguaccugaaucacacaaccacaggacgcaccagccucccuaaguguuggcuggucucuaacggcuccuaccugaaugaaacgcauuucagcgacgauauugaacagcaagccgacaacaugaucacagagaugcuccagaaagaguauauggaaagacaggggaagaccccgcugggacuuguugaucuguuuguguucucuaccagcuuuuaccucauuuccaucuuccugcaccuggugaaaauccccacacaucggcacauugucggcaagucuugcccuaaaccccaucgccuuaaucacaugggcaucuguagcugcgggcucuauaagcagccuggagugcccguuaaguggaaaagaugaggacuaguaauaaggaaacuguaugaaugucugugggcaggaagugaagagauccuucuguaaagguuuuuggaauuaugucugcugaauaauaaacuuuuuugaaauaauaaaucugguagaaaaaugagaucucaaaggcucuuuucagagccaccaaaaaaaaaaaaaaaaaaaaaaaaaaaaaaaaaaaaaaaaaaaaaaaaaaaaaaaaaaaaaaaaaaaaaaaaaaaaaaaaaaaaaaaaaaaaaaaaaaaaa

SEQ ID NO: 24102 - RNA, 1809 nt, Artificial Sequence
  mRNA product Design b-4 (hSL-A100) comprising derived and/or modified sequence from LASV(LP;Clade I)__AAF86701__GPCmut2 (opt5)
aggagagucccgcagucggcguccagcggcucugcuuguucgugugugugucguugcaggccuuauucaagcuuaccaugggccagaucauuaccuucuuucaagaggugccccacgucaucgaagagguuaugaacauugugcugaucgcccucagccugcuugcuauucugaaggggcucuacaauaucgccacaugcggaaucauuggccugguggcguuccuuuuucugugugggaaauccugcucucucacgcugaagggaggcuaugaacugcagacccucgagcugaacauggaaacacuuaauauguguaugccucugagcugcaccaaaaacuccucucaucacuacaucagagucgggaaugagacaggacucgagcugacccuuacaaacaccagcauuaucaaucauaaguucuguaaccuguccgacgcucacaaaaagaaucucuaugaucaugcccugaugucuauuaucagcacguuucaccuguccauuccgaacuucaaucaguacgaagccaugagcugcgacuuuaacggcggcaagaucucugugcaguauaaucucucccacagcuacgcuggggaugccgcugagcauuguggaaccguugccaacggcgugcugcaaacauucaugcggauggcguggggagggcgcuauaucgcccuugacucuggcaaagggaauugggauugcauuaugaccuccuaccaguaccugaucauucagaacacaaccugggaagaccacugucaguuuagcagacccucuccuaucggauaucucggccugcuuucccaacggacgcgcgauauuuacaucagcagacggcgcagaggcacauucaccuggacacuguccgacucugaggggaacgagacccccggaggcuauugccucacccgguggaugcugaucgaagcugagcugaaguguuuugggaauacagccgucgcuaaaugcaacgaaaagcaugaugaggaguucugcgacaugcuccgccuguuugauuucuguaaacaggccauuagacggcuuaaggcgccugcccagaugagcauccagcugauuaauaaggcugugaacgcccucaucaaugaccaacugauuaugaaaaaccaccuucgcgauaucaugggaauccccuacugcaauuauuccaaguacugguaucugaaccacacgagcucuggcagaaccucccucccuaaauguuggcugauuagcaaugggucuuaccugaacgaaacacaguucagcgacgacaucgagcagcaagcugauaauaugauuaccgaaaugcuccagaaggaguacaucgaacggcagggaaaaacaccgcugggccuuguugacauuuuuaucuucuccaccucuuuuuaucugauuagcaucuuccuccaucugaucaagauucccacgcaccgccauaucgugggcaaaccuugccccaagccucacagacugaaccauaugggggucuguuccugcggacuuuacaagcaccccggcgugccgacaaaauggaagcggugaggacuaguaauaaggaaacuguaugaaugucugugggcaggaagugaagagauccuucuguaaagguuuuuggaauuaugucugcugaauaauaaacuuuuuugaaauaauaaaucugguagaaaaaugagaucucaaaggcucuuuucagagccaccaaaaaaaaaaaaaaaaaaaaaaaaaaaaaaaaaaaaaaaaaaaaaaaaaaaaaaaaaaaaaaaaaaaaaaaaaaaaaaaaaaaaaaaaaaaaaaaaaaaaa

SEQ ID NO: 24103 - RNA, 1809 nt, Artificial Sequence
  mRNA product Design b-4 (hSL-A100) comprising derived and/or modified sequence from LASV(803213;Clade II)__AAF86703__GPCmut2 (opt5)
aggagagucccgcagucggcguccagcggcucugcuuguucgugugugugucguugcaggccuuauucaagcuuaccaugggccagaucauuaccuucuuucaagaggugccccacgucaucgaagagguuaugaacauugugcugaucgcccucagccugcuugcuauucugaaggggaucuacaauguggccacaugcggacucuucggccugaucuccuuucuucugcucugugggagaucuugcagcgucacguauaaaggaguguacgaacugcagacccuggagcucaacauggcgaaucugaacauguguaugccucuuuccugcacaaagaauaacucucaucacuauauuaugguuggcaaugaaaccgggcuggagcucacacugaccaacacaagcaucauuaaucauaaauucuguaaccuuuccgacgcucacaagaaaaaucuguacgaucaugcccucaugucuaucauuagcaccuuucaccuguccaucccgaacuucaaucaguaugaggccaugagcugcgacuuuaacggaggcaagauuucugugcaguacaaucugucccacagcuucgcugucgaugccgcuaaccauuguggcacgaucgccaacggggugcuccaaaccuuuaugcggauggcguggggaggcucuuauaucgcccuggacuccgggaagggaaauugggauugcauuaugacaagcuaccaguaccuuaucauucagaacaccacaugggaagaccacugucaguucucucgccccuccccuaucggcuaucuggggcuccugagccaaagaacccgggauauuuacaucucccgcagacggcgcggaacguuuacauggacccuuucugacagcgagggcaaugaagcucccggcggguauugccugacaagauggaugcucaucgaggccgagcugaaauguuucggaaacaccgcuguugccaagugcaaugaaaaacaugaugaggaauuuugcgacaugcugcgccucuucgauuucuguaagcaggcgauuaaacggcugaagaccccugcccagauguccauccagcuuauuaacaaggcugugaaugcccugaucaacgaccaacucauuaugaaaaaucaccugagagauaucaugggcauccccuacugcaacuauagccgguacugguaucuuaaucacacagucacggggaagaccucucugccucgcuguuggcucguguccaacggaagcuaccugaaugagacacauuuuucugacgacauugaacagcaggcugauaacaugaucaccgagaugcugcaaaaagaguacauggacagacagggcaagacaccgcucgggcugguggaucuuuucgucuuuagcaccuccuucuaucugauuucuaucuuucuccaccugguuaaaauucccacgcaucggcacaucgugggaaagccuugccccaaaccucaucgccugaaucacaugggcauuuguagcugcggccuuuacaagcaccccggggugccggucaaguggaaaagaugaggacuaguaauaaggaaacuguaugaaugucugugggcaggaagugaagagauccuucuguaaagguuuuuggaauuaugucugcugaauaauaaacuuuuuugaaauaauaaaucugguagaaaaaugagaucucaaaggcucuuuucagagccaccaaaaaaaaaaaaaaaaaaaaaaaaaaaaaaaaaaaaaaaaaaaaaaaaaaaaaaaaaaaaaaaaaaaaaaaaaaaaaaaaaaaaaaaaaaaaaaaaaaaaa

SEQ ID NO: 24104 - RNA, 1809 nt, Artificial Sequence
  mRNA product Design b-4 (hSL-A100) comprising derived and/or modified sequence from LASV(GA391;Clade III)__CAA36645__GPCmut2 (opt5)
aggagagucccgcagucggcguccagcggcucugcuuguucgugugugugucguugcaggccuuauucaagcuuaccaugggccagaucgugaccuucuuucaagaggucccccacguuauugaagaggugaugaacaucgugcugauugcccucagcauccuggcuauucuuaaggggcuguacaaugucgccacaugcggacucaucggccuggugacguuccuucugcucuccgggagaucuuguagccugaucuauaaaggaaccuacgaacugcagacacucgagcugaacauggaaacccuuaauaugugcaugccucuguccuguacaaagaacaauucucaucacuauauucggguuggcaacgagaccgggcucgagcugacacuuaccaauacgagcauccugaaccauaaauuuugcaaucucuccgacgcgcacaagcgcaaccuguacgaucauucucugaugagcauuaucuccaccuuccaccucagcauuccgaauuuuaaccaguaugaagcuaugucuugugacuucaauggaggcaaaaucacagugcaguacaaccugucccacagcuuugccgucgaugccgcuggccauugcgggacccuugccaauggagugcugcaaacauucaugagaauggcuuggggcgggucuuauauugcccucgacuccggacggggcaacugggauuguaucaugaccagcuaccaguaccugaucauucagaacacgacaugggacgaucacugccaguuuucucgccccuccccuaucggguaucuuggacugcucagccaaagaacccgggacauuuacaucucccgcagacggcgcggcacauucaccuggacccugucugauagcgagggcaaugaaacacccgggggauauugucugacgagauggaugcucauugaggcggagcugaagugcuuuggcaacaccgccguugcuaaguguaaugaaaaacaugacgaggaguucugcgauaugcuucggcuguuugacuucugcaagcaggccauccgcagacucaaaaccccugcucagauguccauccagcugauuaacaaggccgugaaugcgcuuaucaacgaucaacugauuaugaaaaaucaccuccgggacaucauggggauucccuacuguaacuauagccgcuacugguaucugaaucacacaucuacaggaaagaccucccugccuagaugcuggcucaucagcaacggcucuuaccugaaugaaacgaaguucagcgacgauaucgaacagcaggccgacaacaugauuacagagaugcuucaaaaagaguacaucgaucggcaggggaagaccccgcugggacucgucgaccuguuuguguucuccaccucuuuuuaucugauuagcaucuuccuucaucucgugaaaauucccacacacagacauaucgucggcaagccuugucccaaaccucaccgccugaaucauaugggcauuugcuccugugggcuguacaagcagcccggaguuccggugcgguggaaaagaugaggacuaguaauaaggaaacuguaugaaugucugugggcaggaagugaagagauccuucuguaaagguuuuuggaauuaugucugcugaauaauaaacuuuuuugaaauaauaaaucugguagaaaaaugagaucucaaaggcucuuuucagagccaccaaaaaaaaaaaaaaaaaaaaaaaaaaaaaaaaaaaaaaaaaaaaaaaaaaaaaaaaaaaaaaaaaaaaaaaaaaaaaaaaaaaaaaaaaaaaaaaaaaaaa

SEQ ID NO: 24105 - RNA, 1812 nt, Artificial Sequence
  mRNA product Design b-4 (hSL-A100) comprising derived and/or modified sequence from LASV(AV;Clade V)__CCA30314__GPCmut2 (opt5)
aggagagucccgcagucggcguccagcggcucugcuuguucgugugugugucguugcaggccuuauucaagcuuaccaugggccagaucgugaccuucuuucaagaggucccccacguuauugaagaggugaugaacaucgugcugauugcccucagcauccuggcuguccuuaaggggcuguacaauauugccacaugcggacucaucggccugaucacguuccuucugcucugugggagauccugcucuagcaaccuguauaaaggaguguacgaacugcagucccucgaccugaauauggagacccuuaacauguguaugccucugucuugcacaaagaauaacagccaucacuauauucggguuggcaaugauaccgggcucgaacugacacuuaccaacacauccauccugaaucauaaauuuuguaaccucucugacgcgcacaagaaagaucuguacgaccaugcucugaugagcauuaucuccaccuuccaccucagcauuccgaauuuuaaccaguaugaggccaugucuugcgauuucaauggaggcaagaucuccgugcaguacaaccugagccacucuuaugccauugacgcugccaaucauuguggcacggucgcuaacgggauccuucaaaccuuuaugcgcauggccuggggaggcuccuacaucgcgcuggauagcgggagaggaaacugggacugcauuaugacaucuuaccaguaucucaucauucagaauaccacaugggagaaccacugucaguucucccggcccagcccuaucggcuaccuggggcuucugucccaacgcaccagagauauuuauaucucucggcgcagacggggaacguuuacauggacccucagcgacuccgaaggcaaugccacacccggcggguacugccugacccgcuggaugcugaucgaggcugaacucaaguguuucggaaacaccgccguggcuaaaugcaaugagaagcaugaugaggaauuuugcgacaugcugagacuuuucgauuuuuguaaacaggccauuagccggcugaagucuccugcgcagauguccauccagcucauuaacaaagccguuaaugcucugaucaacgaccaacuuauuaugaagaaucaucugcgcgacaucaugggcauccccuauugcaacuacagcaaguauugguaccucaaucacacaauuacggggaaaaccucucugccuaaguguuggcuggugagcaacggauccuaccucaaugagacacacuucucugaugacaucgaacagcaggccgauaacaugauuaccgagaugcugcaaaaagaauauauggagagacagggcaagacaccgcuugggcuggucgaccucuucguguuuagcaccuccuucuaccugaucagcauuuuucugcggcuugugaaaauccccacgcaccgccauauugucggaaagccuugccccaaaccucacagacucaaucauaugggcaucuguucuugcggccuguauaagcagcccgggguuccggugcgguggaagagaugaggacuaguaauaaggaaacuguaugaaugucugugggcaggaagugaagagauccuucuguaaagguuuuuggaauuaugucugcugaauaauaaacuuuuuugaaauaauaaaucugguagaaaaaugagaucucaaaggcucuuuucagagccaccaaaaaaaaaaaaaaaaaaaaaaaaaaaaaaaaaaaaaaaaaaaaaaaaaaaaaaaaaaaaaaaaaaaaaaaaaaaaaaaaaaaaaaaaaaaaaaaaaaaaa

SEQ ID NO: 24106 - RNA, 1809 nt, Artificial Sequence
  mRNA product Design b-4 (hSL-A100) comprising derived and/or modified sequence from LASV(Togo/2016/7082;Clade VI)__AMR44577__GPCmut2 (opt5)
aggagagucccgcagucggcguccagcggcucugcuuguucgugugugugucguugcaggccuuauucaagcuuaccaugggccagaucauuaccuucuuucaagaggugccccacgucaucgaagagguuaugaacauugugcugaucgcccucagccugcuugcuauucugaaggggguguacaaugucgccacaugcggaaucaucggccucgugacguuccuguuucuuugugggagauccugcucucugauuuauaaaggaagcuacgaacuccagacccuggagcugaacauggaaacacucaauauguguaugccucuguccugcaccaagaacucuagccaucacuauauccggguuggcaaugagacagggcuugagcugacccucacaaacaccuccauuaucaaucauaaauucuguaaccugucugacgcgcacaagcgcaaucuuuacgaucaugcucugaugagcauucucuccacguuucaccugagcaucccgaacuucaaucaguaugaagccaugucuugcgacuuuaacggaggcaaaauuuccgugcaguacaaucugagccacgccuaugcugucgaugccgcugagcauuguggcaccguggccaacgggguucuccaaacauucaugagaauggcguggggaggcucuuacaucgcccuggacuccgggcggggaaauugggauugcaucaugaccagcuaccaguaucuuauuauccagaacacaaccugggaagaccacugucaguuuucucgccccuccccuauuggcuaccuggggcuccugagccaaagaacgcgggauaucuauauuucccgcagacggcgcggaacauucaccuggacacuuucugacagcgagggcaacgagacccccggcggguacugccugaccagauggaugcucaucgaagcugagcugaaguguuuuggaaauacagccguggcuaagugcaacgaaaaacaugaugaggaguucugcgacaugcugcggcucuuugauuucuguaagcaggccauccagcgccugaaauccccugcgcagaugagcauucaacuuaucaauaaggccgucaacgcucugauuaaugaccagcucaucaugaaaaaccaccugagagauaugaugggcauucccuauugcaauuacucuaaguauugguaccuuaaccacacguccagcgggcggaccucucugccuaaguguuggcucgugagcaauggauccuaccugaacgaaacacauuucucugacgacaucgagcagcaagccgauaauaugaucaccgaaaugcugcagaaagaguauauugaccgccagggcaagacaccgcucgggcugguggaucuuuuugucuucagcaccuccuuuuaccugaucagcauuuuccuccaccugaucaaaauucccacgcauagacacaucguuggaaagccuugccccaaaccucaucggcugaaccacaugggcauuuguucuugcggccuuuauaagcagcccggggugccgacaagauggaaacgcugaggacuaguaauaaggaaacuguaugaaugucugugggcaggaagugaagagauccuucuguaaagguuuuuggaauuaugucugcugaauaauaaacuuuuuugaaauaauaaaucugguagaaaaaugagaucucaaaggcucuuuucagagccaccaaaaaaaaaaaaaaaaaaaaaaaaaaaaaaaaaaaaaaaaaaaaaaaaaaaaaaaaaaaaaaaaaaaaaaaaaaaaaaaaaaaaaaaaaaaaaaaaaaaaa

SEQ ID NO: 24107 - RNA, 1809 nt, Artificial Sequence
  mRNA product Design b-4 (hSL-A100) comprising derived and/or modified sequence from LASV(KAK-428;Clade n.d. (VII))__ANH09740__GPCmut2 (opt5)
aggagagucccgcagucggcguccagcggcucugcuuguucgugugugugucguugcaggccuuauucaagcuuaccaugggccagaucgugaccuucuuucaagaggucccccacguuauugaagaggugaugaacaucgugcugauugcccucagccugcuugcuauccugaaggggcucuacaauuucgccacaugcggagucauuggccugaucacguuucuucugcucugugggagauccugcucugcgaccuauaaaggacaguacgaacugcagacacuggagcucaacauggaaagccugaauauguguaugccucuuuccugcaccaagaacaauucucaucacuauauccgggcuggcaacaauacagggcuggagcucacccugacaaacaccagcauuaucucccauaaauucuguaaucuuucugacgcccacaagaaaaaccuguacgaucauacgcucaugagcauuaucaccacauuucaccuguccauuccgaauuucaaccaguaugaggccaugagcugcgacuuuaauggaggcaagaucucuauucaauacaaccugucccacagcuaugcuggcgaugccgcucagcauugugggaccguggccaauggaguucuccagacauucaugcgcauggcguggggcgggucuuaccuggcccuugacuccggaagacggggcugggauugcaucaucagcucuuaccaguaucugauuauccaaaacaccacgugggacgaucacugucaguuuucccgccccagcccuauuggguaccucggauucgugucccagaagacaagagacaucuauauuucucggcgcagacggggcaccuuuacauggacccugagcgauuccgaaggccaugacaugcccgggggauacugccuuacccgcuggaugcugaucgaggcugaucucaaauguuucggcaacacagccgucgcuaagugcaaugaaaaacacgacgaggaguuuugcgauauguggagacuguucgacuucuguaagcaggccauccaacggcugaaagcgccugcccagaugaacauucagcucaucaauaaggcugugaacgcccugauuaaugaccaacuuaugaugaagaaccaucugcgcgauaucauggggauucccuauugcaauuacagcaaauuuugguaucucaacaauacgaccacaggaagaaccucucugccucgguguuggcuuaucuccaacggcagcuaccugaaugaaacacacuucucugacgauaucgagcagcaggcugacaacaugauuaccgaaaugcuccagaaggaguacauggaucgccaagggaaaacgccgcugggacugguugaccucuuuguguucagcacauccuuuuaucugaucaccauuuuccuucaccuggucaagauccccacccauagacacauugugggcaaaccuugccccaagccucaucggcucaaucacaugggcaucuguucuugcgggcuguacaaacagcccggagugccggucagauggaagcgcugaggacuaguaauaaggaaacuguaugaaugucugugggcaggaagugaagagauccuucuguaaagguuuuuggaauuaugucugcugaauaauaaacuuuuuugaaauaauaaaucugguagaaaaaugagaucucaaaggcucuuuucagagccaccaaaaaaaaaaaaaaaaaaaaaaaaaaaaaaaaaaaaaaaaaaaaaaaaaaaaaaaaaaaaaaaaaaaaaaaaaaaaaaaaaaaaaaaaaaaaaaaaaaaaa

SEQ ID NO: 24108 - RNA, 1809 nt, Artificial Sequence; identical to SEQ ID NO: 24102
  mRNA product Design b-4 (hSL-A100) comprising derived and/or modified sequence from LASV(Pinneo-NIG-1969;Clade I)__AIT17836__GPCmut2 (opt5)

SEQ ID NO: 24109 - RNA, 1809 nt, Artificial Sequence
  mRNA product Design b-4 (hSL-A100) comprising derived and/or modified sequence from LASV(ISTH0009-NIG-2011;Clade II)__AIT17404__GPCmut2 (opt5)
aggagagucccgcagucggcguccagcggcucugcuuguucgugugugugucguugcaggccuuauucaagcuuaccaugggccagaucauuaccuucuuucaagaggugccccacgucaucgaagagguuaugaacauugugcugaucgcccucagccugcuugcuauucugaaggggaucuacaauguggccacaugcggacucuucggccuggucuccuuucuucugcucugugggagaucuugcagcacgaccuauaaaggaguguacgaacugcagacacuggagcucgacauggcgucccugaacauguguaugccucuuucuugcaccaagaauaacagccaucacuauaucaugguuggcaaugaaacagggcuggagcucacccugacaaacaccuccauuaucaaucauaaauucuguaaccuuucugaugcucacaagaaaaaucuguacgaccaugcccucaugagcauuaucuccacguuucaccugagcauuccgaacuucaaucaguaugaggccaugucuugcgauuuuaacggaggcaagaucuccgugcaguacaaucugagccacgcuuaugccgucgacgcugccaaccauuguggcaccauugcgaauggggugcuccaaacauucaugcggauggccuggggaggcucuuacaucgcucuggauuccgggaagggaagcugggacugcaucaugaccucuuaccaguaucuuauuauccagaacacaaccugggaagaucacugucaguuuucccgccccagcccuauuggcuaccuggggcuccugucccaaagaacgcgggacaucuauauuucucgcagacggcgcggaacauucaccuggacacuuagcgauuccgagggcaacgaaacccccggcggguacugccugaccagauggaugcucaucgaggccgagcugaaauguuuuggaaauacagcuguugccaagugcaacgaaaaacaugacgaggaguucugcgauaugcugcggcucuuugacuucuguaagcaggcgauccgcagacugaaaacgccugcccagaugagcauucagcuuaucaauaaggcugugaacgcccugauuaaugaucaacucaucaugaagaaccaucugcgggacauuaugggcauccccuauugcaauuacucuaaauauugguaccuuaaccacaccgucacagggaagaccucccugccucgcuguuggcucgugagcaauggaucuuaccugaacgaaacacacuucagcgacgauaucgaacagcaggcugacaauaugauuaccgagcugcuccaaaaagaguauauggauagacagggcaagacgccgcuggggcuuguggaccuguuugucuucuccacaucuuuuuaccucaucagcauuuuccugcaccugaucaaaauucccacccaucggcacaucaccggaaagccuugccccaaaccucaucgccuuaaccacaugggcauuuguuccugcggccucuauaagcaccccgggguuccggugaaguggaaaagaugaggacuaguaauaaggaaacuguaugaaugucugugggcaggaagugaagagauccuucuguaaagguuuuuggaauuaugucugcugaauaauaaacuuuuuugaaauaauaaaucugguagaaaaaugagaucucaaaggcucuuuucagagccaccaaaaaaaaaaaaaaaaaaaaaaaaaaaaaaaaaaaaaaaaaaaaaaaaaaaaaaaaaaaaaaaaaaaaaaaaaaaaaaaaaaaaaaaaaaaaaaaaaaaaa

SEQ ID NO: 24110 - RNA, 1809 nt, Artificial Sequence
  mRNA product Design b-4 (hSL-A100) comprising derived and/or modified sequence from LASV(ISTH2010-NIG-2012;Clade II)__AIT17482__GPCmut2 (opt5)
aggagagucccgcagucggcguccagcggcucugcuuguucgugugugugucguugcaggccuuauucaagcuuaccaugggccagaucauuaccuucuuucaagaggugccccacgucaucgaagagguuaugaacauugugcugaucgcccucagccugcuugcuauucugaaggggaucuacaauguggccacaugcggacucuucggccuggucuccuuucuucugcucugugggagaucuugcagcacgaccuauaaaggaguguacgaacugcagacacuggagcucgacauggcgucccugaacauguguaugccucuuucuugcaccaagaauaacagccaucacuauaucaugguuggcaaugaaacagggcuggagcucacccugacaaacaccuccauuaucaaucauaaauucuguaaccuuucugaugcucacaagaaaaaucuguacgaccaugcccucaugagcauuaucuccacguuucaccugagcauuccgaacuucaaucaguaugaggccaugucuugcgauuuuaacggaggcaagaucuccgugcaguacaaucugagccacgcuuaugccgucgacgcugccaaccauuguggcaccauugcgaauggggugcuccaaacauucaugcggauggccuggggaggcucuuacaucgcucuggauuccgggaagggaagcugggacugcaucaugaccucuuaccaguaucuuauuauccagaacauuacaugggaagaucacugucaguuuucccgccccagcccuaucggcuaccuggggcuccugucccaaagaacccgggacauuuauaucucucgcagacggcgcggaacguucacauggacccuuagcgauuccgagggcaacgaaacacccggcggguacugccugaccagauggaugcucaucgaggccgagcugaaauguuuuggaaauaccgcuguugccaagugcaacgaaaaacaugacgaggaguucugcgauaugcugcggcucuuugacuucuguaagcaggcgauucgcagacugaaaacgccugcccagaugagcauccagcuuauuaauaaggcugugaacgcccugaucaaugaucaacucauuaugaagaaccaucugcgggacaucaugggcauccccuauugcaauuacucuaaauauugguaccuuaaccacacagucaccgggaagacaucccugccucgcuguuggcucgugagcaauggaucuuaccugaacgaaacccacuucagcgacgauauugaacagcaggcugacaauaugaucacagagcugcuccaaaaagaguauauugauagacagggcaagaccccgcuggggcuuguggaccuguuugucuucuccacgucuuuuuaccucaucagcauuuuccugcaccugguuaaaauccccacacaucggcacguggugggaaagccuugccccaaaccucaucgccuuaaccacaugggcauuuguuccugcggccucuauaagcaccccggggucccggugaaguggaaaagaugaggacuaguaauaaggaaacuguaugaaugucugugggcaggaagugaagagauccuucuguaaagguuuuuggaauuaugucugcugaauaauaaacuuuuuugaaauaauaaaucugguagaaaaaugagaucucaaaggcucuuuucagagccaccaaaaaaaaaaaaaaaaaaaaaaaaaaaaaaaaaaaaaaaaaaaaaaaaaaaaaaaaaaaaaaaaaaaaaaaaaaaaaaaaaaaaaaaaaaaaaaaaaaaaa

SEQ ID NO: 24111 - RNA, 1809 nt, Artificial Sequence
  mRNA product Design b-4 (hSL-A100) comprising derived and/or modified sequence from LASV(Lassa virus/H.sapiens-wt/NGA/2015/ISTH_0543;Clade II)__AVO03639__GPCmut2 (opt5)
aggagagucccgcagucggcguccagcggcucugcuuguucgugugugugucguugcaggccuuauucaagcuuaccaugggccagaucauuaccuucuuucaagaggugccccacgucaucgaagagguuaugaacauugugcugaucgcccucagccugcuugcuauucugaaggggaucuacaauguggccacaugcggacucuucggccuggucuccuuucuucugcucugugggagaucuugcagcacgaccuauaaaggaguguacgaacugcagacacuggagcucgacauggcgaaccugaauauguguaugccucuuuccugcaccaagaacaauucucaucacuauaucaugguuggcaacgaaacagggcuggagcucacccugacaaauaccagcauuaucaaccauaaauucuguaaucuuuccgaugcucacaagaaaaaccuguacgaccaugcccucaugucuauuaucagcacguuucaccuguccauuccgaauuucaaccaguaugaggccaugagcugcgauuuuaauggaggcaagaucucugugcaguacaaccugucccacaccuaugcugucgacgccgcuaaucauuguggcacaauugccaacggggugcuccaaaccuucaugcggauggcguggggaggcagcuacaucgcccuggauucugggaagggauccugggacugcaucaugacaagcuaccaguaucuuguuauucagaacaccacgugggaagaucacugucaguuuucucgccccuccccuaucggcuaccuggggcuccugagccaaagaacacgggacauuuauaucucccgcagacggcgcggaaccuucacauggacccuuucugauagcgagggcaaugaaacccccggcggguacugccugacaagauggaugcucauugaggcugagcugaaauguuuuggaaacacggccguggcuaagugcaaugaaaaacaugacgaggaguucugcgauaugcugcggcucuuugacuucuguaagcaggccauccgcagacugaaaaccccugcgcagauguccauccagcuuauuaacaaggccgucaaugcucugaucaacgaucaacucauuaugaagaaucaucugcgggacaucaugggcauucccuauugcaacuacagcaaauauugguaccuuaaucacacagugaccgggaagacaucucugccucgcuguuggcucguguccaacggaagcuaccugaaugaaacccacuucucugacgauaucgaacagcaggccgacaacaugaucacggagcugcuccaaaaagaguauauugauagacagggcaagacaccgcuggggcuugucgaccuguuuguuuucagcaccuccuuuuaccucaucucuauuuuccugcaccuggugaaaauccccacccaucggcacauuacaggaaagccuugccccaaaccucaucgccuuaaucacaugggcaucuguagcugcggccucuauaagcaccccggggugccggucaaguggaaaagaugaggacuaguaauaaggaaacuguaugaaugucugugggcaggaagugaagagauccuucuguaaagguuuuuggaauuaugucugcugaauaauaaacuuuuuugaaauaauaaaucugguagaaaaaugagaucucaaaggcucuuuucagagccaccaaaaaaaaaaaaaaaaaaaaaaaaaaaaaaaaaaaaaaaaaaaaaaaaaaaaaaaaaaaaaaaaaaaaaaaaaaaaaaaaaaaaaaaaaaaaaaaaaaaaa

SEQ ID NO: 24112 - RNA, 1809 nt, Artificial Sequence
  mRNA product Design b-4 (hSL-A100) comprising derived and/or modified sequence from LASV(Lassa virus/H.sapiens-wt/NGA/2016/ISTH_0009;Clade II)__AVO03571__GPCmut2 (opt5)
aggagagucccgcagucggcguccagcggcucugcuuguucgugugugugucguugcaggccuuauucaagcuuaccaugggccagaucauuaccuucuuucaagaggugccccacgucaucgaagagguuaugaacauugugcugaucgcccucagccugcuugcuauucugaaggggaucuacaauguggccacaugcggacuccugggccuugucuccuuccugcuccugugugggagaucuugcagcacgaccuauaaaggaguguacgaacugcagacacucgagcuggacauggcgucccuuaacauguguaugccucugucuugcaccaagaauaacagccaucacuauaucaugguuggcaaugaaacagggcucgagcugacccuuacaaacaccuccauuaucaaucauaaauuuuguaaccugucugaugcucacaagaaaaaucucuacgaccaugcccugaugagcauuaucuccacguuccaccugagcauuccgaacuuuaaucaguaugaggccaugucuugcgauuucaacggaggccggaucuccgugcaguacaaucucagccacucuuaugcugucgacgccgcuaaccauuguggcaccauugccaauggggugcugcaaacauuuaugcgcauggcguggggaggcuccuacaucgcccuugauagcgggaagggaucuugggacugcaucaugaccuccuaccaguaucugauuauccagaacacaaccugggaagaucacugucaguucagcagacccuccccuauuggcuaccucgggcugcuuucucaacggacgcgcgacaucuauauuagcagacggcgcagaggaacauuuaccuggacacuguccgauagcgagggcaacgaaacccccggcggguacugccucacccgguggaugcugaucgaggcugagcugaaguguuucggaaauacagccguugcuaaaugcaacgaaaagcaugacgaggaauuuugcgauaugcuccgccuguucgacuuuuguaaacaggccaucagacggcuuaagacgccugcgcagaugucuauucagcugaucaauaaagccgugaacgcucucauuaaugaucaacugaucaugaagaaccaccuucgcgacauuaugggcauccccuauugcaauuacuccaaguauugguaccugaaccacaccgucacagggaaaaccagccucccuagauguuggcuggugucuaauggaagcuaccugaacgagacacauuucuccgacgauaucgaacagcaggccgacaauaugauuaccgagcuccugcaaaaggaguauaucgaucggcagggcaaaacgccgcuugggcugguggaccucuucgucuuuucuaccagcuucuaccugauuuccaucuuucugcaccuuguuaagauucccacacaucgccacaucaccggaaaaccuugccccaagccucauagacucaaccacaugggcauuuguagcugcggccuguauaaucaccccggggugccggugaaauggaagcggugaggacuaguaauaaggaaacuguaugaaugucugugggcaggaagugaagagauccuucuguaaagguuuuuggaauuaugucugcugaauaauaaacuuuuuugaaauaauaaaucugguagaaaaaugagaucucaaaggcucuuuucagagccaccaaaaaaaaaaaaaaaaaaaaaaaaaaaaaaaaaaaaaaaaaaaaaaaaaaaaaaaaaaaaaaaaaaaaaaaaaaaaaaaaaaaaaaaaaaaaaaaaaaaaa

SEQ ID NO: 24113 - RNA, 1809 nt, Artificial Sequence
  mRNA product Design b-4 (hSL-A100) comprising derived and/or modified sequence from LASV(Lassa virus/H.sapiens-wt/NGA/2016/ISTH_0017;Clade II)__AVO03567__GPCmut2 (opt5)
aggagagucccgcagucggcguccagcggcucugcuuguucgugugugugucguugcaggccuuauucaagcuuaccaugggccagaucauuaccuucuuucaagaggugccccacgucaucgaagagguuaugaacauugugcugaucgcccucagccugcuugcuauucugaaggggaucuacaauguggccacaugcggacucuucggccuggucuccuuucuucugcucugugggagaucuugcagcacgaccuauaaaggaguguacgaacugcagacacuggagcucgacauggcgucccugaacauguguaugccucuuucuugcaccaagaauaacagccaucacuauaucaugguuggcaaugaaacagggcuggagcucacccugacaaacaccuccauuaucaaucauaaauucuguaaccuuucugaugcucacaagaaaaaucuguacgaccaugcccucaugagcauuaucuccacguuucaccugagcauuccgaacuucaaucaguaugaggccaugucuugcgauuuuaacggaggcaagaucuccgugcaguacaaucugagccacaccuaugcuauugacgccgcuaaccauuguggcacaaucgccaaugggguccuccaaaccuucaugcggauggcguggggaggcucuuacaucgcccuggauuccgggaagggaagcugggacugcauuaugacaucuuaccaguaucuuaucauucagaacaccacgugggaagaucacugucaguuuucccgccccagcccuaucggcuaccuggggcuccugucccaaagaacacgggacauuuauaucucucgcagacggcgcggaaccuucacauggacccuuagcgauuccgagggcaacgaaacccccggcggguacugccugacaagauggaugcucaucgaggcugagcugaaauguuuuggaaauacggccguggcuaagugcaacgaaaaacaugacgaggaguucugcgauaugcugcggcucuuugacuucuguaagcaggccauucgcagacugaaaaccccugcgcagaugagcauccagcuuauuaauaaggccguuaacgcucugaucaaugaucaacucauuaugaagaaccaucugcgggacaucaugggcauccccuauugcaauuacucuaaauauugguaccuuaaccacacagugaccgggaagacaucccugccucgcuguuggcucgucagcaauggaucuuaccugaacgaaacccacuucagcgacgauauugaacagcaggccgacaauaugaucacggagcugcuccaaaaagaguauauggauagacagggcaagacaccgcuggggcuuguggaccuguuuguguucuccaccucuuuuuaccucauuagcaucuuccugcaccugguccggauucccacccaucgccacguuaucggaaaaccuugccccaagccucauagacuuaaccacaugggcauuuguuccugcggccucuauaaacaccccggggugccggugaaguggaagcggugaggacuaguaauaaggaaacuguaugaaugucugugggcaggaagugaagagauccuucuguaaagguuuuuggaauuaugucugcugaauaauaaacuuuuuugaaauaauaaaucugguagaaaaaugagaucucaaaggcucuuuucagagccaccaaaaaaaaaaaaaaaaaaaaaaaaaaaaaaaaaaaaaaaaaaaaaaaaaaaaaaaaaaaaaaaaaaaaaaaaaaaaaaaaaaaaaaaaaaaaaaaaaaaaa

SEQ ID NO: 24114 - RNA, 1809 nt, Artificial Sequence
  mRNA product Design b-4 (hSL-A100) comprising derived and/or modified sequence from LASV(Lassa virus/H.sapiens-wt/NGA/2018/ISTH_0959;Clade II)__AVV65099__GPCmut2 (opt5)
aggagagucccgcagucggcguccagcggcucugcuuguucgugugugugucguugcaggccuuauucaagcuuaccaugggccagaucauuaccuucuuucaagaggugccccacgucaucgaagagguuaugaacauugugcugaucgcccucagccugcuugcuauucugaaggggaucuacaauguggucacaugcggacucuucggccugguguccuuucuucugcucugugggagaucuugcagcacgaccuauaaaggaguuuacgaacugcagacacuggagcucgacauggccucccugaacauguguaugccucuuucuugcaccaagaauaacagccaucacuauaucauggugggcaaugaaacagggcuggagcucacccugacaaacaccuccauuaucaaucauaaauucuguaaccuuucugaugcgcacaagaaaaaucuguacgaccaugcucucaugagcauuaucuccacguuucaccugagcauuccgaacuucaaucaguaugaggccaugucuugcgauuuuaacggaggcaagaucuccguccaguacaaucugagccacgccuaugcuauugacgccgcuaaccauuguggcaccaucgccaauggggugcuccaaacauucaugcggauggcguggggaggcucuuacaucgcccuggauuccgggaagggaagcugggacugcauuaugaccucuuaccaguaucuuaucauucagaacacaaccugggaagaucacugucaguuuucccgccccagcccuaucggcuaccuggggcuccugucccaaagaacgcgggacauuuauaucucucgcagacggcgcggaacauucaccuggacacuuagcgauuccgagggcaacgaaacccccggcggguacugccugaccagauggaugcucaucgaggcugagcugaaauguuuuggaaauacagccguugcuaagugcaacgaaaaacaugacgaggaguucugcgauaugcugcggcucuuugacuucuguaagcaggccauucgcagacugaaaacgccugcgcagaugagcauccagcuuauuaauaaggccgugaacgcucugaucaaugaucaacucauuaugaagaaccaucugcgggacaucaugggcauccccuauugcaauuacucuaaauauugguaccuuaaccacaccgucacagggaagaccucccugccucgcuguuggcucgugagcaauggaucuuaccugaacgaaacacacuucagcgacgauauugaacagcaggccgacaauaugaucaccgagcugcuccaaaaagaguauauugauagacagggcaagacgccgcuggggcuuguggaccuguuugucuucuccacaucuuuuuaccucaucagcauuuuccugcaccugguuaaaauccccacccaucggcacgugauuggaaagccuugccccaaaccucaucgccuuaaccacaugggcaucuguuccugcggccucuauaagcaccccggggugccggucaaguggaaaagaugaggacuaguaauaaggaaacuguaugaaugucugugggcaggaagugaagagauccuucuguaaagguuuuuggaauuaugucugcugaauaauaaacuuuuuugaaauaauaaaucugguagaaaaaugagaucucaaaggcucuuuucagagccaccaaaaaaaaaaaaaaaaaaaaaaaaaaaaaaaaaaaaaaaaaaaaaaaaaaaaaaaaaaaaaaaaaaaaaaaaaaaaaaaaaaaaaaaaaaaaaaaaaaaaa

SEQ ID NO: 24115 - RNA, 1809 nt, Artificial Sequence
  mRNA product Design b-4 (hSL-A100) comprising derived and/or modified sequence from LASV(LASV003-NIG-2008;Clade II)__AIT17580__GPCmut2 (opt5)
aggagagucccgcagucggcguccagcggcucugcuuguucgugugugugucguugcaggccuuauucaagcuuaccaugggccagaucauuaccuucuuucaagaggugccccacgucaucgaagagguuaugaacauugugcugaucgcccucagccugcuugcuauucugaaggggaucuacaauguggccacaugcggacucuucggccuggucuccuuucuucugcucugugggagaucuugcagcacgaccuauaaaggaguguacgaacugcagacacuggagcucgacauggcgucccugaacauguguaugccucuuucuugcaccaagaauaacagccaucacuauaucaugguuggcaaugaaacagggcuggagcucacccugacaaacaccuccauuaucaaucauaaauucuguaaccuuucugaugcucacaagaaaaaucuguacgaccaugcccucaugagcauuaucuccacguuucaccugagcauuccgaacuucaaucaguaugaggccaugucuugcgauuuuaacggaggcaagaucuccgugcaguacaaucugagccacaccuaugcugucgacgccgcuaaccauuguggcacaauugccaauggggugcuccaaaccuucaugcggauggcguggggaggcucuuacaucgcccuggauuccgggaagggaagcugggacugcaucaugacaucuuaccaguaucuuauuauccagaacaccacgugggaagaucacugucaguuuucccgccccagcccuauuggcuaccuggggcuccugucccaaagaacacgggacaucuauauuucucgcagacggcgcggaaccuucacauggacccuuagcgauuccgagagcaacgaaacccccggcggcuacugccugacaagauggaugcucaucgaggcugagcugaaauguuuugggaauacggccguugcuaagugcaacgaaaaacaugacgaggaguucugcgauaugcugcggcucuuugacuucuguaagcaggccauccgcagacugaaagcgccugcccagaugucuauucagcuuaucaauaaggcugugaacgcccugauuaaugaucaacucaucaugaagaaccaucugcgggacauuaugggaauccccuauugcaauuacuccaaauauugguaccuuaaccacaccgucacaggccgcaccagccugccuagauguuggcucgugucuaaugggagcuaccugaacgaaacacacuucuccgacgauaucgaacagcaggcugacaauaugauuaccgagcugcuccaaaaggaguauauggaucggcagggaaaaacgccgcugggccuuguggaccuguuugucuucucuaccagcuuuuaccucaucuccauuuuccugcaccugguuaagauccccacacaucgccacgugauugggaaaccuugccccaagccucauagacuuaaccacaugggaaucuguagcugcggccucuauaaacaccccggcgugccggucaaguggaagcggugaggacuaguaauaaggaaacuguaugaaugucugugggcaggaagugaagagauccuucuguaaagguuuuuggaauuaugucugcugaauaauaaacuuuuuugaaauaauaaaucugguagaaaaaugagaucucaaaggcucuuuucagagccaccaaaaaaaaaaaaaaaaaaaaaaaaaaaaaaaaaaaaaaaaaaaaaaaaaaaaaaaaaaaaaaaaaaaaaaaaaaaaaaaaaaaaaaaaaaaaaaaaaaaaa

SEQ ID NO: 24116 - RNA, 1809 nt, Artificial Sequence
  mRNA product Design b-4 (hSL-A100) comprising derived and/or modified sequence from LASV(LASV035-NIG-2009;Clade II)__AIT17588__GPCmut2 (opt5)
aggagagucccgcagucggcguccagcggcucugcuuguucgugugugugucguugcaggccuuauucaagcuuaccaugggccagaucauuaccuucuuucaagaggugccccacgucaucgaagagguuaugaacauugugcugaucgcccucagccugcuugcuauucugaaggggaucuacaauguggccacaugcggacucuucggccuggucuccuuucuucugcucugugggagaucuugcagcacgaccuauaaaggaguguacgaacugcagacacuggagcucgacauggcgucccugaacauguguaugccucuuucuugcaccaagaauaacagccaucacuauaucaugguuggcaaugaaacagggcuggagcucacccugacaaacaccuccauuaucaaucauaaauucuguaaccuuucugaugcucacaagaaaaaucuguacgaccaugcccucaugagcauuaucuccacguuucaccugagcauuccgaacuucaaucaguaugaggccaugucuugcgauuuuaacggaggcaagaucuccgugcaguacaaucugagccacgcuuaugccgucgacgcugccaaccauuguggcaccauugcgaauggggugcuccaaacauucaugcggauggccuggggaggcucuuacaucgcucuggauuccgggaagggaagcugggacugcaucaugaccucuuaccaguaucuuauuauccagaacacaaccugggaagaucacugucaguuuucccgccccagcccuauuggcuaccuggggcuccugucccaaagaacgcgggacaucuauauuucucgcagacggcgcggaacauucaccuggacacuuagcgauuccgagggcaacgaaacccccggcggguacugccugaccagauggaugcucaucgaggccgagcugaaauguuuuggaaauacagcuguugccaagugcaacgaaaaacaugacgaggaguucugcgauaugcugcggcucuuugacuucuguaagcaggcgauccgcagacugaaagccccugcucagaugagcauucagcuuaucaauaaggccgugaacgcucugauuaaugaucaacucaucaugaagaaccaucugcgggacauuaugggcauccccuauugcaauuacucuaaauauugguaccuuaaccacacggucaccgggaagacaucccugccucgcuguuggcucgugagcaauggaucuuaccugaacgaaacccacuucagcgacgauaucgaacagcaggccgacaauaugauuacagagcugcuccaaaaagaguauaucgauagacagggcaagaccccgcuggggcuuguggaccuguuugucuucuccacgucuuuuuaccucauuagcaucuuccugcaccugguuaaaauucccacacaucggcacgugaucggaaagccuugccccaaaccucaucgccuuaaccacaugggcauuuguuccugcggccucuauaagcaccccggggugccggucaaguggaaaagaugaggacuaguaauaaggaaacuguaugaaugucugugggcaggaagugaagagauccuucuguaaagguuuuuggaauuaugucugcugaauaauaaacuuuuuugaaauaauaaaucugguagaaaaaugagaucucaaaggcucuuuucagagccaccaaaaaaaaaaaaaaaaaaaaaaaaaaaaaaaaaaaaaaaaaaaaaaaaaaaaaaaaaaaaaaaaaaaaaaaaaaaaaaaaaaaaaaaaaaaaaaaaaaaaa

SEQ ID NO: 24117 - RNA, 1809 nt, Artificial Sequence
  mRNA product Design b-4 (hSL-A100) comprising derived and/or modified sequence from LASV(LASV1000-NIG-2009;Clade II)__AIT17782__GPCmut2 (opt5)
aggagagucccgcagucggcguccagcggcucugcuuguucgugugugugucguugcaggccuuauucaagcuuaccaugggccagaucauuaccuucuuucaagaggugccccacgucaucgaagagguuaugaacauugugcugaucgcccucagccugcuugcuauucugaaggggaucuacaauguggccacaugcggacucuucggccuggucuccuuucuucugcucugugggagaucuugcagcacgaccuauaaaggaguguacgaacugcagacacuggagcucgacauggcgucccugaacauguguaugccucuuucuugcaccaagaauaacagccaucacuauaucaugguuggcaaugaaacagggcuggagcucacccugacaaacaccuccauuaucaaucauaaauucuguaaccuuucugaugcucacaagaaaaaucuguacgaccaugcccucaugagcauuaucuccacguuucaccugagcauuccgaacuucaaucaguaugaggccaugucuugcgauuuuaacggaggcaagaucuccgugcaguacaaucugagccacaccuaugcugucgacgccgcuaaccauuguggcacaauugccaauggggugcuccaaaccuucaugcggauggcguggggaggcucuuacaucgcccuggauuccgggaagggaagcugggacugcaucaugacaucuuaccaguaucuuauuauccagaacaccacgugggaagaucacugucaguuuucccgccccagcccuauuggcuaccuggggcuccugucccaaagaacacgggacaucuauauuucucgcagacggcgcggaaccuucacauggacccuuagcgauuccgagggcaacgaaacccccggcggguacugccugacaagauggaugcucaucgaggcugagcugaaauguuuuggaaauacggccguugcuaagugcaacgaaaaacaugacgaggaguucugcgauaugcugcggcucuuugacuucuguaagcaggccaucaaacgccugaagaccccugcgcagaugagcauucagcuuaucaauaaggccgugaacgcucugauuaaugaucaacucaucaugaaaaaccaccugagagacauuaugggcauccccuauugcaauuacucuaaguauugguaccuuaaccacacagucaccgggaaaacaucccugccucgguguuggcucgugagcaauggaucuuaccugaacgaaacccauuucagcgacgauaucgaacagcaggccgacaauaugauuacggagcugcuccaaaaggaguauaucgaucgccagggcaaaacaccgcuggggcuuguggaccuguuugucuucuccaccucuuuuuaccucauuagcaucuuccugcaccugguuaagauucccacccauagacacguggugggaaaaccuugccccaagccucaucggcuuaaccacaugggcaucuguuccugcggccucuauaagcaccccggggucccggugaaauggaagcgcugaggacuaguaauaaggaaacuguaugaaugucugugggcaggaagugaagagauccuucuguaaagguuuuuggaauuaugucugcugaauaauaaacuuuuuugaaauaauaaaucugguagaaaaaugagaucucaaaggcucuuuucagagccaccaaaaaaaaaaaaaaaaaaaaaaaaaaaaaaaaaaaaaaaaaaaaaaaaaaaaaaaaaaaaaaaaaaaaaaaaaaaaaaaaaaaaaaaaaaaaaaaaaaaaa

SEQ ID NO: 24118 - RNA, 1809 nt, Artificial Sequence
  mRNA product Design b-4 (hSL-A100) comprising derived and/or modified sequence from LASV(LASV221-NIG-2010;Clade II)__AIT17624__GPCmut2 (opt5)
aggagagucccgcagucggcguccagcggcucugcuuguucgugugugugucguugcaggccuuauucaagcuuaccaugggccagaucauuaccuucuuucaagaggugccccacgucaucgaagagguuaugaacauugugcugaucgcccucagccugcuugcuauucugaaggggaucuacaauguggccacaugcggacucuucggccuggucuccuuucuucugcucugugggagaucuugcagcacgaccuauaaaggaguguacgaacugcagacacuggagcucgacauggcgucccugaacauguguaugccucuuucuugcaccaagaauaacagccaucacuauaucaugguuggcaaugaaacagggcuggagcucacccugacaaacaccuccauuaucaaucauaaauucuguaaccuuucugaugcucacaagaaaaaucuguacgaccaugcccucaugagcauuaucuccacguuucaccugagcauuccgaacuucaaucaguaugaggccaugucuugcgauuuuaacggaggcaagaucuccgugcaguacaaucugagccacaccuaugcuauugacgccgcuaaccauuguggcacaaucgccaaugggguccuccaaaccuucaugcggauggcguggggaggcucuuacaucgcccuggauuccgggaagggaagcugggacugcauuaugacaucuuaccaguaucuuaucauucagaacaccacgugggaagaucacugucaguuuucccgccccagcccuaucggcuaccuggggcuccugucccaaagaacacgggacauuuauaucucucgcagacggcgcggaaccuucacauggacccuuagcgauuccgagggcaacgaaacccccggcggguacugccugacaagauggaugcucaucgaggcugagcugaaauguuuuggaaauacggccguggcuaagugcaacgaaaaacaugacgaggaguucugcgauaugcugcggcucuuugacuucuguaagcaggccauucgcagacugaaaaccccugcgcagaugagcauccagcuuauuaauaaggccguuaacgcucugaucaaugaucaacucauuaugaagaaccaucugcgggacaucaugggcauccccuauugcaauuacucuaaauauugguaccuuaaccacacagugaccgggaagacaucccugccucgcuguuggcucgucagcaauggaucuuaccugaacgaaacccacuucagcgacgauauugaacagcaggccgacaauaugaucacggagaugcugcaaaaagaguauauggauagacagggcaagacaccgcucgggcugguggaccuuuuuguguucuccaccucuuuuuaccugauuagcaucuuccuccaccuggucaaaauucccacccaucggcacguuaucggaaagccuugccccaaaccucaucgccugaaccacaugggcauuuguuccugcggccuuuauaagcaccccggggugccggugaaguggaaaagaugaggacuaguaauaaggaaacuguaugaaugucugugggcaggaagugaagagauccuucuguaaagguuuuuggaauuaugucugcugaauaauaaacuuuuuugaaauaauaaaucugguagaaaaaugagaucucaaaggcucuuuucagagccaccaaaaaaaaaaaaaaaaaaaaaaaaaaaaaaaaaaaaaaaaaaaaaaaaaaaaaaaaaaaaaaaaaaaaaaaaaaaaaaaaaaaaaaaaaaaaaaaaaaaaa

SEQ ID NO: 24119 - RNA, 1809 nt, Artificial Sequence
  mRNA product Design b-4 (hSL-A100) comprising derived and/or modified sequence from LASV(LASV237-NIG-2010;Clade II)__AIT17638__GPCmut2 (opt5)
aggagagucccgcagucggcguccagcggcucugcuuguucgugugugugucguugcaggccuuauucaagcuuaccaugggccagaucauuaccuucuuucaagaggugccccacgucaucgaagagguuaugaacauugugcugaucgcccucagccugcuugcuauucugaaggggaucuacaauguggccacaugcggacucuucggccuggucuccuuucuucugcucugugggagaucuugcagcacgaccuauaaaggaguguacgaacugcagacacuggagcucgacauggcgucccugaacauguguaugccucuuucuugcaccaagaauaacagccaucacuauaucaugguuggcaaugaaacagggcuggagcucacccugacaaacaccuccauuaucaaucauaaauucuguaaccuuucugaugcucacaagaaagaccuguacgaucaugcccucaugagcauuaucuccacguuucaccugagcauuccgaauuucaaccaguaugaggccaugucuugcgacuuuaauggaggcaagaucuccgugcaguacaaccugagccacaccuaugcugucgaugccgcuaaucauuguggcacaauugccaacggggugcuccaaaccuucaugcggauggcguggggaggcucuuacaucgcccuggacuccgggaagggaagcugggauugcaucaugacaucuuaccaguaucuuauuauccagaauaccacgugggaagaccacugucaguuuucccgccccagcccuauuggcuaccuggggcuccugucccaaagaacacgggauaucuauauuucucgcagacggcgcggaaccuucacauggacccuuagcgacuccgagggcaacgaaacccccggcggguacugccugacaagauggaugcucaucgaggcugagcugaaauguuuuggaaacacggccguugcuaagugcaaugaaaaacaugaugaggaguucugcgacaugcugcggcucuuugauuucuguaagcaggccauccgcagacugaaaaccccugcgcagaugagcauucagcuuaucaacaaggccgugaaugcucugauuaacgaccaacucaucaugaagaaucaucugcgggacauuaugggcauccccuauugcaacuacucuaaauauugguaccuuaaucacacagucaccgggaagacaucccugccucgcuguuggcucgugagcaacggaucuuaccugaaugaaacccacuucagcgaugacaucgaacagcaggccgauaacaugauuacggagcugcuccaaaaagaguauauggacagacagggcaagacaccgcuggggcuuguggaucuguuugucuucuccaccucuuuuuaccucaucagcauuuuccugcaccugaucaaaauucccacccaucggcacaucacaggaaagccuugccccaaaccucaucgccuuaaucacaugggcauuuguuccugcggccucuauaagcaccccgggguuccggugaaguggaaaagaugaggacuaguaauaaggaaacuguaugaaugucugugggcaggaagugaagagauccuucuguaaagguuuuuggaauuaugucugcugaauaauaaacuuuuuugaaauaauaaaucugguagaaaaaugagaucucaaaggcucuuuucagagccaccaaaaaaaaaaaaaaaaaaaaaaaaaaaaaaaaaaaaaaaaaaaaaaaaaaaaaaaaaaaaaaaaaaaaaaaaaaaaaaaaaaaaaaaaaaaaaaaaaaaaa

SEQ ID NO: 24120 - RNA, 1809 nt, Artificial Sequence
  mRNA product Design b-4 (hSL-A100) comprising derived and/or modified sequence from LASV(LASV253-NIG-2011;Clade II)__AIT17670__GPCmut2 (opt5)
aggagagucccgcagucggcguccagcggcucugcuuguucgugugugugucguugcaggccuuauucaagcuuaccaugggccagaucauuaccuucuuucaagaggugccccacgucaucgaagagguuaugaacauugugcugaucgcccucagccugcuugcuauucugaaggggaucuacaauguggccacaugcggacucuucggccuggucuccuuucuucugcucugugggagaucuugcagcacgaccuauaaaggaguguacgaacugcagacacuggagcucgacauggcgucccugaacauguguaugccucuuucuugcaccaagaauaacagccaucacuauaucaugguuggcaaugaaacagggcuggagcucacccugacaaacaccuccauuaucaaucauaaauucuguaaccuuucugaugcucacaagaaaaaucuguacgaccaugcccucaugagcauuaucuccacguuucaccugagcauuccgaacuucaaucaguaugaggccaugucuugcgauuuuaacggaggcaagaucuccgugcaguacaaucugagccacaccuaugcugucgacgccgcuaaccauuguggcacaauugccaauggggugcuccaaaccuucaugcggauggcguggggaggcucuuacaucgcccuggauuccgggaagggaagcugggacugcaucaugacaucuuaccaguaucuuauuauccagaacaccacgugggaagaucacugucaguuuucccgccccagcccuauuggcuaccuggggcuccugucccaaagaacacgggacaucuauauuucucgcagacggcgcggaaccuucacauggacccuuagcgauuccgagggcaacgaaacccccggcggguacugccugacaagauggaugcucaucgaggcugagcugaaauguuuuggaaauacggccguugcuaagugcaacgaaaaacaugacgaggaguucugcgauaugcugcggcucuuugacuucuguaagcaggccauccgcagacugaaagcgccugcccagaugagcauucagcuuaucaauaaggcugugaacgcccugauuaaugaucaacucaucaugaagaaccaucugcgggacauuaugggcauccccuauugcaauuacucuaaauauugguaccuuaaccacaccgucacagggcgcaccucccugccuagauguuggcucgugagcaauggaucuuaccugaacgaaacacacuucagcgacgauaucgaacagcaggcugacaauaugauuaccgagcugcuccaaaaggaguauaucgaucggcagggcaaaacgccgcuggggcuuguggaccuguuugucuucuccacaucuuuuuaccucauuagcaucuuccugcaccugguuaagauucccacccaucgccacaucauuggaaaaccuugccccaagccucauagacuuaaccacaugggcaucuguuccugcggccucuauaaacaccccggggugccggugaaguggaagcggugaggacuaguaauaaggaaacuguaugaaugucugugggcaggaagugaagagauccuucuguaaagguuuuuggaauuaugucugcugaauaauaaacuuuuuugaaauaauaaaucugguagaaaaaugagaucucaaaggcucuuuucagagccaccaaaaaaaaaaaaaaaaaaaaaaaaaaaaaaaaaaaaaaaaaaaaaaaaaaaaaaaaaaaaaaaaaaaaaaaaaaaaaaaaaaaaaaaaaaaaaaaaaaaaa

SEQ ID NO: 24121 - RNA, 1809 nt, Artificial Sequence
  mRNA product Design b-4 (hSL-A100) comprising derived and/or modified sequence from LASV(LASV254-NIG-2011;Clade II)__AIT17674__GPCmut2 (opt5)
aggagagucccgcagucggcguccagcggcucugcuuguucgugugugugucguugcaggccuuauucaagcuuaccaugggccagaucauuaccuucuuucaagaggugccccacgucaucgaagagguuaugaacauugugcugaucgcccucagccugcuugcuauucugaaggggaucuacaauguggccacaugcggacucuucggccuggucuccuuucuucugcucugugggagaucuugcagcacgaccuauaaaggaguguacgaacugcagacacuggagcucgacaugaccaaccugaauauguguaugccucuuuccugcacaaagaacaauucucaucacuauaucaugguuggcaacgaaaccgggcuggagcucacacugaccaauacgagcauuaucaaccauaaauucuguaaucuuuccgaugcgcacaagaaaaaccuguacaaucaugcucucaugucuauuaucagcaccuuucaccuguccauuccgaacuucaaucaguaugaggccaugagcugcgacuuuaacggaggcaagaucucugugcaguacaaucugucccacagcuaugccgucgaugcugccaaccauuguggcacaauugcuaacggggugcuccaaaccuucaugcggauggccuggggaggcucuuacaucgcgcuggacuccgggaagggaaauugggauugcaucaugacaagcuaccaguaucuuauuauccagaacaccacgugggaagaccacugucaguuuucucgccccuccccuauuggcuaccuggggcuccugagccaaagaacacgggauaucuauauuucccgcagacggcgcggaaccuucacauggacccuuucugacagcgagggcaaugaaacccccggcggguacugccugacaagauggaugcucaucgaggccgagcugaaauguuuuggaaacacggcuguugccaagugcaaugaaaaacaugaugaggaguucugcgacaugcugcggcucuuugauuucuguaagcaggcuauccgcagacugaaaaccccugcccaggcgaacauucagcuuaucaauaaggccgugaacgcucugauuaaugaccaacucaucaugaagaaccaucugcgggauauuaugggcauccccuauugcaauuacuccaaauauugguaccuuaaccacacagucaccgggaagacaagccugccucgcuguuggcucgugucuaauggauccuaccugaacgaaacccacuucagcgacgacaucgaacagcaggccgauaauaugauuacggagcugcuccaaaaagaguauauggacagacagggcaagacaccgcuggggcuuguggaucuguuugucuucucuaccagcuuuuaccucaucuccauuuuccugcaccugguuaaaauccccacccaucggcacgugauuggaaagccuugccccaaaccucaucgccuuaaccacaugggcaucuguucuugcggccucuauaagcaccccggggugccggucaaguggaaaagaugaggacuaguaauaaggaaacuguaugaaugucugugggcaggaagugaagagauccuucuguaaagguuuuuggaauuaugucugcugaauaauaaacuuuuuugaaauaauaaaucugguagaaaaaugagaucucaaaggcucuuuucagagccaccaaaaaaaaaaaaaaaaaaaaaaaaaaaaaaaaaaaaaaaaaaaaaaaaaaaaaaaaaaaaaaaaaaaaaaaaaaaaaaaaaaaaaaaaaaaaaaaaaaaaa

SEQ ID NO: 24122 - RNA, 1809 nt, Artificial Sequence
  mRNA product Design b-4 (hSL-A100) comprising derived and/or modified sequence from LASV(Nig08-A19;Clade III)__ADU56618__GPCmut2 (opt5)
aggagagucccgcagucggcguccagcggcucugcuuguucgugugugugucguugcaggccuuauucaagcuuaccaugggccagaucgugaccuucuuucaagaggucccccacguuauugaagaggugaugaacaucgugcugauugcccucagcauccuggcuauucuuaaggggcuguacaauaucgccacaugcggacucaucggccuggucacguuccuucugcucuccgggagaucuuguagcaugaccuauaaaggaguguacgaacugcagacacuggagcucaacaugaauacccugaacaugugcaugccucuuuccuguacaaagaauaacucucaucacuauauuaugguuggcaaugaaaccgggcuggagcucacacugaccaacacgagccuucugcaucacaaauuuugcaaucucuccgacgcgcauaagaaaaaccuguacgaucacacccugaugucuaucauuagcacauuccaccucuccaucccgaauuuuaaccaguaugaggcuaugagcugugacuucaauggaggcaagauuaccgugcaguacaaccugucucauuccuaugccaucgaugccgcuaaucacugcggcacagucgccaacggggugcuucaaaccuuuaugcggauggcuuggggaggcagcuacauugcccuggacucugggcgcggaaagugggauuguaucaugacguccuaccaguaucucaucauucagaacacaaccugggaagaccauugccaguucagcagacccucuccuaucggcuaccuggggcuucugucccaacggacacgcgauauuuauaucagcagacggcgcagaggaaccuuuaccuggacacucuccgacucugagggcaaugaaacgcccggcggguacugucugacccgguggaugcugauugaggcggagcucaaaugcuucggaaacacagccguugcuaaguguaaugaaaaacacgaugaggaauuuugcgacaugcugcgccuuuucgauuuuugcaagcaggccaucagacggcugaaagcuccugcccagaugagcauccagcucauuaacaaggcggugaaugcccugaucaacgaccaacuuauuaugaagaaucaucugcgcgauaucaugggcauucccuauuguaacuacuccaaauauugguaccucaaucacaccagcacagggagaaccucucugccucggugcuggcuggucuccaacggaagcuaccucaaugagacgcacuucucugacgacaucgaacagcaggcugauaacaugaucacagagaugcugcaaaaggaguaucuugaccgccagggcaaaaccccgcuggggcucguggaucuguucguguuuagcaccuccuucuaccugauuucuaucuuucuucaucucgucaagauucccacacacagacauaucguuggaaaaccuugucccaagccucaccggcugaaucacaugggcauuugcagcuguggccuguauaaacagcccggggugccggugagauggaagcgcugaggacuaguaauaaggaaacuguaugaaugucugugggcaggaagugaagagauccuucuguaaagguuuuuggaauuaugucugcugaauaauaaacuuuuuugaaauaauaaaucugguagaaaaaugagaucucaaaggcucuuuucagagccaccaaaaaaaaaaaaaaaaaaaaaaaaaaaaaaaaaaaaaaaaaaaaaaaaaaaaaaaaaaaaaaaaaaaaaaaaaaaaaaaaaaaaaaaaaaaaaaaaaaaaa

SEQ ID NO: 24123 - RNA, 1812 nt, Artificial Sequence
  mRNA product Design b-4 (hSL-A100) comprising derived and/or modified sequence from LASV(G1180-SLE-2010;Clade IV)__AIT17168__GPCmut2 (opt5)
aggagagucccgcagucggcguccagcggcucugcuuguucgugugugugucguugcaggccuuauucaagcuuaccaugggccagaucgugaccuucuuucaagaggucccccacguuauugaagaggugaugaacaucgugcugauugcccucagcauccuggcuguccuuaaggggcuguacaauuucgccacaugcggacucgugggccugcuuacguuucugcuccugugugggagauccugcaccgcgucucgguauaaaggaguuuacgaacugcagacacucgagcugaacauggaaacccuuaauauguguaugccucugagcugcacaaagaacaauucccaucacuauauuauggugggcaacgagaccgggcucgagcugacacuuaccaauacgucuaucaucaaccauaaauucuguaaucugagcgacgcucacaagaaaaaccucuacgaucaugcccugauguccauuaucucuaccuuucaccugagcauuccgaauuucaaccaguaugaagccauguccugcgacuuuaauggaggcaagaucagcguccaguacaaccucucucacuccuaugcuggcgaugccgcuaaucauugugggacaguggccaacggaguucugcaaaccuucaugcgcauggcguggggcgggagcuacauugcccuugacucuggacacggcuccugggauugcaucaugacaagcuaccaguaucugauuauccagaacaccacgugggaggaccauugucaguuuucuagacccuccccuaucggguaccucggacugcuuagccaacggacacgcgauauuuauaucuccagacggcgcagaggcaccuucacauggacccugucugacagcgaaggcaaggauacccccgggggauacugccucacacgguggaugcugauugaggcugagcugaaauguuuuggcaauacggccguggcuaagugcaacgaaaaacacgacgaggaguucugcgauaugcuccgccuguuugacuucuguaagcaggccauccagagacuuaaagcgccugcccagauguccauucaacugaucaauaaggcugucaacgcccucaucaaugaucagcugauuaugaagaaccaccuucgggacaucauggggauucccuauugcaauuacagcaaauauugguaccugaaccauaccacaaccggaaagacaucucucccuaaauguuggcugguguccaauggcagcuaccugaacgaaacccacuucucugacgauaucgaacagcaagcugacaauaugauuacggagaugcuccagaaggaguauauggaacgccaggggaaaacaccgcugggacuuguggaucuguuugucuucagcaccuccuuuuaccucaucucuaucuuccugcaucugguuaagauucccacccacagacauaucgugggcaaaagcugcccuaagccccaccggcuuaaccacaugggcauuuguuccugcgggcucuauaagcagccuggagugcccgucaaauggaagcgcugaggacuaguaauaaggaaacuguaugaaugucugugggcaggaagugaagagauccuucuguaaagguuuuuggaauuaugucugcugaauaauaaacuuuuuugaaauaauaaaucugguagaaaaaugagaucucaaaggcucuuuucagagccaccaaaaaaaaaaaaaaaaaaaaaaaaaaaaaaaaaaaaaaaaaaaaaaaaaaaaaaaaaaaaaaaaaaaaaaaaaaaaaaaaaaaaaaaaaaaaaaaaaaaaa

SEQ ID NO: 24124 - RNA, 1812 nt, Artificial Sequence
  mRNA product Design b-4 (hSL-A100) comprising derived and/or modified sequence from LASV(G1442-SLE-2011;Clade IV)__AIT17180__GPCmut2 (opt5)
aggagagucccgcagucggcguccagcggcucugcuuguucgugugugugucguugcaggccuuauucaagcuuaccaugggccagaucgugaccuucuuucaagaggucccccacguuauugaagaggugaugaacaucgugcugauugcccucagcauccuggcuguccuuaaggggcuguacaauguggccacaugcggacucauuggccugguuacguuccuucugcucugugggagauccugcaccacaacccuguauaaaggaguguacgaacugcagacacucgagcugaacauggaaacccuuaauauguguaugccucugucuugcacaaagaacaauagccaucacuauauccgggucggcaacgagaccgggcucgagcugacgcuuaccaauacauccaucauuaaccauaaauuuuguaaucugucugacgcgcacaagaaaaaccucuacgaucaugcucugaugagcaucauuuccaccuuccaccugucuaucccgaauuuuaaccaguaugaagccaugagcugcgacuucaauggaggcaagauuuccgugcaguacaaccucagccacucuuaugccggcgaugcugccaaucauugugggacaguugcuaacggagugcugcaaaccuuuaugcgcauggccuggggcggguccuacaucgcgcuugacagcggaagaggcaacugggauugcauuaugacgucuuaccaguaucugaucauccagaauacaaccugggacgaucacugucaguucucccggcccagcccuauuggguaccucggacugcuuucucaacgcacaagagacgucuauaucucccggcgcagacggggcaccuuuaccuggacacugagcgauuccgagggcaaggacacgcccgggggauacugccucacccgcuggaugcugauugaagccgagcugaaauguuucggcaacacagcuguggccaagugcaaugagaaacaugaugaagaguuuugcgacaugcucagacuguucgauuuuuguaagcaggcuauccagcggcuuaaagccccugcgcagaugucuauucaacugaucaacaaggccgugaaugcucucaucaacgaccagcugauuaugaagaaucaccuucgcgacaucauggggauucccuauugcaacuacagcaaauauugguaccugaauaacaccgccacaggaaagaccucccucccuaaauguuggcugaucagcaauggcucuuaccugaacgaaacgcacuucuccgaugacauugagcaggaagcugauaauaugaucacagagaugcuccaaaaggaguauauggaaagacaggggaaaaccccgcugggacuugucgaccuguucguuuuuagcaccucuuucuaccucaucagcauuuuucugcaucuggugaagauccccacacaccggcauauugugggcaaauccugcccuaagccccaccgccuuaaccauaugggcaucuguucuugcgggcucuauaagcagccuggaguccccgugagauggaaacggugaggacuaguaauaaggaaacuguaugaaugucugugggcaggaagugaagagauccuucuguaaagguuuuuggaauuaugucugcugaauaauaaacuuuuuugaaauaauaaaucugguagaaaaaugagaucucaaaggcucuuuucagagccaccaaaaaaaaaaaaaaaaaaaaaaaaaaaaaaaaaaaaaaaaaaaaaaaaaaaaaaaaaaaaaaaaaaaaaaaaaaaaaaaaaaaaaaaaaaaaaaaaaaaaa

SEQ ID NO: 24125 - RNA, 1812 nt, Artificial Sequence
  mRNA product Design b-4 (hSL-A100) comprising derived and/or modified sequence from LASV(G3010-SLE-2013;Clade IV)__AIT17344__GPCmut2 (opt5)
aggagagucccgcagucggcguccagcggcucugcuuguucgugugugugucguugcaggccuuauucaagcuuaccaugggccagaucgugaccuucuuucaagaggucccccacguuauugaagaggugaugaacaucgugcugauugcccucagcauccuggcuguccuuaaggggcuguacaauuucgccacaugcggacucgugggccugguuacguuucuucugcucugugggagauccugcaccacaucucuguauaaaggaguguacgaacugcagacccucgagcugaacauggaaacacuuaauauguguaugccucugagcugcaccaagaacaauucccaucacuauauuauggucggcaacgagacagggcucgagcugacccuuacgaauaccucuaucaucaaccauaaauucuguaaucugagcgacgcgcacaagaaaaaccucuacaaucaugcucugauguccauuaucucuacauuucaccugagcauuccgaacuucaaucaguaugaagccauguccugcgauuuuaacggaggcaagaucagcgugcaguacaaucucucucacuccuaugccggcgacgcugccagccauugugggaccguugcuaacggagugcugcaaacauucaugcggauggccuggggcgggucuuacauugcgcuugauuccggauacggcaagugggacugcaucaugaccagcuaucaguaccugauuauccagaacacgacaugggaggaucacugucaguuuucucgccccuccccuaucggguaucucggacugcuuagccaaagaacccgggacauuuacaucucccgcagacggcgcggcacauucaccuggacccugucugauagcgaaggcaaagacacacccgggggauauugccucacgagauggaugcugauugaggccgagcugaaguguuuuggcaauaccgcugucgccaaaugcaacgaaaagcaugaugaggaguucugcgacaugcuccggcuguuugauuucuguaaacaggcuauccagcgccuuaagaccccugcccagauguccauucaacugaucaauaaggcggugaacgcccucaucaaugaccagcugauuaugaaaaaccaccuuagagauaucauggggauucccuacugcaauuauagcaaguacugguaccugaaccacacaacaaccggaaaaacgucucucccuaaguguuggcugguguccaauggcagcuaucugaacgaaacacauuucucugacgacaucgaacagcaagcugauaauaugauuaccgagaugcuccagaaagaguacauggaacggcaggggaagaccccgcugggacuugucgaccuguuuguuuucagcacauccuuuuaucucaucucuaucuuccugcaccuggugaaaauucccacccaucgccacaucgugggcaagagcugcccuaagccccauagacuuaaccacaugggcauuuguuccugcgggcucuacaaacagccuggaguccccgugcgguggaagcgcugaggacuaguaauaaggaaacuguaugaaugucugugggcaggaagugaagagauccuucuguaaagguuuuuggaauuaugucugcugaauaauaaacuuuuuugaaauaauaaaucugguagaaaaaugagaucucaaaggcucuuuucagagccaccaaaaaaaaaaaaaaaaaaaaaaaaaaaaaaaaaaaaaaaaaaaaaaaaaaaaaaaaaaaaaaaaaaaaaaaaaaaaaaaaaaaaaaaaaaaaaaaaaaaaa

SEQ ID NO: 24126 - RNA, 1812 nt, Artificial Sequence
  mRNA product Design b-4 (hSL-A100) comprising derived and/or modified sequence from LASV(G502-SLE-2009;Clade IV)__AIT17126__GPCmut2 (opt5)
aggagagucccgcagucggcguccagcggcucugcuuguucgugugugugucguugcaggccuuauucaagcuuaccaugggccagaucgugaccuucuuucaagaggucccccacguuauugaagaggugaugaacaucgugcugauugcccucagcauccuggcuguccuuaaggggcuguacaauuucgccacaugcggacucgugggccugcuuacguuucugcuccugugugggagauccugcaccacaggacuguauaaaggcguuuacgaacuccagacccuggagcuuaacauggaaacacugaauauguguaugccucucucuugcaccaagaacaauagccaucacuauauuaugguggggaacgagacaggacuggagcuuacccugacgaauaccuccaucaucaaccauaaauucuguaaucucucugacgcgcacaagaaaaaccuguacgaucaugcucugaugagcauuaucuccacauuucaccucucuauuccgaauuucaaccaguaugaagccaugagcugcgacuuuaauggcggcaagaucuccguccaguacaaccugagccacucuuaugccggggaugcugccgaccauuguggaaccguggcuaauggcguucuucaaacauucaugcggauggccuggggaggguccuacauugcgcuggauagcggccgcgggagaugggacugcaucaugaccucuuaccaguaucucauuauccagaacacgacaugggaggaucacugucaguuuucccggcccagcccuaucggauaccugggccuucugucucaacgcaccagagacauuuauaucucccggcgcagacggggcacauucaccuggacccucagcgauuccgaagggaaggacacacccggaggcuacugccugacgcgcuggaugcugauugaggccgagcucaaauguuuugggaacaccgcuguggccaagugcaaugaaaaacaugaugaggaguucugcgacaugcugagacuuuuugauuucuguaagcaggcuauccagcggcugaaagccccugcgcagaugucuauucaacucaucaacaaggccgucaaugcucugaucaacgaccagcuugugaugaagaaucaucugcgcgacauuaugggaauccccuauugcaacuacagcagauauugguaccucaaucacacaaccacaggccggaccucccugccuaaauguuggcuggugagcaacgggucuuaccucaaugaaacgcacuucuccgaugacauugaacagcaagccgauaacaugaucacagagaugcugcagaaggaguauauggaacgccagggaaaaaccccgcuuggccuggucgaccucuuuguuuucagcaccucuuuuuaccugauuagcaucuuccugcaccuugugaagauccccacacauagacacauugugggcaaauccugcccuaagccccaucggcucaaucacauggggaucuguucuugcggacuguauaaacagccuggcguccccgugaaguggaagagaugaggacuaguaauaaggaaacuguaugaaugucugugggcaggaagugaagagauccuucuguaaagguuuuuggaauuaugucugcugaauaauaaacuuuuuugaaauaauaaaucugguagaaaaaugagaucucaaaggcucuuuucagagccaccaaaaaaaaaaaaaaaaaaaaaaaaaaaaaaaaaaaaaaaaaaaaaaaaaaaaaaaaaaaaaaaaaaaaaaaaaaaaaaaaaaaaaaaaaaaaaaaaaaaaa

SEQ ID NO: 24127 - RNA, 1812 nt, Artificial Sequence
  mRNA product Design b-4 (hSL-A100) comprising derived and/or modified sequence from LASV(G733-SLE-2010;Clade IV)__AIT17154__GPCmut2 (opt5)
aggagagucccgcagucggcguccagcggcucugcuuguucgugugugugucguugcaggccuuauucaagcuuaccaugggccagaucgugaccuucuuucaagaggucccccacguuauugaagaggugaugaacaucgugcugauugcccucagcauccuggcuguccuuaaggggcuguacaauuucgccacaugcggaauugugggccucguuuccuuucugcuucugugugggagaucuugcacgaccagccucuauaaaggaguguacgaacugcagacacuggagcucaacauggaaacccugaauauguguaugccucuuuccugcacaaagaacaauucucaucacuauaucauggucggcaacgagaccgggcuggagcucacacugaccaauacgagcaucauuaaccauaaauucuguaaucuuuccgacgcgcacaagaaaaaccuguacgaucaugcucucaugucuaucauuagcaccuuucaccuguccaucccgaauuucaaccaguaugaagccaugagcugcgacuuuaauggaggcaagauuucugugcaguacaaccugucccacagcuaugccggcgaugcugccaaucauugugggacaaucgcuaacggaguucuccaaaccuucaugcggauggccuggggcgggucuuacauugcgcuggacuccggacgcgauagaugggacugcaucaugacaagcuaccaguaucuuaucauucagaacaccacgugggaggaucacugucaguuuucucggcccuccccuaucggcuaccuggggcuccugagccaacgcacaagagacauuuauaucucccggcgcagacggggaaccuucacauggacccuuucugauagcgaaggcaaggacacccccggcggguacugccugacacgcuggaugcucauugaggccgagcugaaauguuuuggaaauacggcuguggccaagugcaacgaaaaacaugaugaggaguucugcgacaugcugagacucuuugauuucuguaagcaggcuauccagcggcugaaagccccugcgcagauguccauccaacuuauuaauaaggccgucaacgcucugaucaaugaccagcucauuaugaagaaccaucugcgcgacaucaugggcauucccuauugcaauuacagcaaauauugguaccuuaaccacaccacaaccgggaagacaucucugccuaaauguuggcucguguccaauggaagcuaccugaacgaaacccacuucucugaugacaucgaacagcaagccgauaauaugaucacggagaugcugcagaaggaguauauggaaagacagggcaaaacaccgcucgggcugguggaccuuuuugucuucagcaccuccuuuuaccugauuucuaucuuccuccaccugguuaagauucccacccaucggcacguggugggaaaaagcugcccuaagccccaucgccugaaccacaugggcaucuguuccugcggccuuuaugggcagccuggaguccccgugaaguggaaaagaugaggacuaguaauaaggaaacuguaugaaugucugugggcaggaagugaagagauccuucuguaaagguuuuuggaauuaugucugcugaauaauaaacuuuuuugaaauaauaaaucugguagaaaaaugagaucucaaaggcucuuuucagagccaccaaaaaaaaaaaaaaaaaaaaaaaaaaaaaaaaaaaaaaaaaaaaaaaaaaaaaaaaaaaaaaaaaaaaaaaaaaaaaaaaaaaaaaaaaaaaaaaaaaaaa

SEQ ID NO: 24128 - RNA, 1812 nt, Artificial Sequence
  mRNA product Design b-4 (hSL-A100) comprising derived and/or modified sequence from MOPV/LASV reassortant(IGS-1;Clade IV)__AFY05576__GPCmut2 (opt5)
aggagagucccgcagucggcguccagcggcucugcuuguucgugugugugucguugcaggccuuauucaagcuuaccaugggccagaucgugaccuucuuucaagaggucccccacguuauugaagaggugaugaacaucgugcugauugcccucagcguccuggcugugcuuaaggggcuguacaauuucgccacaugcggacucguuggccuggugacguuucuucugcucugugggagauccugcaccacaucucuguauaaaggagucuacgaacugcagacccucgagcugaacauggaaacacuuaauauguguaugccucugagcugcaccaagaacaauucccaucacuauaucauggugggcaacgagacagggcucgagcugacccuuacgaauaccucuauuaucaaccauaaauucuguaaucugagcgacgcgcacaagaaaaaccucuacgaucaugcucugauguccaucauuucuacauuucaccugagcaucccgaauuucaaccaguaugaagccauguccugcgacuuuaauggaggcaagauuagcguucaguacaaccucucucacuccuaugccggcgaugcugccaaucauugugggaccguggcuaacggaguccugcaaacauucaugcggauggccuggggcgggagcuacaucgcgcuugacucuggacgcggcaacugggauugcauuaugaccuccuaccaguaucugaucauucagaauacgacaugggaggaccacugucaguuuagcagacccucuccuaucggguaccucggacugcuuucccaacggacccgcgauaucuauauuagcagacggcgcagaggcacauucaccuggacccuguccgacucugaaggcgaggauacacccgggggauacugccucacgcgguggaugcugaucgaggccgaacugaaguguuuuggcaacaccgcuguggccaaaugcaaugagaagcaugacgaagaguucugcgauaugcuccgccuguuugacuucuguaaacaggcuauucagagacuuaaggccccugcgcagaugagcauccaacugauuaacaaagccgugaaugcucucaucaacgaucagcugaucaugaagaaucaccuucgggacauuauggggauccccuauugcaacuacuccaaguauugguaccugaaucacacaaccacaggacgcaccagccucccuaaauguuggcuggucucuaacggcuccuaccugaaugaaacgcauuucagcgacgauauugagcagcaagccgacaacaugaucacagagaugcuccagaaggaauauauggagagacaggggaaaaccccgcugggacuuguugaucuguuuguguucucuaccagcuuuuaccucauuuccaucuuccugcaccuggugaagauccccacacaucggcacauugucggcaaaucuugcccuaagccccaucgccuuaaucacaugggcaucuguagcugcgggcucuauaaacagccuggagugcccguuaaguggaagagaugaggacuaguaauaaggaaacuguaugaaugucugugggcaggaagugaagagauccuucuguaaagguuuuuggaauuaugucugcugaauaauaaacuuuuuugaaauaauaaaucugguagaaaaaugagaucucaaaggcucuuuucagagccaccaaaaaaaaaaaaaaaaaaaaaaaaaaaaaaaaaaaaaaaaaaaaaaaaaaaaaaaaaaaaaaaaaaaaaaaaaaaaaaaaaaaaaaaaaaaaaaaaaaaaa

SEQ ID NO: 24129 - RNA, 1812 nt, Artificial Sequence
  mRNA product Design b-4 (hSL-A100) comprising derived and/or modified sequence from LASV(LM765-SLE-2012;Clade IV)__AIT17814__GPCmut2 (opt5)
aggagagucccgcagucggcguccagcggcucugcuuguucgugugugugucguugcaggccuuauucaagcuuaccaugggccagaucgugaccuucuuucaagaggucccccacguuauugaagaggugaugaacaucgugcugauugcccucagcauccuggcuguccuuaaggggcuguacaauuucgccacaugcggacucgugggccugguuacguuucuucugcucugugggagauccugcaccacaucucuguauaaaggaguguacgaacugcagacccucgagcugaacauggaaacacuuaauauguguaugccucugagcugcaccaagaacaauucccaucacuauauuauggucggcaacgagacagggcucgagcugacccuuacgaauaccucuaucaucgaccauaaauucuguaaccugagcgaugcgcaccggaagaaucucuacgaccaugcucugauguccauuaucucuacauuucaccugagcauuccgaacuucaaucaguaugaagccauguccugcgauuuuaacggaggcaaaaucagcgugcaguacaaucucucucacuccuaugccaaggacgcugccgaucauuguggcaccguugcuaacggggugcugcaaacauucaugcgcauggccuggggaggcagcuacauugcgcuugacucugggagaggacggugggauugcaucaugaccuccuaccaguaucugauuauccagaauacgacaugggaggaccacugucaguuuagccgccccucuccuaucggcuaccucgggcugcuuucccaaagaacccgggauauuuauaucagccgcagacggcgcggaacauucaccuggacccuguccgacucugaaggcaaggauacacccggcggguacugccucacgagauggaugcugauugaggccgagcugaaauguuuuggaaacaccgcugucgccaagugcaacgaaaaacaugacgaggaguucugcgauaugcuccggcuguuugacuucuguaagcaggcuauccagcgccuuaaagccccugcgcagaugagcauucaacugaucaauaaggccgugaacgcucucaucaaugaccagcugauuaugaagaaccaccuuagagauaucaugggcauucccuauugcaauuacuccaaauauugguaccugaaccacacaaccacagggaagaccagccucccuaaauguuggcuggugucuaauggauccuaccugaacgaaacgcauuucagcgacgauaucgaacagcaagccgacaauaugauuacagagaugcuccagaaggaguauauggaacggcagggcaaaaccccgcuggggcuugucgaucuguuuguuuucucuaccagcuuuuaccucaucuccaucuuccugcaccuggugaagauucccacacaucgccacaucgugggaaaaccuugccccaagccucauagacuuaaccacaugggcauuuguucuugcggccucuauaagcagcccggggucccggugaaauggaagcggugaggacuaguaauaaggaaacuguaugaaugucugugggcaggaagugaagagauccuucuguaaagguuuuuggaauuaugucugcugaauaauaaacuuuuuugaaauaauaaaucugguagaaaaaugagaucucaaaggcucuuuucagagccaccaaaaaaaaaaaaaaaaaaaaaaaaaaaaaaaaaaaaaaaaaaaaaaaaaaaaaaaaaaaaaaaaaaaaaaaaaaaaaaaaaaaaaaaaaaaaaaaaaaaaa

SEQ ID NO: 24130 - RNA, 1812 nt, Artificial Sequence
  mRNA product Design b-4 (hSL-A100) comprising derived and/or modified sequence from LASV(LM776-SLE-2012;Clade IV)__AIT17824__GPCmut2 (opt5)
aggagagucccgcagucggcguccagcggcucugcuuguucgugugugugucguugcaggccuuauucaagcuuaccaugggccagaucgugaccuucuuucaagaggucccccacguuauugaagaggugaugaacaucgugcugauugcccucagcauccuggcuguccuuaaggggcuguacaauuucgccacaugcggacucgugggccugguuacguuucuucugcucugugggagauccugcaccacaucuguguauaaaggagucuacgaacugcagacccuggagcucaacauggaaacacugaauauguguaugccucuuagcugcaccaagaacaauucccaucacuauauuauggugggcaacgagacagggcuggagcucacccugacgaauaccucuaucaucaaccauaaauucuguaaucuuagcgacgcgcacaagaaaaaccuguacgaucaugcucucauguccauuaucucuacauuucaccugagcauuccgaauuucaaccaguaugaagccauguccugcgacuuuaauggaggcaagaucagcguucaguacaaccugucucacuccuaugccggcgaugcugccaaucauugugggaccguggcuaacggaguccuccaaacauucaugcggauggccuggggcgggagcuacauugcgcuggacucuggacacggcaagugggauugcaucaugaccuccuaccaguaucuuauuauccagaacacgacaugggaggaccauugucaguuuagccgccccucuccuaucggguaccugggacuccugucccaaagaacccgggauauuuauaucagccgcagacggcgcggcacauucaccuggacccuuuccgacucugaaggcaaagauacacccgggggauacugccugacgagauggaugcucauugaggccgagcugaaguguuuuggcaauaccgcuguggccaaaugcaacgaaaagcacgacgaggaguucugcgauaugcugcggcucuuugacuucuguaaacaggcuauccagcgccugaaggccccugcgcagaugagcauucaacuuaucaauaaggccgugaacgcucugaucaaugaucagcucauuaugaaaaaccaccugagagacaucauggggauucccuauugcaauuacuccaaguauugguaccuuaaccauacaaccacaggaaaaaccagccugccuaaguguuggcucgucucuaauggcuccuaccugaacgaaacgcacuucagcgacgauaucgaacagcaagccgacaauaugauuacagagaugcugcagaaagaguauauggaacggcaggggaagaccccgcucggacugguugaucuuuuuguguucucuaccagcuuuuaccugaucuccaucuuccuccaucuggugaaaauucccacacaccgccauaucgucggcaagucuugcccuaagccccacagacugaaccacaugggcauuuguagcugcgggcuuuauaaacagccuggagugcccguucgguggaagcgcugaggacuaguaauaaggaaacuguaugaaugucugugggcaggaagugaagagauccuucuguaaagguuuuuggaauuaugucugcugaauaauaaacuuuuuugaaauaauaaaucugguagaaaaaugagaucucaaaggcucuuuucagagccaccaaaaaaaaaaaaaaaaaaaaaaaaaaaaaaaaaaaaaaaaaaaaaaaaaaaaaaaaaaaaaaaaaaaaaaaaaaaaaaaaaaaaaaaaaaaaaaaaaaaaa

SEQ ID NO: 24131 - RNA, 1812 nt, Artificial Sequence
  mRNA product Design b-4 (hSL-A100) comprising derived and/or modified sequence from LASV(Mad39;Clade IV)__ANH09722__GPCmut2 (opt5)
aggagagucccgcagucggcguccagcggcucugcuuguucgugugugugucguugcaggccuuauucaagcuuaccaugggccagaucgugaccuucuuucaagaggucccccacguuauugaagaggugaugaacaucgugcugauugcccucagcauccuggcuguccuuaaggggcuguacaauguggccacaugcggacucauuggccugguuacguuccuucugcucugugggagauccugcaccacaacccuguauaaaggaguguacgaacugcaggcgcucgagcugaacauggaaacacuuaauauguguaugccucugucuugcaccaagaacaauagccaucacuauauccgggucggcaacgagacagggcucgagcugacccuuacgaauaccucccugaucaaccauaaauuuuguaaucucucugacgcucacaagaaaaaccuguacgaucaugcccugaugagcauuaucuccacauuccaccucucuauuccgaauuuuaaccaguaugaagccaugagcugcgacuucaaugauggaaagaucuccgugcaguacaaccugagccacaccuaugcuggcgacacagccaaucauuguggcaccguugcuaacggggugcuucaaacguuuaugcgcauggccuggggaggcucuuacauugcgcuggauuccgggagaggaggcugggacugcaucaugacaagcuaccaguaucucauuauccagaacaccacaugggaggaucacugucaguucucucggcccuccccuaucggguaccugggacuucugagccaacgcaccagagacauuuauaucucucggcgcagacggggcaccuuuacauggacgcucuccgauagcgaaggcaaggacacccccgggggauacugccugacacgcuggaugcugauugaggccgagcucaaauguuucggcaauaccgcugucgccaagugcaacgaaaaacaugaugaggaauuuugcgacaugcugagacuuuucgauuuuuguaagcaggcuauccagcggcugaaagccccugcgcagauguccauucaacucaucaauaaggccgugaacgcucugaucaaugaccagcuuauuaugaagaaccaucugcgcgacaucauggggauucccuauugcaauuacucuaaauauugguaccucaaccacacagugaccggaaagacgagccugccuaaauguuggcuggucuccaauggcagcuaccucaacgagacacacuucucugaugacaucgaacagcaagccgauaauaugauuaccgagaugcugcagaaggaguauauggaaagacaggggaaaaccccgcuuggacugguugaccucuucguguuuuccaccagcuucuaccugaucucuaucuuucugcaccuugugaagauucccacacaucggcacgucgugggcaaaccuugccccaagccucaucgccucaaccacaugggcaucuguagcugcggguucuauaagcagcccggaguuccggugagauggaaacggugaggacuaguaauaaggaaacuguaugaaugucugugggcaggaagugaagagauccuucuguaaagguuuuuggaauuaugucugcugaauaauaaacuuuuuugaaauaauaaaucugguagaaaaaugagaucucaaaggcucuuuucagagccaccaaaaaaaaaaaaaaaaaaaaaaaaaaaaaaaaaaaaaaaaaaaaaaaaaaaaaaaaaaaaaaaaaaaaaaaaaaaaaaaaaaaaaaaaaaaaaaaaaaaaa

SEQ ID NO: 24132 - RNA, 1812 nt, Artificial Sequence
  mRNA product Design b-4 (hSL-A100) comprising derived and/or modified sequence from LASV(Z0947-SLE-2011;Clade IV)__AIT17840__GPCmut2 (opt5)
aggagagucccgcagucggcguccagcggcucugcuuguucgugugugugucguugcaggccuuauucaagcuuaccaugggccagaucgugaccuucuuucaagaggucccccacguuauugaagaggugaugaacaucgugcugauugcccucagcauccuggcuguccuuaaggggcuguacaauuucgccacaugcggacucgugggccugguuacguuucuucugcucugugggagauccugcaccauuucucuguauaaaggaguguacgaacugcagacacucgagcugaacauggaaacccuuaauauguguaugccucugagcugcacaaagaacaauucccaucacuauaucauggucggcaacgagaccgggcucgagcugacacuuaccaauacgucuaucauuaaccauaaauucuguaaucugagcgacgcgcacaagaaaaaccucuacgaucaugcucugauguccaucauuucuaccuuucaccugagcaucccgaauuucaaccaguaugaagccauguccugcgacuuuaauggaggcaagauuagcgugcaguacaaccucucucacuccuaugccggcgaugcugccaaucauugugggacaguugcuaacggagugcugcaaaccuucaugcggauggccuggggcgggagcuacaucgcgcuugacucuggacgcgauagaugggacugcauuaugacauccuaccaguaucugaucauccagaacaccacgugggaggaucacugucaguuuagccggcccucuccuauuggcuaccucgggcugcuuucccaacgcacaagagacaucuauauuagccggcgcagacggggaaccuucacauggacccuguccgauucugaaggcaaggacacccccggcggguacugccucacacgcuggaugcugaucgaggccgagcugaaauguuuuggaaauacggcugucgccaagugcaacgaaaaacaugaugaggaguucugcgacaugcucagacuguuugauuucuguaagcaggcuauucagcggcuuaaagccccugcgcagaugagcauccaacugaucaauaaggccgugaacgcucucauuaaugaccagcugaucaugaagaaccaccuucgcgacauuaugggcauccccuauugcaauuacuccaaauauugguaccugaaccacaccacaaccgggaagacaagccucccuaaauguuggcuggugucuaauggauccuaccugaacgaaacccauuucagcgaugacauugaacagcaagccgauaauaugaucacggagaugcuccagaaggaguauauggaaagacagggcaaaacaccgcuggggcuugucgaccuguuuguuuucucuaccagcuuuuaccucaucuccauuuuccugcaccuggugaagauccccacccaucggcacauugugggaaaaccuugccccaagccucaucgccuuaaccacaugggcaucuguucuugcggccucuauaagcagcccggggucccggugaaauggaagagaugaggacuaguaauaaggaaacuguaugaaugucugugggcaggaagugaagagauccuucuguaaagguuuuuggaauuaugucugcugaauaauaaacuuuuuugaaauaauaaaucugguagaaaaaugagaucucaaaggcucuuuucagagccaccaaaaaaaaaaaaaaaaaaaaaaaaaaaaaaaaaaaaaaaaaaaaaaaaaaaaaaaaaaaaaaaaaaaaaaaaaaaaaaaaaaaaaaaaaaaaaaaaaaaaa

SEQ ID NO: 24133 - RNA, 1788 nt, Artificial Sequence
  mRNA product Design b-4 (A100) comprising derived and/or modified sequence from LASV(Josiah;Clade IV)__NP_694870__GPCmut2 (opt1)
aggagagucccgcagucggcguccagcggcucugcuuguucgugugugugucguugcaggccuuauucaagcuuaccaugggccagaucgugaccuucuuccaggaggucccccacgugaucgaggaggugaugaacaucguccugaucgcccucagcgugcuggccgugcugaaggggcucuacaacuucgcgaccugcggccuggucgggcuggugacguuccuccugcugugcggccgcuccugcaccaccagccucuacaaggggguguacgagcugcagacccuggagcucaacauggagacgcugaacaugugcaugccgcuguccugcaccaagaacaacagccaccacuacaucauggucggcaacgagaccggccucgagcugacgcugaccaacaccuccaucaucaaccacaaguucugcaaccucagcgacgcccacaagaagaaccuguacgaccacgcccugauguccaucaucagcaccuuccaccucuccauccccaacuucaaccaguacgaggccaugagcugcgacuucaacgggggcaagaucuccgugcaguacaaccugagccacuccuacgccggggacgcggccaaccacugcggcacgguggccaacgggguccugcagaccuucaugcggauggccuggggcggcagcuacaucgcgcucgacuccgggcgcggcaacugggacugcaucaugaccagcuaccaguaccugaucauccagaacaccacgugggaggaccacugccaguucucccggcccagccccaucggguaccugggccuccugucccagcgcacccgggacaucuacaucagccgccggcgccggggcaccuucaccuggacgcugagcgacuccgaggggaaggacaccccgggcggguacugccugacccgcuggaugcucaucgaggccgagcugaagugcuucggcaacaccgccguggccaagugcaacgagaagcacgacgaggaguucugcgacaugcugcggcuguucgacuucugcaagcaggccauccagcgccugaaggcgcccgcccagaugagcauccagcugaucaacaaggccgugaacgcccucaucaacgaccagcugaucaugaagaaccaccuccgggacaucauggggauccccuacugcaacuacuccaaguacugguaccucaaccacacgaccaccggccgcaccagccugcccaagugcuggcuggucuccaacggcagcuaccucaacgagacgcacuucuccgacgacaucgagcagcaggccgacaacaugaucaccgagaugcugcagaaggaguacauggagcggcaggggaagacgccccugggccucguggaccuguucguguucagcaccuccuucuaccugaucagcaucuuccugcaccucgucaagaucccgacccaccgccacaucguggggaaguccugccccaagccccaccggcugaaccacaugggcaucugcagcugcgggcuguacaagcagcccggcgugccggucaaguggaagcgcugaggacuaguaauaaggaaacuguaugaaugucugugggcaggaagugaagagauccuucuguaaagguuuuuggaauuaugucugcugaauaauaaacuuuuuugaaauaauaaaucugguagaaaaaugagaucuaaaaaaaaaaaaaaaaaaaaaaaaaaaaaaaaaaaaaaaaaaaaaaaaaaaaaaaaaaaaaaaaaaaaaaaaaaaaaaaaaaaaaaaaaaaaaaaaaaaa

SEQ ID NO: 24134 - RNA, 1785 nt, Artificial Sequence
  mRNA product Design b-4 (A100) comprising derived and/or modified sequence from LASV(LP;Clade I)__AAF86701__GPCmut2 (opt1)
aggagagucccgcagucggcguccagcggcucugcuuguucgugugugugucguugcaggccuuauucaagcuuaccaugggccagaucaucaccuucuuccaggaggugccccacgucaucgaggaggugaugaacaucgugcugaucgcccucagccugcuggccauccucaaggggcuguacaacaucgcgaccugcggcaucaucgggcuggucgccuuccucuuccugugcggcaaguccugcagccugacgcucaagggcggguacgagcugcagacccuggagcucaacauggagacccugaacaugugcaugccgcuguccugcacgaagaacagcucccaccacuacauccgcgugggcaacgagaccgggcucgagcugacccugaccaacacgagcaucaucaaccacaaguucugcaaccucuccgacgcccacaagaagaaccuguacgaccacgcccugaugagcaucaucuccaccuuccaccucagcauccccaacuucaaccaguacgaggccauguccugcgacuucaacggcgggaagaucagcgugcaguacaaccugucccacagcuacgcgggcgacgccgccgagcacugcgggaccgucgccaacggcgugcugcagaccuucaugcggauggcguggggcgggcgcuacaucgcccucgacuccggcaaggggaacugggacugcaucaugacgagcuaccaguaccugaucauccagaacaccaccugggaggaccacugccaguucucccggcccagccccaucggcuaccugggccuccugucccagcgcacccgggacaucuacaucagccgccggcgccgggggacguucaccuggacccugagcgacuccgagggcaacgagacccccgggggcuacugccugacgcgcuggaugcucaucgaggccgagcugaagugcuucgggaacaccgccguggccaagugcaacgagaagcacgacgaggaguucugcgacaugcugcggcuguucgacuucugcaagcaggcgauccgccggcugaaggcccccgcccagaugagcauccagcugaucaacaaggccgucaacgcccucaucaacgaccagcugaucaugaagaaccaccuccgcgacaucaugggcauccccuacugcaacuacuccaaguacugguaccucaaccacaccagcuccggccggaccagccugcccaagugcuggcugaucuccaacgggagcuaccucaacgagacgcaguucuccgacgacaucgagcagcaggcggacaacaugaucaccgagaugcugcagaaggaguacaucgagcgccagggcaagaccccgcuggggcucguggacaucuucaucuucagcaccuccuucuaccugaucagcaucuuccugcaccugaucaagaucccgacgcaccggcacaucgugggcaagcccugccccaagccccaccgccucaaccacaugggggucugcuccugcggccuguacaagcacccgggcgugcccaccaaguggaagcggugaggacuaguaauaaggaaacuguaugaaugucugugggcaggaagugaagagauccuucuguaaagguuuuuggaauuaugucugcugaauaauaaacuuuuuugaaauaauaaaucugguagaaaaaugagaucuaaaaaaaaaaaaaaaaaaaaaaaaaaaaaaaaaaaaaaaaaaaaaaaaaaaaaaaaaaaaaaaaaaaaaaaaaaaaaaaaaaaaaaaaaaaaaaaaaaaa

SEQ ID NO: 24135 - RNA, 1785 nt, Artificial Sequence
  mRNA product Design b-4 (A100) comprising derived and/or modified sequence from LASV(803213;Clade II)__AAF86703__GPCmut2 (opt1)
aggagagucccgcagucggcguccagcggcucugcuuguucgugugugugucguugcaggccuuauucaagcuuaccaugggccagaucaucaccuucuuccaggaggugccccacgucaucgaggaggugaugaacaucgugcugaucgcccucagccugcuggccauccucaaggggaucuacaacgucgcgaccugcggccuguucgggcugaucuccuuccuccugcugugcggccgcagcugcuccgugacguacaaggggguguacgagcuccagacccuggagcugaacauggccaaccucaacaugugcaugccgcugagcugcaccaagaacaacucccaccacuacaucauggucggcaacgagacgggccuggagcucacccugaccaacaccagcaucaucaaccacaaguucugcaaccuguccgacgcccacaagaagaaccucuacgaccacgcccugaugagcaucaucuccacguuccaccugagcauccccaacuucaaccaguacgaggccauguccugcgacuucaacgggggcaagaucagcgugcaguacaaccucucccacagcuucgcgguggacgccgccaaccacugcgggaccaucgccaacggcguccugcagaccuucaugcggauggcguggggcggguccuacaucgcccuggacagcggcaaggggaacugggacugcaucaugaccuccuaccaguaccucaucauccagaacacgaccugggaggaccacugccaguucagccgccccucccccaucggcuaccuggggcugcucagccagcggacccgcgacaucuacaucagccggcgccgccggggcaccuucacguggacccucuccgacagcgagggcaacgaggcccccgggggcuacugccugacccgguggaugcugaucgaggccgagcucaagugcuucgggaacaccgccguggcgaagugcaacgagaagcacgacgaggaguucugcgacaugcugcgccuguucgacuucugcaagcaggccaucaagcggcucaagacgcccgcccagauguccauccagcugaucaacaaggccgugaacgcccugaucaacgaccagcucaucaugaagaaccaccuccgcgacaucaugggcauccccuacugcaacuacagccgguacugguaccugaaccacaccgucaccgggaagaccucccugccccgcugcuggcuggugagcaacggcuccuaccugaacgagacgcacuucagcgacgacaucgagcagcaggcggacaacaugaucaccgagaugcuccagaaggaguacauggaccggcagggcaagaccccgcuggggcugguggaccucuucgucuucuccaccagcuucuaccugaucuccaucuuccugcaccuggugaagaucccgacgcaccgccacaucgugggcaagcccugccccaagccccaccggcucaaccacauggggaucugcagcugcggccuguacaagcacccggggguccccgugaaguggaagcgcugaggacuaguaauaaggaaacuguaugaaugucugugggcaggaagugaagagauccuucuguaaagguuuuuggaauuaugucugcugaauaauaaacuuuuuugaaauaauaaaucugguagaaaaaugagaucuaaaaaaaaaaaaaaaaaaaaaaaaaaaaaaaaaaaaaaaaaaaaaaaaaaaaaaaaaaaaaaaaaaaaaaaaaaaaaaaaaaaaaaaaaaaaaaaaaaaa

SEQ ID NO: 24136 - RNA, 1785 nt, Artificial Sequence
  mRNA product Design b-4 (A100) comprising derived and/or modified sequence from LASV(GA391;Clade III)__CAA36645__GPCmut2 (opt1)
aggagagucccgcagucggcguccagcggcucugcuuguucgugugugugucguugcaggccuuauucaagcuuaccaugggccagaucgugaccuucuuccaggaggucccccacgugaucgaggaggugaugaacaucguccugaucgcccucagcauccuggccauccugaaggggcucuacaacguggcgaccugcggccugaucgggcuggugacguuccuccugcuguccggccgcagcugcucccucaucuacaaggggaccuacgagcugcagacccuggagcucaacauggagacccugaacaugugcaugccgcugagcugcaccaagaacaacucccaccacuacauccgggucggcaacgagaccggccucgagcugacccugacgaacaccagcauccucaaccacaaguucugcaaccuguccgacgcccacaagcgcaaccuguacgaccacagccucauguccaucaucagcaccuuccaccuguccauccccaacuucaaccaguacgaggccaugagcugcgacuucaacgggggcaagaucaccgugcaguacaaccugucccacagcuucgccguggacgccgcggggcacugcggcacgcucgccaacgggguccugcagaccuucaugcggauggccuggggcggcuccuacaucgcccuggacagcgggcgcggcaacugggacugcaucaugaccuccuaccaguaccucaucauccagaacaccacgugggacgaccacugccaguucagccggcccucccccaucggguaccugggccugcucagccagcgcacccgggacaucuacaucagccgccggcgccggggcaccuucaccuggacgcucuccgacagcgaggggaacgagaccccgggcggguacugccugacccgcuggaugcugaucgaggcggagcucaagugcuucggcaacaccgccguggccaagugcaacgagaagcacgacgaggaguucugcgacaugcugcggcuguucgacuucugcaagcaggccauccgccggcucaagacgcccgcccagauguccauccagcugaucaacaaggcggugaacgcccugaucaacgaccagcucaucaugaagaaccaccuccgcgacaucauggggauccccuacugcaacuacagccgguacugguaccugaaccacaccuccaccggcaagaccagccugccccgcugcuggcugaucuccaacggcagcuaccugaacgagacgaaguucuccgacgacaucgagcagcaggccgacaacaugaucaccgagaugcuccagaaggaguacaucgaccggcaggggaagacgccccugggccuggucgaccuguucguguucagcaccuccuucuaccucaucagcaucuuccugcaccuggugaagaucccgacccaccgccacaucgucgggaagcccugccccaagccccaccggcucaaccacaugggcaucugcuccugcgggcuguacaagcagccgggcgugcccgugcgcuggaagcggugaggacuaguaauaaggaaacuguaugaaugucugugggcaggaagugaagagauccuucuguaaagguuuuuggaauuaugucugcugaauaauaaacuuuuuugaaauaauaaaucugguagaaaaaugagaucuaaaaaaaaaaaaaaaaaaaaaaaaaaaaaaaaaaaaaaaaaaaaaaaaaaaaaaaaaaaaaaaaaaaaaaaaaaaaaaaaaaaaaaaaaaaaaaaaaaaa

SEQ ID NO: 24137 - RNA, 1788 nt, Artificial Sequence
  mRNA product Design b-4 (A100) comprising derived and/or modified sequence from LASV(AV;Clade V)__CCA30314__GPCmut2 (opt1)
aggagagucccgcagucggcguccagcggcucugcuuguucgugugugugucguugcaggccuuauucaagcuuaccaugggccagaucgugaccuucuuccaggaggucccccacgugaucgaggaggugaugaacaucguccugaucgcccucagcauccuggccgugcugaaggggcucuacaacaucgcgaccugcggccugaucgggcugaucacguuccuccugcugugcggccgcuccugcagcuccaaccucuacaaggggguguacgagcugcagagccuggaccucaacauggagacccugaacaugugcaugccgcuguccugcaccaagaacaacagccaccacuacauccgggucggcaacgacacgggccucgagcugacccugaccaacaccuccauccucaaccacaaguucugcaaccugagcgacgcccacaagaaggaccuguacgaccacgcccucauguccaucaucagcacguuccaccuguccauccccaacuucaaccaguacgaggccaugagcugcgacuucaacgggggcaagaucuccgugcaguacaaccugagccacuccuacgccaucgacgcggccaaccacugcgggaccguggccaacggcauccuccagaccuucaugcgcauggccuggggcgggagcuacaucgcgcuggacuccggccgggggaacugggacugcaucaugaccagcuaccaguaccugaucauccagaacacgaccugggagaaccacugccaguucucccgccccagccccaucggcuaccucgggcugcugagccagcggacccgcgacaucuacaucucccggcgccgccggggcaccuucacguggacccugagcgacuccgagggcaacgccacccccgggggcuacugccucacccgguggaugcugaucgaggccgagcugaagugcuucgggaacacggccgucgccaagugcaacgagaagcacgacgaggaguucugcgacaugcuccgccuguucgacuucugcaagcaggcgaucagccggcugaagucccccgcccagaugagcauccagcucaucaacaaggccgugaacgcccugaucaacgaccagcugaucaugaagaaccaccuccgcgacaucaugggcauccccuacugcaacuacuccaaguacugguaccugaaccacaccaucaccgggaagaccagccugcccaagugcuggcucguguccaacggcagcuaccugaacgagacgcacuucuccgacgacaucgagcagcaggccgacaacaugaucaccgagaugcugcagaaggaguacauggagcggcagggcaagaccccgcucgggcuggucgaccuguucguguucagcaccuccuucuaccugaucagcaucuuccuccgccuggugaagaucccgacgcaccggcacaucgucggcaagcccugccccaagccccaccgccugaaccacauggggaucugcuccugcggccucuacaagcagccgggggugcccgugcgguggaagcgcugaggacuaguaauaaggaaacuguaugaaugucugugggcaggaagugaagagauccuucuguaaagguuuuuggaauuaugucugcugaauaauaaacuuuuuugaaauaauaaaucugguagaaaaaugagaucuaaaaaaaaaaaaaaaaaaaaaaaaaaaaaaaaaaaaaaaaaaaaaaaaaaaaaaaaaaaaaaaaaaaaaaaaaaaaaaaaaaaaaaaaaaaaaaaaaaaa

SEQ ID NO: 24138 - RNA, 1785 nt, Artificial Sequence
  mRNA product Design b-4 (A100) comprising derived and/or modified sequence from LASV(Togo/2016/7082;Clade VI)__AMR44577__GPCmut2 (opt1)
aggagagucccgcagucggcguccagcggcucugcuuguucgugugugugucguugcaggccuuauucaagcuuaccaugggccagaucaucaccuucuuccaggaggugccccacgucaucgaggaggugaugaacaucgugcugaucgcccucagccugcuggccauccucaagggggucuacaacguggcgaccugcggcaucaucgggcuggugacguuccuguuccucugcggccgcuccugcagccugaucuacaagggguccuacgagcugcagacccucgagcugaacauggagacccugaacaugugcaugccgcucagcugcacgaagaacuccagccaccacuacauccgggucggcaacgagaccggccuggagcugacccucaccaacacguccaucaucaaccacaaguucugcaaccugagcgacgcccacaagcgcaaccuguacgaccacgcccucauguccauccugagcaccuuccaccuguccauccccaacuucaaccaguacgaggccaugagcugcgacuucaacgggggcaagaucuccgugcaguacaaccucagccacgccuacgcgguggacgccgccgagcacugcgggaccgucgccaacggcgugcugcagaccuucaugcggauggcguggggcggguccuacaucgcccuggacagcggccgcgggaacugggacugcaucaugacguccuaccaguaccucaucauccagaacaccaccugggaggaccacugccaguucagccggcccucccccaucggcuaccuggggcugcucagccagcgcacccgggacaucuacaucagccgccggcgccggggcacguucaccuggacccucuccgacagcgagggcaacgagacccccgggggcuacugccugacgcgcuggaugcugaucgaggccgagcucaagugcuucgggaacaccgccguggccaagugcaacgagaagcacgacgaggaguucugcgacaugcugcggcuguucgacuucugcaagcaggcgauccagcgccucaagucccccgcccagaugagcauccagcugaucaacaaggccgucaacgcccugaucaacgaccagcucaucaugaagaaccaccuccgggacaugaugggcauccccuacugcaacuacuccaaguacugguaccugaaccacaccagcuccgggcgcaccagccugcccaagugcuggcugguguccaacggcagcuaccugaacgagacgcacuucuccgacgacaucgagcagcaggccgacaacaugaucaccgagaugcuccagaaggaguacaucgaccggcagggcaagaccccgcuggggcugguggaccucuucgucuucagcaccuccuucuaccugaucagcaucuuccugcaccugaucaagaucccgacgcaccgccacaucgugggcaagcccugccccaagccccaccggcucaaccacauggggaucugcuccugcggccuguacaagcagccgggggugcccacccgcuggaagcggugaggacuaguaauaaggaaacuguaugaaugucugugggcaggaagugaagagauccuucuguaaagguuuuuggaauuaugucugcugaauaauaaacuuuuuugaaauaauaaaucugguagaaaaaugagaucuaaaaaaaaaaaaaaaaaaaaaaaaaaaaaaaaaaaaaaaaaaaaaaaaaaaaaaaaaaaaaaaaaaaaaaaaaaaaaaaaaaaaaaaaaaaaaaaaaaaa

SEQ ID NO: 24139 - RNA, 1785 nt, Artificial Sequence
  mRNA product Design b-4 (A100) comprising derived and/or modified sequence from LASV(KAK-428;Clade n.d. (VII))__ANH09740__GPCmut2 (opt1)
aggagagucccgcagucggcguccagcggcucugcuuguucgugugugugucguugcaggccuuauucaagcuuaccaugggccagaucgugaccuucuuccaggaggucccccacgugaucgaggaggugaugaacaucguccugaucgcccucagccugcuggccauccucaaggggcuguacaacuucgcgaccugcggcgugaucgggcugaucacguuccuccugcugugcggccgcuccugcagcgccaccuacaaggggcaguacgagcuccagacccuggagcugaacauggagucccucaacaugugcaugccgcugagcugcacgaagaacaacucccaccacuacauccgggccggcaacaacaccggccuggagcucacccugaccaacacgagcaucaucucccacaaguucugcaaccugagcgacgcccacaagaagaaccucuacgaccacacccugauguccaucaucaccaccuuccaccugagcauccccaacuucaaccaguacgaggccauguccugcgacuucaacgggggcaagaucagcauccaguacaaccucucccacagcuacgcgggggacgccgcccagcacugcggcacgguggccaacgggguccugcagaccuucaugcgcauggcguggggcggcuccuaccuggcccucgacagcgggcggcgcggcugggacugcaucaucuccagcuaccaguaccugaucauccagaacaccaccugggacgaccacugccaguucucccggcccagccccaucggguaccugggcuucgugagccagaagacgcgcgacaucuacaucucccggcgccgccggggcaccuucaccuggacccugagcgacuccgaggggcacgacaugccgggcggguacugccucacgcgguggaugcugaucgaggccgaccugaagugcuucggcaacaccgccguggccaagugcaacgagaagcacgacgaggaguucugcgacauguggcgccucuucgacuucugcaagcaggcgauccagcggcugaaggcccccgcccagaugaacauccagcugaucaacaaggccgucaacgcccucaucaacgaccagcugaugaugaagaaccaccuccgcgacaucauggggauccccuacugcaacuacagcaaguucugguaccugaacaacaccaccacgggccggaccucccugccccgcugcuggcugaucagcaacggcuccuaccucaacgagacccacuucagcgacgacaucgagcagcaggcggacaacaugaucaccgagaugcugcagaaggaguacauggaccggcaggggaagacgccccugggccucguggaccuguucguguucuccaccagcuucuaccugaucaccaucuuccuccaccuggucaagaucccgacccaccgccacaucguggggaagcccugccccaagccccaccggcugaaccacaugggcaucugcuccugcgggcuguacaagcagccgggcgugcccguccgcuggaagcggugaggacuaguaauaaggaaacuguaugaaugucugugggcaggaagugaagagauccuucuguaaagguuuuuggaauuaugucugcugaauaauaaacuuuuuugaaauaauaaaucugguagaaaaaugagaucuaaaaaaaaaaaaaaaaaaaaaaaaaaaaaaaaaaaaaaaaaaaaaaaaaaaaaaaaaaaaaaaaaaaaaaaaaaaaaaaaaaaaaaaaaaaaaaaaaaaa

SEQ ID NO: 24140 - RNA, 1785 nt, Artificial Sequence; identical to SEQ ID NO: 24134
  mRNA product Design b-4 (A100) comprising derived and/or modified sequence from LASV(Pinneo-NIG-1969;Clade I)__AIT17836__GPCmut2 (opt1)

SEQ ID NO: 24141 - RNA, 1785 nt, Artificial Sequence
  mRNA product Design b-4 (A100) comprising derived and/or modified sequence from LASV(ISTH0009-NIG-2011;Clade II)__AIT17404__GPCmut2 (opt1)
aggagagucccgcagucggcguccagcggcucugcuuguucgugugugugucguugcaggccuuauucaagcuuaccaugggccagaucaucaccuucuuccaggaggugccccacgucaucgaggaggugaugaacaucgugcugaucgcccucagccugcuggccauccucaaggggaucuacaacgucgcgaccugcggccuguucgggcugguguccuuccuccugcugugcggccgcagcugcuccacgaccuacaaggggguguacgagcuccagacccuggagcuggacauggccagccucaacaugugcaugccgcuguccugcacgaagaacaacagccaccacuacaucauggucggcaacgagaccggccuggagcucacccugaccaacacguccaucaucaaccacaaguucugcaaccugagcgacgcccacaagaagaaccucuacgaccacgcccugauguccaucaucagcaccuuccaccuguccauccccaacuucaaccaguacgaggccaugagcugcgacuucaacgggggcaagaucuccgugcaguacaaccucagccacgcguacgccguggacgccgccaaccacugcgggaccaucgcgaacggcguccugcagaccuucaugcggauggccuggggcggguccuacaucgcccuggacagcggcaagggguccugggacugcaucaugacgagcuaccaguaccucaucauccagaacaccaccugggaggaccacugccaguucucccgccccagccccaucggcuaccuggggcugcucagccagcggacccgcgacaucuacaucucccggcgccgccggggcacguucaccuggacccucagcgacuccgagggcaacgagacccccgggggcuacugccugacgcgguggaugcugaucgaggccgagcucaagugcuucgggaacaccgccguggcgaagugcaacgagaagcacgacgaggaguucugcgacaugcugcgccuguucgacuucugcaagcaggccauccggcgccucaagacccccgcccagaugagcauccagcugaucaacaaggccgugaacgcccugaucaacgaccagcucaucaugaagaaccaccuccgggacaucaugggcaucccguacugcaacuacuccaaguacugguaccugaaccacaccgucacggggaagaccagccugccccgcugcuggcugguguccaacggcagcuaccugaacgagacccacuucuccgacgacaucgagcagcaggcggacaacaugaucaccgagcuccugcagaaggaguacauggaccggcagggcaagacgccccuggggcucguggaccuguucgucuucagcaccuccuucuaccugaucagcaucuuccugcaccucaucaagaucccgacccaccgccacaucaccggcaagcccugccccaagccccaccggcugaaccacauggggaucugcuccugcggccuguacaagcacccgggggugcccgugaaguggaagcgcugaggacuaguaauaaggaaacuguaugaaugucugugggcaggaagugaagagauccuucuguaaagguuuuuggaauuaugucugcugaauaauaaacuuuuuugaaauaauaaaucugguagaaaaaugagaucuaaaaaaaaaaaaaaaaaaaaaaaaaaaaaaaaaaaaaaaaaaaaaaaaaaaaaaaaaaaaaaaaaaaaaaaaaaaaaaaaaaaaaaaaaaaaaaaaaaaa

SEQ ID NO: 24142 - RNA, 1785 nt, Artificial Sequence
  mRNA product Design b-4 (A100) comprising derived and/or modified sequence from LASV(ISTH2010-NIG-2012;Clade II)__AIT17482__GPCmut2 (opt1)
aggagagucccgcagucggcguccagcggcucugcuuguucgugugugugucguugcaggccuuauucaagcuuaccaugggccagaucaucaccuucuuccaggaggugccccacgucaucgaggaggugaugaacaucgugcugaucgcccucagccugcuggccauccucaaggggaucuacaacgucgcgaccugcggccuguucgggcugguguccuuccuccugcugugcggccgcagcugcuccacgaccuacaaggggguguacgagcuccagacccuggagcuggacauggccagccucaacaugugcaugccgcuguccugcacgaagaacaacagccaccacuacaucauggucggcaacgagaccggccuggagcucacccugaccaacacguccaucaucaaccacaaguucugcaaccugagcgacgcccacaagaagaaccucuacgaccacgcccugauguccaucaucagcaccuuccaccuguccauccccaacuucaaccaguacgaggccaugagcugcgacuucaacgggggcaagaucuccgugcaguacaaccucagccacgcguacgccguggacgccgccaaccacugcgggaccaucgcgaacggcguccugcagaccuucaugcggauggccuggggcggguccuacaucgcccuggacagcggcaagggguccugggacugcaucaugacgagcuaccaguaccucaucauccagaacaucaccugggaggaccacugccaguucucccgccccagccccaucggcuaccuggggcugcucagccagcggacccgcgacaucuacaucucccggcgccgccggggcaccuucacguggacccucagcgacuccgagggcaacgagacccccgggggcuacugccugacccgguggaugcugaucgaggccgagcucaagugcuucgggaacacggccguggcgaagugcaacgagaagcacgacgaggaguucugcgacaugcugcgccuguucgacuucugcaagcaggccauccggcgccucaagacccccgcccagaugagcauccagcugaucaacaaggccgugaacgcccugaucaacgaccagcucaucaugaagaaccaccuccgggacaucaugggcauccccuacugcaacuacuccaaguacugguaccugaaccacaccgucaccgggaagacgagccugccccgcugcuggcugguguccaacggcagcuaccugaacgagacccacuucuccgacgacaucgagcagcaggcggacaacaugaucaccgagcuccugcagaaggaguacaucgaccggcagggcaagaccccgcuggggcucguggaccuguucgucuucagcacguccuucuaccugaucagcaucuuccugcaccucgugaagaucccgacccaccgccacguggucggcaagcccugccccaagccccaccggcugaaccacauggggaucugcuccugcggccuguacaagcacccgggggugcccgugaaguggaagcgcugaggacuaguaauaaggaaacuguaugaaugucugugggcaggaagugaagagauccuucuguaaagguuuuuggaauuaugucugcugaauaauaaacuuuuuugaaauaauaaaucugguagaaaaaugagaucuaaaaaaaaaaaaaaaaaaaaaaaaaaaaaaaaaaaaaaaaaaaaaaaaaaaaaaaaaaaaaaaaaaaaaaaaaaaaaaaaaaaaaaaaaaaaaaaaaaaa

SEQ ID NO: 24143 - RNA, 1785 nt, Artificial Sequence
  mRNA product Design b-4 (A100) comprising derived and/or modified sequence from LASV(Lassa virus/H.sapiens-wt/NGA/2015/ISTH_0543;Clade II)__AVO03639__GPCmut2 (opt1)
aggagagucccgcagucggcguccagcggcucugcuuguucgugugugugucguugcaggccuuauucaagcuuaccaugggccagaucaucaccuucuuccaggaggugccccacgucaucgaggaggugaugaacaucgugcugaucgcccucagccugcuggccauccucaaggggaucuacaacgucgcgaccugcggccuguucgggcugguguccuuccuccugcugugcggccgcagcugcuccacgaccuacaaggggguguacgagcuccagacccuggagcuggacauggccaaccucaacaugugcaugccgcugagcugcacgaagaacaacucccaccacuacaucauggucggcaacgagaccggccuggagcucacccugaccaacacgagcaucaucaaccacaaguucugcaaccuguccgacgcccacaagaagaaccucuacgaccacgcccugaugagcaucaucuccaccuuccaccugagcauccccaacuucaaccaguacgaggccauguccugcgacuucaacgggggcaagaucagcgugcaguacaaccucucccacaccuacgcgguggacgccgccaaccacugcgggaccaucgccaacggcguccugcagacguucaugcggauggcguggggcgggagcuacaucgcccuggacuccggcaaggggagcugggacugcaucaugaccuccuaccaguaccucgugauccagaacaccaccugggaggaccacugccaguucagccgccccucccccaucggcuaccuggggcugcucagccagcggacgcgcgacaucuacaucagccggcgccgccggggcaccuucaccuggacccucuccgacagcgagggcaacgagacgcccgggggcuacugccugacccgguggaugcugaucgaggccgagcucaagugcuucgggaacaccgccguggccaagugcaacgagaagcacgacgaggaguucugcgacaugcugcgccuguucgacuucugcaagcaggcgauccggcgccucaagacccccgcccagauguccauccagcugaucaacaaggccgucaacgcccugaucaacgaccagcucaucaugaagaaccaccuccgggacaucaugggcauccccuacugcaacuacagcaaguacugguaccugaaccacacggugaccgggaagaccucccugccccgcugcuggcuggugagcaacggcuccuaccugaacgagacccacuucagcgacgacaucgagcagcaggccgacaacaugaucacggagcuccugcagaaggaguacaucgaccggcagggcaagaccccgcuggggcucgucgaccuguucguguucuccaccagcuucuaccugaucuccaucuuccugcaccucgugaagaucccgacccaccgccacaucacgggcaagcccugccccaagccccaccggcugaaccacauggggaucugcagcugcggccuguacaagcacccggggguccccgugaaguggaagcgcugaggacuaguaauaaggaaacuguaugaaugucugugggcaggaagugaagagauccuucuguaaagguuuuuggaauuaugucugcugaauaauaaacuuuuuugaaauaauaaaucugguagaaaaaugagaucuaaaaaaaaaaaaaaaaaaaaaaaaaaaaaaaaaaaaaaaaaaaaaaaaaaaaaaaaaaaaaaaaaaaaaaaaaaaaaaaaaaaaaaaaaaaaaaaaaaaa

SEQ ID NO: 24144 - RNA, 1785 nt, Artificial Sequence
  mRNA product Design b-4 (A100) comprising derived and/or modified sequence from LASV(Lassa virus/H.sapiens-wt/NGA/2016/ISTH_0009;Clade II)__AVO03571__GPCmut2 (opt1)
aggagagucccgcagucggcguccagcggcucugcuuguucgugugugugucguugcaggccuuauucaagcuuaccaugggccagaucaucaccuucuuccaggaggugccccacgucaucgaggaggugaugaacaucgugcugaucgcccucagccugcuggccauccucaaggggaucuacaacgucgcgaccugcggccugcuggggcucguguccuuccugcugcucugcggccgcagcugcuccacgaccuacaaggggguguacgagcugcagacccuggagcucgacauggccagccugaacaugugcaugccgcuguccugcacgaagaacaacagccaccacuacaucauggucggcaacgagaccggccucgagcugacccugaccaacacguccaucaucaaccacaaguucugcaaccucagcgacgcccacaagaagaaccuguacgaccacgcccugauguccaucaucagcaccuuccaccucuccauccccaacuucaaccaguacgaggccaugagcugcgacuucaacgggggccggaucuccgugcaguacaaccugagccacuccuacgcgguggacgccgccaaccacugcgggaccaucgccaacggcguccugcagaccuucaugcgcauggcguggggcgggagcuacaucgcccucgacuccggcaaggggagcugggacugcaucaugacguccuaccaguaccugaucauccagaacaccaccugggaggaccacugccaguucagccggcccagccccaucggcuaccuggggcuccugucccagcgcacccgggacaucuacaucagccgccggcgccggggcacguucaccuggacccuguccgacagcgagggcaacgagacccccgggggcuacugccugacgcgcuggaugcucaucgaggccgagcugaagugcuucgggaacaccgccguggccaagugcaacgagaagcacgacgaggaguucugcgacaugcugcggcuguucgacuucugcaagcaggcgauccgccggcugaagacccccgcccagauguccauccagcugaucaacaaggccgugaacgcccucaucaacgaccagcugaucaugaagaaccaccuccgcgacaucaugggcaucccguacugcaacuacagcaaguacugguaccucaaccacaccgucacggggaagaccucccugccccggugcuggcuggugagcaacggcuccuaccucaacgagacccacuucagcgacgacaucgagcagcaggccgacaacaugaucaccgagcugcugcagaaggaguacaucgaccgccagggcaagacgccccucgggcugguggaccuguucgucuucuccaccagcuucuaccugaucuccaucuuccuccaccuggugaagaucccgacccaccggcacaucaccggcaagcccugccccaagccccaccgccugaaccacauggggaucugcagcugcggccucuacaaccacccgggggugcccgucaaguggaagcggugaggacuaguaauaaggaaacuguaugaaugucugugggcaggaagugaagagauccuucuguaaagguuuuuggaauuaugucugcugaauaauaaacuuuuuugaaauaauaaaucugguagaaaaaugagaucuaaaaaaaaaaaaaaaaaaaaaaaaaaaaaaaaaaaaaaaaaaaaaaaaaaaaaaaaaaaaaaaaaaaaaaaaaaaaaaaaaaaaaaaaaaaaaaaaaaaa

SEQ ID NO: 24145 - RNA, 1785 nt, Artificial Sequence
  mRNA product Design b-4 (A100) comprising derived and/or modified sequence from LASV(Lassa virus/H.sapiens-wt/NGA/2016/ISTH_0017;Clade II)__AVO03567__GPCmut2 (opt1)
aggagagucccgcagucggcguccagcggcucugcuuguucgugugugugucguugcaggccuuauucaagcuuaccaugggccagaucaucaccuucuuccaggaggugccccacgucaucgaggaggugaugaacaucgugcugaucgcccucagccugcuggccauccucaaggggaucuacaacgucgcgaccugcggccuguucgggcugguguccuuccuccugcugugcggccgcagcugcuccacgaccuacaaggggguguacgagcuccagacccuggagcuggacauggccagccucaacaugugcaugccgcuguccugcacgaagaacaacagccaccacuacaucauggucggcaacgagaccggccuggagcucacccugaccaacacguccaucaucaaccacaaguucugcaaccugagcgacgcccacaagaagaaccucuacgaccacgcccugauguccaucaucagcaccuuccaccuguccauccccaacuucaaccaguacgaggccaugagcugcgacuucaacgggggcaagaucuccgugcaguacaaccucagccacaccuacgcgaucgacgccgccaaccacugcgggaccaucgccaacggcgugcugcagacguucaugcggauggcguggggcggguccuacaucgcccuggacagcggcaagggguccugggacugcaucaugaccagcuaccaguaccucaucauccagaacaccaccugggaggaccacugccaguucucccgccccagccccaucggcuaccuggggcugcucagccagcggacgcgcgacaucuacaucucccggcgccgccggggcaccuucaccuggacccucagcgacuccgagggcaacgagacgcccgggggcuacugccugacccgguggaugcugaucgaggccgagcucaagugcuucgggaacaccgccgucgccaagugcaacgagaagcacgacgaggaguucugcgacaugcugcgccuguucgacuucugcaagcaggcgauccggcgccucaagacccccgcccagaugagcauccagcugaucaacaaggccgugaacgcccugaucaacgaccagcucaucaugaagaaccaccuccgggacaucaugggcauccccuacugcaacuacuccaaguacugguaccugaaccacacggugaccgggaagaccagccugccccgcugcuggcuggucuccaacggcagcuaccugaacgagacccacuucuccgacgacaucgagcagcaggccgacaacaugaucacggagcuccugcagaaggaguacauggaccggcagggcaagaccccgcuggggcucguggaccuguucguguucagcaccuccuucuaccugaucagcaucuuccugcaccucguccgcaucccgacccaccggcacgugaucggcaagcccugccccaagccccaccgccugaaccacauggggaucugcuccugcggccuguacaagcacccgggggugcccgucaaguggaagcggugaggacuaguaauaaggaaacuguaugaaugucugugggcaggaagugaagagauccuucuguaaagguuuuuggaauuaugucugcugaauaauaaacuuuuuugaaauaauaaaucugguagaaaaaugagaucuaaaaaaaaaaaaaaaaaaaaaaaaaaaaaaaaaaaaaaaaaaaaaaaaaaaaaaaaaaaaaaaaaaaaaaaaaaaaaaaaaaaaaaaaaaaaaaaaaaaa

SEQ ID NO: 24146 - RNA, 1785 nt, Artificial Sequence
  mRNA product Design b-4 (A100) comprising derived and/or modified sequence from LASV(Lassa virus/H.sapiens-wt/NGA/2018/ISTH_0959;Clade II)__AVV65099__GPCmut2 (opt1)
aggagagucccgcagucggcguccagcggcucugcuuguucgugugugugucguugcaggccuuauucaagcuuaccaugggccagaucaucaccuucuuccaggaggugccccacgucaucgaggaggugaugaacaucgugcugaucgcccucagccugcuggccauccucaaggggaucuacaacgucgugaccugcggccuguucgggcugguguccuuccuccugcugugcggccgcagcugcuccacgaccuacaagggggucuacgagcuccagacccuggagcuggacauggcgagccucaacaugugcaugccgcuguccugcacgaagaacaacagccaccacuacaucauggugggcaacgagaccggccuggagcucacccugaccaacacguccaucaucaaccacaaguucugcaaccugagcgacgcccacaagaagaaccucuacgaccacgcccugauguccaucaucagcaccuuccaccuguccauccccaacuucaaccaguacgaggccaugagcugcgacuucaacgggggcaagaucuccgugcaguacaaccucagccacgccuacgcgaucgacgccgccaaccacugcgggaccaucgccaacggcguccugcagaccuucaugcggauggcguggggcggguccuacaucgcccuggacagcggcaagggguccugggacugcaucaugacgagcuaccaguaccucaucauccagaacaccaccugggaggaccacugccaguucucccgccccagccccaucggcuaccuggggcugcucagccagcggacccgcgacaucuacaucucccggcgccgccggggcacguucaccuggacccucagcgacuccgagggcaacgagacccccgggggcuacugccugacgcgguggaugcugaucgaggccgagcucaagugcuucgggaacaccgccguggccaagugcaacgagaagcacgacgaggaguucugcgacaugcugcgccuguucgacuucugcaagcaggcgauccggcgccucaagacccccgcccagaugagcauccagcugaucaacaaggccgugaacgcccugaucaacgaccagcucaucaugaagaaccaccuccgggacaucaugggcaucccguacugcaacuacuccaaguacugguaccugaaccacaccgucacggggaagaccagccugccccgcugcuggcugguguccaacggcagcuaccugaacgagacccacuucuccgacgacaucgagcagcaggccgacaacaugaucaccgagcuccugcagaaggaguacaucgaccggcagggcaagacgccccuggggcucguggaccuguucgucuucagcaccuccuucuaccugaucagcaucuuccugcaccucgugaagaucccgacccaccgccacgugaucggcaagcccugccccaagccccaccggcugaaccacauggggaucugcuccugcggccuguacaagcacccggggguccccgugaaguggaagcgcugaggacuaguaauaaggaaacuguaugaaugucugugggcaggaagugaagagauccuucuguaaagguuuuuggaauuaugucugcugaauaauaaacuuuuuugaaauaauaaaucugguagaaaaaugagaucuaaaaaaaaaaaaaaaaaaaaaaaaaaaaaaaaaaaaaaaaaaaaaaaaaaaaaaaaaaaaaaaaaaaaaaaaaaaaaaaaaaaaaaaaaaaaaaaaaaaa

SEQ ID NO: 24147 - RNA, 1785 nt, Artificial Sequence
  mRNA product Design b-4 (A100) comprising derived and/or modified sequence from LASV(LASV003-NIG-2008;Clade II)__AIT17580__GPCmut2 (opt1)
aggagagucccgcagucggcguccagcggcucugcuuguucgugugugugucguugcaggccuuauucaagcuuaccaugggccagaucaucaccuucuuccaggaggugccccacgucaucgaggaggugaugaacaucgugcugaucgcccucagccugcuggccauccucaaggggaucuacaacgucgcgaccugcggccuguucgggcugguguccuuccuccugcugugcggccgcagcugcuccacgaccuacaaggggguguacgagcuccagacccuggagcuggacauggccagccucaacaugugcaugccgcuguccugcacgaagaacaacagccaccacuacaucauggucggcaacgagaccggccuggagcucacccugaccaacacguccaucaucaaccacaaguucugcaaccugagcgacgcccacaagaagaaccucuacgaccacgcccugauguccaucaucagcaccuuccaccuguccauccccaacuucaaccaguacgaggccaugagcugcgacuucaacgggggcaagaucuccgugcaguacaaccucagccacaccuacgcgguggacgccgccaaccacugcgggaccaucgccaacggcguccugcagacguucaugcggauggcguggggcggguccuacaucgcccuggacagcggcaagggguccugggacugcaucaugaccagcuaccaguaccucaucauccagaacaccaccugggaggaccacugccaguucucccgccccagccccaucggcuaccuggggcugcucagccagcggacgcgcgacaucuacaucucccggcgccgccggggcaccuucaccuggacccucagcgacuccgagagcaacgagacgccgggcggguacugccugacccgguggaugcugaucgaggccgagcucaagugcuucggcaacaccgccguggccaagugcaacgagaagcacgacgaggaguucugcgacaugcugcgccuguucgacuucugcaagcaggcgauccggcgccucaaggcccccgcccagauguccauccagcugaucaacaaggccgugaacgcccugaucaacgaccagcucaucaugaagaaccaccuccgggacaucauggggauccccuacugcaacuacagcaaguacugguaccugaaccacaccgucacgggccgcaccucccugccccggugcuggcuggugagcaacggguccuaccugaacgagacccacuucagcgacgacaucgagcagcaggcggacaacaugaucaccgagcuccugcagaaggaguacauggaccgccagggcaagacgccccugggccucguggaccuguucgucuucuccaccagcuucuaccugaucuccaucuuccugcaccucgugaagaucccgacccaccggcacgugaucgggaagcccugccccaagccccaccgccugaaccacaugggcaucugcagcugcgggcuguacaagcacccgggcguccccgugaaguggaagcggugaggacuaguaauaaggaaacuguaugaaugucugugggcaggaagugaagagauccuucuguaaagguuuuuggaauuaugucugcugaauaauaaacuuuuuugaaauaauaaaucugguagaaaaaugagaucuaaaaaaaaaaaaaaaaaaaaaaaaaaaaaaaaaaaaaaaaaaaaaaaaaaaaaaaaaaaaaaaaaaaaaaaaaaaaaaaaaaaaaaaaaaaaaaaaaaaa

SEQ ID NO: 24148 - RNA, 1785 nt, Artificial Sequence
  mRNA product Design b-4 (A100) comprising derived and/or modified sequence from LASV(LASV035-NIG-2009;Clade II)__AIT17588__GPCmut2 (opt1)
aggagagucccgcagucggcguccagcggcucugcuuguucgugugugugucguugcaggccuuauucaagcuuaccaugggccagaucaucaccuucuuccaggaggugccccacgucaucgaggaggugaugaacaucgugcugaucgcccucagccugcuggccauccucaaggggaucuacaacgucgcgaccugcggccuguucgggcugguguccuuccuccugcugugcggccgcagcugcuccacgaccuacaaggggguguacgagcuccagacccuggagcuggacauggccagccucaacaugugcaugccgcuguccugcacgaagaacaacagccaccacuacaucauggucggcaacgagaccggccuggagcucacccugaccaacacguccaucaucaaccacaaguucugcaaccugagcgacgcccacaagaagaaccucuacgaccacgcccugauguccaucaucagcaccuuccaccuguccauccccaacuucaaccaguacgaggccaugagcugcgacuucaacgggggcaagaucuccgugcaguacaaccucagccacgcguacgccguggacgccgccaaccacugcgggaccaucgcgaacggcguccugcagaccuucaugcggauggccuggggcggguccuacaucgcccuggacagcggcaagggguccugggacugcaucaugacgagcuaccaguaccucaucauccagaacaccaccugggaggaccacugccaguucucccgccccagccccaucggcuaccuggggcugcucagccagcggacccgcgacaucuacaucucccggcgccgccggggcacguucaccuggacccucagcgacuccgagggcaacgagacccccgggggcuacugccugacgcgguggaugcugaucgaggccgagcucaagugcuucgggaacaccgccguggcgaagugcaacgagaagcacgacgaggaguucugcgacaugcugcgccuguucgacuucugcaagcaggccauccggcgccucaaggcccccgcccagaugagcauccagcugaucaacaaggccgugaacgcgcugaucaacgaccagcucaucaugaagaaccaccuccgggacaucaugggcauccccuacugcaacuacuccaaguacugguaccugaaccacaccgucaccgggaagacgagccugccccgcugcuggcugguguccaacggcagcuaccugaacgagacccacuucuccgacgacaucgagcagcaggccgacaacaugaucaccgagcuccugcagaaggaguacaucgaccggcagggcaagaccccgcuggggcucguggaccuguucgucuucagcacguccuucuaccugaucagcaucuuccugcaccucgugaagaucccgacccaccgccacgugaucggcaagcccugccccaagccccaccggcugaaccacauggggaucugcuccugcggccuguacaagcacccggggguccccgugaaguggaagcgcugaggacuaguaauaaggaaacuguaugaaugucugugggcaggaagugaagagauccuucuguaaagguuuuuggaauuaugucugcugaauaauaaacuuuuuugaaauaauaaaucugguagaaaaaugagaucuaaaaaaaaaaaaaaaaaaaaaaaaaaaaaaaaaaaaaaaaaaaaaaaaaaaaaaaaaaaaaaaaaaaaaaaaaaaaaaaaaaaaaaaaaaaaaaaaaaaa

SEQ ID NO: 24149 - RNA, 1785 nt, Artificial Sequence
  mRNA product Design b-4 (A100) comprising derived and/or modified sequence from LASV(LASV1000-NIG-2009;Clade II)__AIT17782__GPCmut2 (opt1)
aggagagucccgcagucggcguccagcggcucugcuuguucgugugugugucguugcaggccuuauucaagcuuaccaugggccagaucaucaccuucuuccaggaggugccccacgucaucgaggaggugaugaacaucgugcugaucgcccucagccugcuggccauccucaaggggaucuacaacgucgcgaccugcggccuguucgggcugguguccuuccuccugcugugcggccgcagcugcuccacgaccuacaaggggguguacgagcuccagacccuggagcuggacauggccagccucaacaugugcaugccgcuguccugcacgaagaacaacagccaccacuacaucauggucggcaacgagaccggccuggagcucacccugaccaacacguccaucaucaaccacaaguucugcaaccugagcgacgcccacaagaagaaccucuacgaccacgcccugauguccaucaucagcaccuuccaccuguccauccccaacuucaaccaguacgaggccaugagcugcgacuucaacgggggcaagaucuccgugcaguacaaccucagccacaccuacgcgguggacgccgccaaccacugcgggaccaucgccaacggcguccugcagacguucaugcggauggcguggggcggguccuacaucgcccuggacagcggcaagggguccugggacugcaucaugaccagcuaccaguaccucaucauccagaacaccaccugggaggaccacugccaguucucccgccccagccccaucggcuaccuggggcugcucagccagcggacgcgcgacaucuacaucucccggcgccgccggggcaccuucaccuggacccucagcgacuccgagggcaacgagacgcccgggggcuacugccugacccgguggaugcugaucgaggccgagcucaagugcuucgggaacaccgccguggccaagugcaacgagaagcacgacgaggaguucugcgacaugcugcgccuguucgacuucugcaagcaggcgaucaagcggcucaagacccccgcccagaugagcauccagcugaucaacaaggccgugaacgcccugaucaacgaccagcucaucaugaagaaccaccuccgcgacaucaugggcauccccuacugcaacuacuccaaguacugguaccugaaccacacggucaccgggaagaccagccugccccggugcuggcugguguccaacggcagcuaccugaacgagacccacuucuccgacgacaucgagcagcaggccgacaacaugaucacggagcuccugcagaaggaguacaucgaccgccagggcaagaccccgcuggggcucguggaccuguucgucuucagcaccuccuucuaccugaucagcaucuuccugcaccucgugaagaucccgacccaccggcacguggucggcaagcccugccccaagccccaccgccugaaccacauggggaucugcuccugcggccuguacaagcacccgggggugcccgugaaguggaagcggugaggacuaguaauaaggaaacuguaugaaugucugugggcaggaagugaagagauccuucuguaaagguuuuuggaauuaugucugcugaauaauaaacuuuuuugaaauaauaaaucugguagaaaaaugagaucuaaaaaaaaaaaaaaaaaaaaaaaaaaaaaaaaaaaaaaaaaaaaaaaaaaaaaaaaaaaaaaaaaaaaaaaaaaaaaaaaaaaaaaaaaaaaaaaaaaaa

SEQ ID NO: 24150 - RNA, 1785 nt, Artificial Sequence
  mRNA product Design b-4 (A100) comprising derived and/or modified sequence from LASV(LASV221-NIG-2010;Clade II)__AIT17624__GPCmut2 (opt1)
aggagagucccgcagucggcguccagcggcucugcuuguucgugugugugucguugcaggccuuauucaagcuuaccaugggccagaucaucaccuucuuccaggaggugccccacgucaucgaggaggugaugaacaucgugcugaucgcccucagccugcuggccauccucaaggggaucuacaacgucgcgaccugcggccuguucgggcugguguccuuccuccugcugugcggccgcagcugcuccacgaccuacaaggggguguacgagcuccagacccuggagcuggacauggccagccucaacaugugcaugccgcuguccugcacgaagaacaacagccaccacuacaucauggucggcaacgagaccggccuggagcucacccugaccaacacguccaucaucaaccacaaguucugcaaccugagcgacgcccacaagaagaaccucuacgaccacgcccugauguccaucaucagcaccuuccaccuguccauccccaacuucaaccaguacgaggccaugagcugcgacuucaacgggggcaagaucuccgugcaguacaaccucagccacaccuacgcgaucgacgccgccaaccacugcgggaccaucgccaacggcgugcugcagacguucaugcggauggcguggggcggguccuacaucgcccuggacagcggcaagggguccugggacugcaucaugaccagcuaccaguaccucaucauccagaacaccaccugggaggaccacugccaguucucccgccccagccccaucggcuaccuggggcugcucagccagcggacgcgcgacaucuacaucucccggcgccgccggggcaccuucaccuggacccucagcgacuccgagggcaacgagacgcccgggggcuacugccugacccgguggaugcugaucgaggccgagcucaagugcuucgggaacaccgccgucgccaagugcaacgagaagcacgacgaggaguucugcgacaugcugcgccuguucgacuucugcaagcaggcgauccggcgccucaagacccccgcccagaugagcauccagcugaucaacaaggccgugaacgcccugaucaacgaccagcucaucaugaagaaccaccuccgggacaucaugggcauccccuacugcaacuacuccaaguacugguaccugaaccacacggugaccgggaagaccagccugccccgcugcuggcuggucuccaacggcagcuaccugaacgagacccacuucuccgacgacaucgagcagcaggccgacaacaugaucacggagaugcuccagaaggaguacauggaccggcagggcaagaccccgcuggggcugguggaccucuucguguucagcaccuccuucuaccugaucagcaucuuccugcaccuggucaagaucccgacccaccgccacgugaucggcaagcccugccccaagccccaccggcucaaccacauggggaucugcuccugcggccuguacaagcacccgggggugcccgucaaguggaagcgcugaggacuaguaauaaggaaacuguaugaaugucugugggcaggaagugaagagauccuucuguaaagguuuuuggaauuaugucugcugaauaauaaacuuuuuugaaauaauaaaucugguagaaaaaugagaucuaaaaaaaaaaaaaaaaaaaaaaaaaaaaaaaaaaaaaaaaaaaaaaaaaaaaaaaaaaaaaaaaaaaaaaaaaaaaaaaaaaaaaaaaaaaaaaaaaaaa

SEQ ID NO: 24151 - RNA, 1785 nt, Artificial Sequence
  mRNA product Design b-4 (A100) comprising derived and/or modified sequence from LASV(LASV237-NIG-2010;Clade II)__AIT17638__GPCmut2 (opt1)
aggagagucccgcagucggcguccagcggcucugcuuguucgugugugugucguugcaggccuuauucaagcuuaccaugggccagaucaucaccuucuuccaggaggugccccacgucaucgaggaggugaugaacaucgugcugaucgcccucagccugcuggccauccucaaggggaucuacaacgucgcgaccugcggccuguucgggcugguguccuuccuccugcugugcggccgcagcugcuccacgaccuacaaggggguguacgagcuccagacccuggagcuggacauggccagccucaacaugugcaugccgcuguccugcacgaagaacaacagccaccacuacaucauggucggcaacgagaccggccuggagcucacccugaccaacacguccaucaucaaccacaaguucugcaaccugagcgacgcccacaagaaggaccucuacgaccacgcccugauguccaucaucagcaccuuccaccuguccauccccaacuucaaccaguacgaggccaugagcugcgacuucaacgggggcaagaucuccgugcaguacaaccucagccacaccuacgcgguggacgccgccaaccacugcgggaccaucgccaacggcguccugcagacguucaugcggauggcguggggcggguccuacaucgcccuggacagcggcaagggguccugggacugcaucaugaccagcuaccaguaccucaucauccagaacaccaccugggaggaccacugccaguucucccgccccagccccaucggcuaccuggggcugcucagccagcggacgcgcgacaucuacaucucccggcgccgccggggcaccuucaccuggacccucagcgacuccgagggcaacgagacgcccgggggcuacugccugacccgguggaugcugaucgaggccgagcucaagugcuucgggaacaccgccguggccaagugcaacgagaagcacgacgaggaguucugcgacaugcugcgccuguucgacuucugcaagcaggcgauccggcgccucaagacccccgcccagaugagcauccagcugaucaacaaggccgugaacgcccugaucaacgaccagcucaucaugaagaaccaccuccgggacaucaugggcauccccuacugcaacuacuccaaguacugguaccugaaccacacggucaccgggaagaccagccugccccgcugcuggcugguguccaacggcagcuaccugaacgagacccacuucuccgacgacaucgagcagcaggccgacaacaugaucacggagcuccugcagaaggaguacauggaccggcagggcaagaccccgcuggggcucguggaccuguucgucuucagcaccuccuucuaccugaucagcaucuuccugcaccucaucaagaucccgacccaccgccacaucacgggcaagcccugccccaagccccaccggcugaaccacauggggaucugcuccugcggccuguacaagcacccgggggugcccgugaaguggaagcgcugaggacuaguaauaaggaaacuguaugaaugucugugggcaggaagugaagagauccuucuguaaagguuuuuggaauuaugucugcugaauaauaaacuuuuuugaaauaauaaaucugguagaaaaaugagaucuaaaaaaaaaaaaaaaaaaaaaaaaaaaaaaaaaaaaaaaaaaaaaaaaaaaaaaaaaaaaaaaaaaaaaaaaaaaaaaaaaaaaaaaaaaaaaaaaaaaa

SEQ ID NO: 24152 - RNA, 1785 nt, Artificial Sequence
  mRNA product Design b-4 (A100) comprising derived and/or modified sequence from LASV(LASV253-NIG-2011;Clade II)__AIT17670__GPCmut2 (opt1)
aggagagucccgcagucggcguccagcggcucugcuuguucgugugugugucguugcaggccuuauucaagcuuaccaugggccagaucaucaccuucuuccaggaggugccccacgucaucgaggaggugaugaacaucgugcugaucgcccucagccugcuggccauccucaaggggaucuacaacgucgcgaccugcggccuguucgggcugguguccuuccuccugcugugcggccgcagcugcuccacgaccuacaaggggguguacgagcuccagacccuggagcuggacauggccagccucaacaugugcaugccgcuguccugcacgaagaacaacagccaccacuacaucauggucggcaacgagaccggccuggagcucacccugaccaacacguccaucaucaaccacaaguucugcaaccugagcgacgcccacaagaagaaccucuacgaccacgcccugauguccaucaucagcaccuuccaccuguccauccccaacuucaaccaguacgaggccaugagcugcgacuucaacgggggcaagaucuccgugcaguacaaccucagccacaccuacgcgguggacgccgccaaccacugcgggaccaucgccaacggcguccugcagacguucaugcggauggcguggggcggguccuacaucgcccuggacagcggcaagggguccugggacugcaucaugaccagcuaccaguaccucaucauccagaacaccaccugggaggaccacugccaguucucccgccccagccccaucggcuaccuggggcugcucagccagcggacgcgcgacaucuacaucucccggcgccgccggggcaccuucaccuggacccucagcgacuccgagggcaacgagacgcccgggggcuacugccugacccgguggaugcugaucgaggccgagcucaagugcuucgggaacaccgccguggccaagugcaacgagaagcacgacgaggaguucugcgacaugcugcgccuguucgacuucugcaagcaggcgauccggcgccucaaggcccccgcccagaugagcauccagcugaucaacaaggccgugaacgcccugaucaacgaccagcucaucaugaagaaccaccuccgggacaucaugggcaucccguacugcaacuacuccaaguacugguaccugaaccacaccgucacggggcgcaccagccugccccggugcuggcugguguccaacggcagcuaccugaacgagacccacuucuccgacgacaucgagcagcaggcggacaacaugaucaccgagcuccugcagaaggaguacaucgaccgccagggcaagacgccccuggggcucguggaccuguucgucuucagcaccuccuucuaccugaucagcaucuuccugcaccucgugaagaucccgacccaccggcacaucaucggcaagcccugccccaagccccaccgccugaaccacauggggaucugcuccugcggccuguacaagcacccgggggugcccgucaaguggaagcggugaggacuaguaauaaggaaacuguaugaaugucugugggcaggaagugaagagauccuucuguaaagguuuuuggaauuaugucugcugaauaauaaacuuuuuugaaauaauaaaucugguagaaaaaugagaucuaaaaaaaaaaaaaaaaaaaaaaaaaaaaaaaaaaaaaaaaaaaaaaaaaaaaaaaaaaaaaaaaaaaaaaaaaaaaaaaaaaaaaaaaaaaaaaaaaaaa

SEQ ID NO: 24153 - RNA, 1785 nt, Artificial Sequence
  mRNA product Design b-4 (A100) comprising derived and/or modified sequence from LASV(LASV254-NIG-2011;Clade II)__AIT17674__GPCmut2 (opt1)
aggagagucccgcagucggcguccagcggcucugcuuguucgugugugugucguugcaggccuuauucaagcuuaccaugggccagaucaucaccuucuuccaggaggugccccacgucaucgaggaggugaugaacaucgugcugaucgcccucagccugcuggccauccucaaggggaucuacaacgucgcgaccugcggccuguucgggcugguguccuuccuccugcugugcggccgcagcugcuccacgaccuacaaggggguguacgagcuccagacccuggagcuggacaugaccaaccucaacaugugcaugccgcugagcugcaccaagaacaacucccaccacuacaucauggucggcaacgagaccggccuggagcucacccugacgaacaccagcaucaucaaccacaaguucugcaaccuguccgacgcccacaagaagaaccucuacaaccacgcccugaugagcaucaucuccaccuuccaccugagcauccccaacuucaaccaguacgaggccauguccugcgacuucaacgggggcaagaucagcgugcaguacaaccucucccacagcuacgccguggacgcggccaaccacugcgggaccaucgccaacggcguccugcagacguucaugcggauggccuggggcggguccuacaucgcgcuggacagcggcaaggggaacugggacugcaucaugaccuccuaccaguaccucaucauccagaacaccaccugggaggaccacugccaguucagccgccccucccccaucggcuaccuggggcugcucagccagcggacgcgcgacaucuacaucagccggcgccgccggggcaccuucaccuggacccucuccgacagcgagggcaacgagacgcccgggggcuacugccugacccgguggaugcugaucgaggccgagcucaagugcuucgggaacaccgccguggccaagugcaacgagaagcacgacgaggaguucugcgacaugcugcgccuguucgacuucugcaagcaggccauccggcgccucaagacccccgcgcaggccaacauccagcugaucaacaaggccgugaacgcccugaucaacgaccagcucaucaugaagaaccaccuccgggacaucaugggcauccccuacugcaacuacuccaaguacugguaccugaaccacacggucaccgggaagaccagccugccccgcugcuggcugguguccaacggcagcuaccugaacgagacccacuucuccgacgacaucgagcagcaggccgacaacaugaucacggagcuccugcagaaggaguacauggaccggcagggcaagaccccgcuggggcucguggaccuguucgucuucagcaccuccuucuaccugaucagcaucuuccugcaccucgugaagaucccgacccaccgccacgugaucggcaagcccugccccaagccccaccggcugaaccacauggggaucugcuccugcggccuguacaagcacccggggguccccgugaaguggaagcgcugaggacuaguaauaaggaaacuguaugaaugucugugggcaggaagugaagagauccuucuguaaagguuuuuggaauuaugucugcugaauaauaaacuuuuuugaaauaauaaaucugguagaaaaaugagaucuaaaaaaaaaaaaaaaaaaaaaaaaaaaaaaaaaaaaaaaaaaaaaaaaaaaaaaaaaaaaaaaaaaaaaaaaaaaaaaaaaaaaaaaaaaaaaaaaaaaa

SEQ ID NO: 24154 - RNA, 1785 nt, Artificial Sequence
  mRNA product Design b-4 (A100) comprising derived and/or modified sequence from LASV(Nig08-A19;Clade III)__ADU56618__GPCmut2 (opt1)
aggagagucccgcagucggcguccagcggcucugcuuguucgugugugugucguugcaggccuuauucaagcuuaccaugggccagaucgugaccuucuuccaggaggucccccacgugaucgaggaggugaugaacaucguccugaucgcccucagcauccuggccauccugaaggggcucuacaacaucgcgaccugcggccugaucgggcuggugacguuccuccugcuguccggccgcagcugcuccaugaccuacaaggggguguacgagcuccagacccuggagcugaacaugaacacccucaacaugugcaugccgcugagcugcaccaagaacaacucccaccacuacaucauggucggcaacgagaccggccuggagcucacccugacgaacaccagccugcuccaccacaaguucugcaaccuguccgacgcccacaagaagaaccuguacgaccacacccucaugagcaucaucuccaccuuccaccugagcauccccaacuucaaccaguacgaggccauguccugcgacuucaacgggggcaagaucacggugcaguacaaccugagccacuccuacgccaucgacgccgcgaaccacugcgggaccguggccaacggcguccuccagaccuucaugcggauggccuggggcgggagcuacaucgcccuggacuccggccgcgggaagugggacugcaucaugaccagcuaccaguaccugaucauccagaacacgaccugggaggaccacugccaguucucccggcccagccccaucggcuaccucgggcugcugucccagcgcacccgggacaucuacaucagccgccggcgccggggcaccuucacguggacccugagcgacuccgagggcaacgagacccccgggggcuacugccucacccgcuggaugcugaucgaggcggagcugaagugcuucgggaacacggccguggccaagugcaacgagaagcacgacgaggaguucugcgacaugcuccggcuguucgacuucugcaagcaggccauccgccggcugaaggcccccgcgcagaugagcauccagcucaucaacaaggccgugaacgcccugaucaacgaccagcugaucaugaagaaccaccuccgcgacaucaugggcauccccuacugcaacuacuccaaguacugguaccugaaccacaccagcaccgggcggaccucccugccccgcugcuggcucgucagcaacggcuccuaccugaacgagacgcacuucagcgacgacaucgagcagcaggccgacaacaugaucaccgagaugcugcagaaggaguaccucgaccggcagggcaagaccccgcuggggcugguggaccuguucguguucuccaccagcuucuaccucaucuccaucuuccugcaccuggucaagaucccgacgcaccgccacaucgugggcaagcccugccccaagccccaccggcucaaccacauggggaucugcagcugcggccuguacaagcagccgggggugcccguccgcuggaagcggugaggacuaguaauaaggaaacuguaugaaugucugugggcaggaagugaagagauccuucuguaaagguuuuuggaauuaugucugcugaauaauaaacuuuuuugaaauaauaaaucugguagaaaaaugagaucuaaaaaaaaaaaaaaaaaaaaaaaaaaaaaaaaaaaaaaaaaaaaaaaaaaaaaaaaaaaaaaaaaaaaaaaaaaaaaaaaaaaaaaaaaaaaaaaaaaaa

SEQ ID NO: 24155 - RNA, 1788 nt, Artificial Sequence
  mRNA product Design b-4 (A100) comprising derived and/or modified sequence from LASV(G1180-SLE-2010;Clade IV)__AIT17168__GPCmut2 (opt1)
aggagagucccgcagucggcguccagcggcucugcuuguucgugugugugucguugcaggccuuauucaagcuuaccaugggccagaucgugaccuucuuccaggaggucccccacgugaucgaggaggugaugaacaucguccugaucgcccucagcauccuggccgugcugaaggggcucuacaacuucgcgaccugcggccugguggggcugcucaccuuccugcugcucugcggccgcuccugcaccgccagccgguacaagggggucuacgagcugcagacccuggagcucaacauggagacccugaacaugugcaugccgcuguccugcaccaagaacaacagccaccacuacaucauggugggcaacgagaccggccucgagcugacccugacgaacaccuccaucaucaaccacaaguucugcaaccucagcgacgcccacaagaagaaccuguacgaccacgcccugauguccaucaucagcaccuuccaccucuccauccccaacuucaaccaguacgaggccaugagcugcgacuucaacgggggcaagaucuccgugcaguacaaccugagccacuccuacgcgggggacgccgccaaccacugcggcaccgucgccaacggggugcugcagacguucaugcgcauggcguggggcggcagcuacaucgcccucgacuccgggcacggcagcugggacugcaucaugaccuccuaccaguaccugaucauccagaacaccaccugggaggaccacugccaguucagccggcccucccccaucggguaccugggccuccugagccagcgcacgcgggacaucuacaucagccgccggcgccggggcaccuucaccuggacccuguccgacagcgaggggaaggacacgccgggcggguacugccugacccgcuggaugcucaucgaggccgagcugaagugcuucggcaacaccgccguggccaagugcaacgagaagcacgacgaggaguucugcgacaugcugcggcuguucgacuucugcaagcaggcgauccagcgccugaaggcccccgcccagauguccauccagcugaucaacaaggccgucaacgcccucaucaacgaccagcugaucaugaagaaccaccuccgggacaucauggggauccccuacugcaacuacagcaaguacugguaccucaaccacaccacgaccggcaagaccucccugcccaagugcuggcuggugagcaacggcuccuaccucaacgagacccacuucagcgacgacaucgagcagcaggcggacaacaugaucacggagaugcugcagaaggaguacauggagcgccaggggaagacgccccugggccucguggaccuguucgucuucuccaccagcuucuaccugaucuccaucuuccugcaccucgugaagaucccgacccaccggcacaucgugggcaagagcugccccaagccccaccgccugaaccacauggggaucugcuccugcgggcuguacaagcagcccggcgucccggugaaguggaagcggugaggacuaguaauaaggaaacuguaugaaugucugugggcaggaagugaagagauccuucuguaaagguuuuuggaauuaugucugcugaauaauaaacuuuuuugaaauaauaaaucugguagaaaaaugagaucuaaaaaaaaaaaaaaaaaaaaaaaaaaaaaaaaaaaaaaaaaaaaaaaaaaaaaaaaaaaaaaaaaaaaaaaaaaaaaaaaaaaaaaaaaaaaaaaaaaaa

SEQ ID NO: 24156 - RNA, 1788 nt, Artificial Sequence
  mRNA product Design b-4 (A100) comprising derived and/or modified sequence from LASV(G1442-SLE-2011;Clade IV)__AIT17180__GPCmut2 (opt1)
aggagagucccgcagucggcguccagcggcucugcuuguucgugugugugucguugcaggccuuauucaagcuuaccaugggccagaucgugaccuucuuccaggaggucccccacgugaucgaggaggugaugaacaucguccugaucgcccucagcauccuggccgugcugaaggggcucuacaacguggcgaccugcggccugaucgggcuggucacguuccuccugcugugcggccgcuccugcaccaccacccucuacaaggggguguacgagcugcagacgcuggagcucaacauggagacccugaacaugugcaugccgcugagcugcaccaagaacaacucccaccacuacauccgggugggcaacgagacgggccucgagcugacccugaccaacaccagcaucaucaaccacaaguucugcaaccucuccgacgcccacaagaagaaccuguacgaccacgcccugaugagcaucaucuccacguuccaccucagcauccccaacuucaaccaguacgaggccauguccugcgacuucaacgggggcaagaucagcguccaguacaaccugucccacagcuacgccggggacgcggccaaccacugcggcaccguggccaacggggugcugcagaccuucaugcgcauggccuggggcggcuccuacaucgcgcucgacagcgggcggggcaacugggacugcaucaugaccuccuaccaguaccugaucauccagaacacgaccugggacgaccacugccaguucagccgccccucccccaucggguaccugggccuccugagccagcggacccgcgacgucuacaucucccggcgccgccggggcaccuucacguggacccugagcgacagcgaggggaaggacaccccgggcggguacugccugacccgguggaugcucaucgaggccgagcugaagugcuucggcaacacggccguggccaagugcaacgagaagcacgacgaggaguucugcgacaugcugcgccucuucgacuucugcaagcaggccauccagcggcugaaggcgcccgcccagauguccauccagcugaucaacaaggccgugaacgcccucaucaacgaccagcugaucaugaagaaccaccuccgcgacaucauggggauccccuacugcaacuacagcaaguacugguaccugaacaacaccgccaccggcaagaccucccugcccaagugcuggcugaucagcaacggcuccuaccucaacgagacgcacuucagcgacgacaucgagcaggaggcggacaacaugaucaccgagaugcugcagaaggaguacauggagcggcaggggaagacgccccugggccucgucgaccuguucguguucuccaccagcuucuaccugaucuccaucuuccugcaccucgugaagaucccgacccaccgccacaucgucggcaagagcugccccaagccccaccggcugaaccacauggggaucugcuccugcgggcuguacaagcagcccggcgugccggugcgcuggaagcggugaggacuaguaauaaggaaacuguaugaaugucugugggcaggaagugaagagauccuucuguaaagguuuuuggaauuaugucugcugaauaauaaacuuuuuugaaauaauaaaucugguagaaaaaugagaucuaaaaaaaaaaaaaaaaaaaaaaaaaaaaaaaaaaaaaaaaaaaaaaaaaaaaaaaaaaaaaaaaaaaaaaaaaaaaaaaaaaaaaaaaaaaaaaaaaaaa

SEQ ID NO: 24157 - RNA, 1788 nt, Artificial Sequence
  mRNA product Design b-4 (A100) comprising derived and/or modified sequence from LASV(G3010-SLE-2013;Clade IV)__AIT17344__GPCmut2 (opt1)
aggagagucccgcagucggcguccagcggcucugcuuguucgugugugugucguugcaggccuuauucaagcuuaccaugggccagaucgugaccuucuuccaggaggucccccacgugaucgaggaggugaugaacaucguccugaucgcccucagcauccuggccgugcugaaggggcucuacaacuucgcgaccugcggccugguggggcuggucacguuccuccugcugugcggccgcuccugcaccaccagccucuacaaggggguguacgagcugcagacccuggagcucaacauggagacgcugaacaugugcaugccgcuguccugcaccaagaacaacagccaccacuacaucauggugggcaacgagaccggccucgagcugacgcugaccaacaccuccaucaucaaccacaaguucugcaaccucagcgacgcccacaagaagaaccuguacaaccacgcccugauguccaucaucagcaccuuccaccucuccauccccaacuucaaccaguacgaggccaugagcugcgacuucaacgggggcaagaucuccguccaguacaaccugagccacuccuacgccggggacgcggccagccacugcggcacgguggccaacggggugcugcagaccuucaugcggauggccuggggcggcuccuacaucgcgcucgacagcggguacggcaagugggacugcaucaugaccuccuaccaguaccugaucauccagaacaccacgugggaggaccacugccaguucagccgccccucccccaucggguaccugggccuccugagccagcggacccgcgacaucuacaucagccggcgccgccggggcaccuucaccuggacgcuguccgacagcgaggggaaggacaccccgggcggguacugccugacccgguggaugcucaucgaggccgagcugaagugcuucggcaacaccgccgucgccaagugcaacgagaagcacgacgaggaguucugcgacaugcugcgccucuucgacuucugcaagcaggccauccagcggcugaagacgcccgcgcagauguccauccagcugaucaacaaggccgugaacgcccucaucaacgaccagcugaucaugaagaaccaccuccgcgacaucauggggauccccuacugcaacuacagcaaguacugguaccugaaccacaccaccaccggcaagacgucccugcccaagugcuggcuggugagcaacggcuccuaccucaacgagacccacuucagcgacgacaucgagcagcaggccgacaacaugaucaccgagaugcugcagaaggaguacauggagcggcaggggaagacgccccugggccucgucgaccuguucguguucuccaccagcuucuaccugaucuccaucuuccugcaccucgugaagaucccgacccaccgccacaucgucggcaagagcugccccaagccccaccggcugaaccacauggggaucugcuccugcgggcuguacaagcagcccggcgugccggugcgcuggaagcggugaggacuaguaauaaggaaacuguaugaaugucugugggcaggaagugaagagauccuucuguaaagguuuuuggaauuaugucugcugaauaauaaacuuuuuugaaauaauaaaucugguagaaaaaugagaucuaaaaaaaaaaaaaaaaaaaaaaaaaaaaaaaaaaaaaaaaaaaaaaaaaaaaaaaaaaaaaaaaaaaaaaaaaaaaaaaaaaaaaaaaaaaaaaaaaaaa

SEQ ID NO: 24158 - RNA, 1788 nt, Artificial Sequence
  mRNA product Design b-4 (A100) comprising derived and/or modified sequence from LASV(G502-SLE-2009;Clade IV)__AIT17126__GPCmut2 (opt1)
aggagagucccgcagucggcguccagcggcucugcuuguucgugugugugucguugcaggccuuauucaagcuuaccaugggccagaucgugaccuucuuccaggaggucccccacgugaucgaggaggugaugaacaucguccugaucgcccucagcauccuggccgugcugaaggggcucuacaacuucgcgaccugcggccugguggggcugcucacguuccugcugcucugcggccgcuccugcaccaccgggcuguacaagggcgucuacgagcugcagacccucgagcugaacauggagacgcugaacaugugcaugccgcucagcugcaccaagaacaacucccaccacuacaucauggugggcaacgagaccgggcuggagcugacgcucaccaacaccagcaucaucaaccacaaguucugcaaccuguccgacgcccacaagaagaaccuguacgaccacgcccucaugagcaucaucuccaccuuccaccugagcauccccaacuucaaccaguacgaggccauguccugcgacuucaacggcgggaagaucagcgugcaguacaaccugucccacagcuacgccggcgacgcggccgaccacugcgggacggucgccaacggcgugcuccagaccuucaugcggauggccuggggcggguccuacaucgcgcuggacagcggccgcgggcggugggacugcaucaugaccuccuaccaguaccugaucauccagaacaccacgugggaggaccacugccaguucagccgccccucccccaucggcuaccucggccugcugagccagcggacccgcgacaucuacaucucccggcgccgccgggggaccuucaccuggacgcugagcgacagcgagggcaaggacacccccgggggcuacugccucacccgguggaugcugaucgaggccgagcugaagugcuucgggaacaccgccguggccaagugcaacgagaagcacgacgaggaguucugcgacaugcuccgccuguucgacuucugcaagcaggccauccagcggcugaaggcgcccgcccagauguccauccagcucaucaacaaggccgucaacgcccugaucaacgaccagcuggugaugaagaaccaccuccgcgacaucaugggcauccccuacugcaacuacagccgguacugguaccugaaccacacgaccaccggccgcaccucccugcccaagugcuggcucgugagcaacggguccuaccugaacgagacgcacuucagcgacgacaucgagcagcaggccgacaacaugaucaccgagaugcugcagaaggaguacauggagcggcagggcaagaccccgcucgggcuggucgaccuguucguguucuccaccagcuucuaccugaucuccaucuuccuccaccuggugaagaucccgacgcaccgccacaucgucggcaagagcugccccaagccccaccggcugaaccacauggggaucugcuccugcggccucuacaagcagcccggcgugccggugaaguggaagcgcugaggacuaguaauaaggaaacuguaugaaugucugugggcaggaagugaagagauccuucuguaaagguuuuuggaauuaugucugcugaauaauaaacuuuuuugaaauaauaaaucugguagaaaaaugagaucuaaaaaaaaaaaaaaaaaaaaaaaaaaaaaaaaaaaaaaaaaaaaaaaaaaaaaaaaaaaaaaaaaaaaaaaaaaaaaaaaaaaaaaaaaaaaaaaaaaaa

SEQ ID NO: 24159 - RNA, 1788 nt, Artificial Sequence
  mRNA product Design b-4 (A100) comprising derived and/or modified sequence from LASV(G733-SLE-2010;Clade IV)__AIT17154__GPCmut2 (opt1)
aggagagucccgcagucggcguccagcggcucugcuuguucgugugugugucguugcaggccuuauucaagcuuaccaugggccagaucgugaccuucuuccaggaggucccccacgugaucgaggaggugaugaacaucguccugaucgcccucagcauccuggccgugcugaaggggcucuacaacuucgcgaccugcggcaucguggggcuggucuccuuccugcuccugugcggccgcagcugcacgaccucccuguacaaggggguguacgagcuccagacccuggagcugaacauggagacccucaacaugugcaugccgcugagcugcaccaagaacaacucccaccacuacaucauggugggcaacgagaccggccuggagcucacccugacgaacaccagcaucaucaaccacaaguucugcaaccuguccgacgcccacaagaagaaccucuacgaccacgcccugaugagcaucaucuccaccuuccaccugagcauccccaacuucaaccaguacgaggccauguccugcgacuucaacgggggcaagaucagcguccaguacaaccucucccacagcuacgccggggacgcggccaaccacugcggcaccaucgccaacggggugcugcagacguucaugcggauggccuggggcggcuccuacaucgcgcuggacagcgggcgcgaccggugggacugcaucaugaccuccuaccaguaccucaucauccagaacaccaccugggaggaccacugccaguucagccgccccucccccaucggcuaccuggggcugcucagccagcggacgcgcgacaucuacaucagccggcgccgccggggcaccuucaccuggacccucuccgacagcgagggcaaggacacgcccgggggcuacugccugacccgguggaugcugaucgaggccgagcucaagugcuucgggaacaccgccguggccaagugcaacgagaagcacgacgaggaguucugcgacaugcugcgccuguucgacuucugcaagcaggccauccagcggcucaaggcgcccgcccagauguccauccagcugaucaacaaggccgucaacgcccugaucaacgaccagcucaucaugaagaaccaccuccgcgacaucaugggcauccccuacugcaacuacagcaaguacugguaccugaaccacaccacgaccgggaagaccucccugcccaagugcuggcuggugagcaacggcuccuaccugaacgagacccacuucagcgacgacaucgagcagcaggccgacaacaugaucacggagaugcuccagaaggaguacauggagcggcagggcaagaccccgcuggggcugguggaccucuucgucuucuccaccagcuucuaccugaucuccaucuuccugcaccuggugaagaucccgacccaccgccacguggucggcaagagcugccccaagccccaccggcucaaccacauggggaucugcuccugcggccuguacgggcagcccggcgugccggugaaguggaagcgcugaggacuaguaauaaggaaacuguaugaaugucugugggcaggaagugaagagauccuucuguaaagguuuuuggaauuaugucugcugaauaauaaacuuuuuugaaauaauaaaucugguagaaaaaugagaucuaaaaaaaaaaaaaaaaaaaaaaaaaaaaaaaaaaaaaaaaaaaaaaaaaaaaaaaaaaaaaaaaaaaaaaaaaaaaaaaaaaaaaaaaaaaaaaaaaaaa

SEQ ID NO: 24160 - RNA, 1788 nt, Artificial Sequence
  mRNA product Design b-4 (A100) comprising derived and/or modified sequence from MOPV/LASV reassortant(IGS-1;Clade IV)__AFY05576__GPCmut2 (opt1)
aggagagucccgcagucggcguccagcggcucugcuuguucgugugugugucguugcaggccuuauucaagcuuaccaugggccagaucgugaccuucuuccaggaggucccccacgugaucgaggaggugaugaacaucguccugaucgcccucagcgugcuggccgugcugaaggggcucuacaacuucgcgaccugcggccuggucgggcuggugacguuccuccugcugugcggccgcuccugcaccaccagccucuacaaggggguguacgagcugcagacccuggagcucaacauggagacgcugaacaugugcaugccgcuguccugcaccaagaacaacagccaccacuacaucauggucggcaacgagaccggccucgagcugacgcugaccaacaccuccaucaucaaccacaaguucugcaaccucagcgacgcccacaagaagaaccuguacgaccacgcccugauguccaucaucagcaccuuccaccucuccauccccaacuucaaccaguacgaggccaugagcugcgacuucaacgggggcaagaucuccgugcaguacaaccugagccacuccuacgccggggacgcggccaaccacugcggcacgguggccaacgggguccugcagaccuucaugcggauggccuggggcggcagcuacaucgcgcucgacuccgggcgcggcaacugggacugcaucaugaccagcuaccaguaccugaucauccagaacaccacgugggaggaccacugccaguucucccggcccagccccaucggguaccugggccuccugucccagcgcacccgggacaucuacaucagccgccggcgccggggcaccuucaccuggacgcugagcgacuccgagggggaggacaccccgggcggguacugccugacccgcuggaugcucaucgaggccgagcugaagugcuucggcaacaccgccguggccaagugcaacgagaagcacgacgaggaguucugcgacaugcugcggcuguucgacuucugcaagcaggccauccagcgccugaaggcgcccgcccagaugagcauccagcugaucaacaaggccgugaacgcccucaucaacgaccagcugaucaugaagaaccaccuccgggacaucauggggauccccuacugcaacuacuccaaguacugguaccucaaccacacgaccaccggccgcaccagccugcccaagugcuggcuggucuccaacggcagcuaccucaacgagacgcacuucuccgacgacaucgagcagcaggccgacaacaugaucaccgagaugcugcagaaggaguacauggagcggcaggggaagacgccccugggccucguggaccuguucguguucagcaccuccuucuaccugaucagcaucuuccugcaccucgucaagaucccgacccaccgccacaucguggggaaguccugccccaagccccaccggcugaaccacaugggcaucugcagcugcgggcuguacaagcagcccggcgugccggucaaguggaagcgcugaggacuaguaauaaggaaacuguaugaaugucugugggcaggaagugaagagauccuucuguaaagguuuuuggaauuaugucugcugaauaauaaacuuuuuugaaauaauaaaucugguagaaaaaugagaucuaaaaaaaaaaaaaaaaaaaaaaaaaaaaaaaaaaaaaaaaaaaaaaaaaaaaaaaaaaaaaaaaaaaaaaaaaaaaaaaaaaaaaaaaaaaaaaaaaaaa

SEQ ID NO: 24161 - RNA, 1788 nt, Artificial Sequence
  mRNA product Design b-4 (A100) comprising derived and/or modified sequence from LASV(LM765-SLE-2012;Clade IV)__AIT17814__GPCmut2 (opt1)
aggagagucccgcagucggcguccagcggcucugcuuguucgugugugugucguugcaggccuuauucaagcuuaccaugggccagaucgugaccuucuuccaggaggucccccacgugaucgaggaggugaugaacaucguccugaucgcccucagcauccuggccgugcugaaggggcucuacaacuucgcgaccugcggccugguggggcuggucacguuccuccugcugugcggccgcuccugcaccaccagccucuacaaggggguguacgagcugcagacccuggagcucaacauggagacgcugaacaugugcaugccgcuguccugcaccaagaacaacagccaccacuacaucauggugggcaacgagaccggccucgagcugacgcugaccaacaccuccaucaucgaccacaaguucugcaaccucagcgacgcccaccggaagaaccuguacgaccacgcccugauguccaucaucagcaccuuccaccucuccauccccaacuucaaccaguacgaggccaugagcugcgacuucaacgggggcaagaucuccguccaguacaaccugagccacuccuacgccaaggacgcggccgaccacugcgggacgguggccaacggcgugcugcagaccuucaugcgcauggccuggggcgggagcuacaucgcgcucgacuccggccgggggcgcugggacugcaucaugaccagcuaccaguaccugaucauccagaacaccacgugggaggaccacugccaguucucccggcccagccccaucggcuaccuggggcuccugucccagcgcacccgggacaucuacaucagccgccggcgccggggcaccuucaccuggacgcugagcgacuccgagggcaaggacacccccgggggcuacugccugacccgcuggaugcucaucgaggccgagcugaagugcuucgggaacaccgccgucgccaagugcaacgagaagcacgacgaggaguucugcgacaugcugcggcuguucgacuucugcaagcaggccauccagcgccugaaggcgcccgcccagaugagcauccagcugaucaacaaggccgugaacgcccucaucaacgaccagcugaucaugaagaaccaccuccgggacaucaugggcauccccuacugcaacuacuccaaguacugguaccucaaccacacgaccaccgggaagaccagccugcccaagugcuggcugguguccaacggcagcuaccucaacgagacgcacuucuccgacgacaucgagcagcaggccgacaacaugaucaccgagaugcugcagaaggaguacauggagcgccagggcaagaccccgcuggggcucgucgaccuguucguguucagcaccuccuucuaccugaucagcaucuuccugcaccucgugaagaucccgacgcaccggcacaucgucggcaagcccugccccaagccccaccgccugaaccacauggggaucugcuccugcggccuguacaagcagccgggggugcccgugaaguggaagcggugaggacuaguaauaaggaaacuguaugaaugucugugggcaggaagugaagagauccuucuguaaagguuuuuggaauuaugucugcugaauaauaaacuuuuuugaaauaauaaaucugguagaaaaaugagaucuaaaaaaaaaaaaaaaaaaaaaaaaaaaaaaaaaaaaaaaaaaaaaaaaaaaaaaaaaaaaaaaaaaaaaaaaaaaaaaaaaaaaaaaaaaaaaaaaaaaa

SEQ ID NO: 24162 - RNA, 1788 nt, Artificial Sequence
  mRNA product Design b-4 (A100) comprising derived and/or modified sequence from LASV(LM776-SLE-2012;Clade IV)__AIT17824__GPCmut2 (opt1)
aggagagucccgcagucggcguccagcggcucugcuuguucgugugugugucguugcaggccuuauucaagcuuaccaugggccagaucgugaccuucuuccaggaggucccccacgugaucgaggaggugaugaacaucguccugaucgcccucagcauccuggccgugcugaaggggcucuacaacuucgcgaccugcggccugguggggcuggucacguuccuccugcugugcggccgcuccugcaccaccagcguguacaaggggguguacgagcuccagacccuggagcugaacauggagacgcucaacaugugcaugccgcuguccugcaccaagaacaacagccaccacuacaucauggucggcaacgagaccggccuggagcucacgcugaccaacaccuccaucaucaaccacaaguucugcaaccugagcgacgcccacaagaagaaccucuacgaccacgcccugauguccaucaucagcaccuuccaccuguccauccccaacuucaaccaguacgaggccaugagcugcgacuucaacgggggcaagaucuccgugcaguacaaccucagccacuccuacgccggggacgcggccaaccacugcggcacgguggccaacgggguccugcagaccuucaugcggauggccuggggcggcagcuacaucgcgcuggacuccgggcacggcaagugggacugcaucaugaccagcuaccaguaccucaucauccagaacaccacgugggaggaccacugccaguucucccgccccagccccaucggguaccugggccugcucucccagcggacccgcgacaucuacaucagccggcgccgccggggcaccuucaccuggacgcucagcgacuccgaggggaaggacaccccgggcggguacugccugacccgguggaugcugaucgaggccgagcucaagugcuucggcaacaccgccguggccaagugcaacgagaagcacgacgaggaguucugcgacaugcugcgccuguucgacuucugcaagcaggccauccagcggcucaaggcgcccgcccagaugagcauccagcugaucaacaaggccgugaacgcccugaucaacgaccagcucaucaugaagaaccaccuccgcgacaucauggggauccccuacugcaacuacuccaaguacugguaccugaaccacacgaccaccggcaagaccagccugcccaagugcuggcuggucuccaacggcagcuaccugaacgagacgcacuucuccgacgacaucgagcagcaggccgacaacaugaucaccgagaugcuccagaaggaguacauggagcggcaggggaagacgccccugggccugguggaccucuucguguucagcaccuccuucuaccugaucagcaucuuccugcaccuggucaagaucccgacccaccgccacaucguggggaaguccugccccaagccccaccggcucaaccacaugggcaucugcagcugcgggcuguacaagcagcccggcgugccgguccgcuggaagcggugaggacuaguaauaaggaaacuguaugaaugucugugggcaggaagugaagagauccuucuguaaagguuuuuggaauuaugucugcugaauaauaaacuuuuuugaaauaauaaaucugguagaaaaaugagaucuaaaaaaaaaaaaaaaaaaaaaaaaaaaaaaaaaaaaaaaaaaaaaaaaaaaaaaaaaaaaaaaaaaaaaaaaaaaaaaaaaaaaaaaaaaaaaaaaaaaa

SEQ ID NO: 24163 - RNA, 1788 nt, Artificial Sequence
  mRNA product Design b-4 (A100) comprising derived and/or modified sequence from LASV(Mad39;Clade IV)__ANH09722__GPCmut2 (opt1)
aggagagucccgcagucggcguccagcggcucugcuuguucgugugugugucguugcaggccuuauucaagcuuaccaugggccagaucgugaccuucuuccaggaggucccccacgugaucgaggaggugaugaacaucguccugaucgcccucagcauccuggccgugcugaaggggcucuacaacguggcgaccugcggccugaucgggcuggucacguuccuccugcugugcggccgcuccugcaccaccacccucuacaaggggguguacgagcugcaggcccuggagcucaacauggagacgcugaacaugugcaugccgcugagcugcaccaagaacaacucccaccacuacauccgggugggcaacgagaccggccucgagcugacgcugaccaacaccagccucaucaaccacaaguucugcaaccuguccgacgcccacaagaagaaccuguacgaccacgcccucaugagcaucaucuccaccuuccaccugagcauccccaacuucaaccaguacgaggccauguccugcgacuucaacgacgggaagaucagcguccaguacaaccugucccacacguacgcgggcgacaccgccaaccacugcgggaccguggccaacggcgugcuccagaccuucaugcgcauggccuggggcgggagcuacaucgcgcuggacuccggccgcgggggcugggacugcaucaugacgagcuaccaguaccugaucauccagaacaccaccugggaggaccacugccaguucucccggcccagccccaucggguaccucggccugcugucccagcggacccgcgacaucuacaucagccggcgccgccggggcacguucaccuggacccuguccgacagcgaggggaaggacaccccgggcggguacugccucacgcgguggaugcugaucgaggccgagcugaagugcuucggcaacaccgccgucgccaagugcaacgagaagcacgacgaggaguucugcgacaugcuccgccuguucgacuucugcaagcaggccauccagcggcugaaggcgcccgcccagaugagcauccagcucaucaacaaggccgugaacgcccugaucaacgaccagcugaucaugaagaaccaccuccgcgacaucauggggauccccuacugcaacuacuccaaguacugguaccugaaccacaccgugaccggcaagacgagccugcccaagugcuggcucgucuccaacggcagcuaccugaacgagacccacuucuccgacgacaucgagcagcaggccgacaacaugaucaccgagaugcugcagaaggaguacauggagcggcaggggaagacgccccucggccugguggaccuguucguguucagcaccuccuucuaccugaucagcaucuuccuccaccuggucaagaucccgacccaccgccacgugguggggaagcccugccccaagccccaccggcugaaccacaugggcaucugcuccugcggguucuacaagcagccgggcguccccgugcgcuggaagcggugaggacuaguaauaaggaaacuguaugaaugucugugggcaggaagugaagagauccuucuguaaagguuuuuggaauuaugucugcugaauaauaaacuuuuuugaaauaauaaaucugguagaaaaaugagaucuaaaaaaaaaaaaaaaaaaaaaaaaaaaaaaaaaaaaaaaaaaaaaaaaaaaaaaaaaaaaaaaaaaaaaaaaaaaaaaaaaaaaaaaaaaaaaaaaaaaa

SEQ ID NO: 24164 - RNA, 1788 nt, Artificial Sequence
  mRNA product Design b-4 (A100) comprising derived and/or modified sequence from LASV(Z0947-SLE-2011;Clade IV)__AIT17840__GPCmut2 (opt1)
aggagagucccgcagucggcguccagcggcucugcuuguucgugugugugucguugcaggccuuauucaagcuuaccaugggccagaucgugaccuucuuccaggaggucccccacgugaucgaggaggugaugaacaucguccugaucgcccucagcauccuggccgugcugaaggggcucuacaacuucgcgaccugcggccugguggggcuggucacguuccuccugcugugcggccgcuccugcaccaucagccucuacaaggggguguacgagcugcagacccuggagcucaacauggagacccugaacaugugcaugccgcuguccugcaccaagaacaacagccaccacuacaucauggugggcaacgagaccggccucgagcugacccugacgaacaccuccaucaucaaccacaaguucugcaaccucagcgacgcccacaagaagaaccuguacgaccacgcccugauguccaucaucagcaccuuccaccucuccauccccaacuucaaccaguacgaggccaugagcugcgacuucaacgggggcaagaucuccguccaguacaaccugagccacuccuacgccggggacgcggccaaccacugcggcaccguggccaacggggugcugcagacguucaugcggauggccuggggcggcagcuacaucgcgcucgacuccgggcgcgaccggugggacugcaucaugaccagcuaccaguaccugaucauccagaacaccaccugggaggaccacugccaguucucccgccccagccccaucggcuaccuggggcuccugucccagcggacgcgcgacaucuacaucagccggcgccgccggggcaccuucaccuggacccugagcgacuccgagggcaaggacacgcccgggggcuacugccugacccgguggaugcucaucgaggccgagcugaagugcuucgggaacaccgccgucgccaagugcaacgagaagcacgacgaggaguucugcgacaugcugcgccucuucgacuucugcaagcaggccauccagcggcugaaggcgcccgcccagaugagcauccagcugaucaacaaggccgugaacgcccucaucaacgaccagcugaucaugaagaaccaccuccgcgacaucaugggcauccccuacugcaacuacuccaaguacugguaccugaaccacaccacgaccgggaagaccagccugcccaagugcuggcugguguccaacggcagcuaccucaacgagacccacuucuccgacgacaucgagcagcaggccgacaacaugaucacggagaugcugcagaaggaguacauggagcggcagggcaagaccccgcuggggcucgucgaccuguucguguucagcaccuccuucuaccugaucagcaucuuccugcaccucgugaagaucccgacccaccgccacaucgucggcaagcccugccccaagccccaccggcugaaccacauggggaucugcuccugcggccuguacaagcagccgggggugcccgugaaguggaagcgcugaggacuaguaauaaggaaacuguaugaaugucugugggcaggaagugaagagauccuucuguaaagguuuuuggaauuaugucugcugaauaauaaacuuuuuugaaauaauaaaucugguagaaaaaugagaucuaaaaaaaaaaaaaaaaaaaaaaaaaaaaaaaaaaaaaaaaaaaaaaaaaaaaaaaaaaaaaaaaaaaaaaaaaaaaaaaaaaaaaaaaaaaaaaaaaaaa

SEQ ID NO: 24165 - RNA, 1788 nt, Artificial Sequence
  mRNA product Design b-4 (A100) comprising derived and/or modified sequence from LASV(Josiah;Clade IV)__NP_694870__GPCmut2 (opt1)
aggagagucccgcagucggcguccagcggcucugcuuguucgugugugugucguugcaggccuuauucaagcuuaccaugggccagaucgugaccuucuuccaggaggucccccacgugaucgaggaggugaugaacaucguccugaucgcccucagcgugcuggccgugcugaaggggcucuacaacuucgcgaccugcggccuggucgggcuggugacguuccuccugcugugcggccgcuccugcaccaccagccucuacaaggggguguacgagcugcagacccuggagcucaacauggagacgcugaacaugugcaugccgcuguccugcaccaagaacaacagccaccacuacaucauggucggcaacgagaccggccucgagcugacccugacgaacaccuccaucaucaaccacaaguucugcaaccucagcgacgcccacaagaagaaccuguacgaccacgcccugauguccaucaucagcaccuuccaccucuccauccccaacuucaaccaguacgaggccaugagcugcgacuucaacgggggcaagaucuccgugcaguacaaccugagccacuccuacgccggggacgcggccaaccacugcggcaccguggccaacgggguccugcagacguucaugcggauggccuggggcggcagcuacaucgcgcucgacuccgggcgcggcaacugggacugcaucaugaccagcuaccaguaccugaucauccagaacaccaccugggaggaccacugccaguucucccggcccagccccaucggguaccugggccuccugucccagcgcacgcgggacaucuacaucagccgccggcgccggggcaccuucaccuggacccugagcgacuccgaggggaaggacacgccgggcggguacugccucacccgcuggaugcugaucgaggccgagcugaagugcuucggcaacaccgccguggccaagugcaacgagaagcacgacgaggaguucugcgacaugcuccggcuguucgacuucugcaagcaggccauccagcgccugaaggcgcccgcccagaugagcauccagcucaucaacaaggccgugaacgcccugaucaacgaccagcugaucaugaagaaccaccuccgggacaucauggggauccccuacugcaacuacuccaaguacugguaccugaaccacaccacgaccggccgcaccagccugcccaagugcuggcucgucuccaacggcagcuaccugaacgagacccacuucuccgacgacaucgagcagcaggccgacaacaugaucacggagaugcugcagaaggaguacauggagcggcaggggaagaccccgcucggccugguggaccuguucguguucagcaccuccuucuaccugaucagcaucuuccuccaccuggucaagauccccacccaccgccacaucguggggaaguccugccccaagccccaccggcugaaccacaugggcaucugcagcugcgggcucuacaagcagccgggcgugcccgucaaguggaagcgcugaggacuaguaauaaggaaacuguaugaaugucugugggcaggaagugaagagauccuucuguaaagguuuuuggaauuaugucugcugaauaauaaacuuuuuugaaauaauaaaucugguagaaaaaugagaucuaaaaaaaaaaaaaaaaaaaaaaaaaaaaaaaaaaaaaaaaaaaaaaaaaaaaaaaaaaaaaaaaaaaaaaaaaaaaaaaaaaaaaaaaaaaaaaaaaaaa

SEQ ID NO: 24166 - RNA, 1785 nt, Artificial Sequence
  mRNA product Design b-4 (A100) comprising derived and/or modified sequence from LASV(LP;Clade I)__AAF86701__GPCmut2 (opt1)
aggagagucccgcagucggcguccagcggcucugcuuguucgugugugugucguugcaggccuuauucaagcuuaccaugggccagaucaucaccuucuuccaggaggugccccacgucaucgaggaggugaugaacaucgugcugaucgcccucagccugcuggccauccucaaggggcuguacaacaucgcgaccugcggcaucaucgggcuggucgccuuccucuuccugugcggcaaguccugcagccugacgcucaagggcggguacgagcugcagacccuggagcucaacauggagacccugaacaugugcaugccgcuguccugcaccaagaacagcucccaccacuacauccgcgugggcaacgagacggggcucgagcugacccugaccaacaccagcaucaucaaccacaaguucugcaaccucuccgacgcccacaagaagaaccuguacgaccacgcccugaugagcaucaucuccacguuccaccucagcauccccaacuucaaccaguacgaggccauguccugcgacuucaacggcgggaagaucagcgugcaguacaaccugucccacagcuacgcgggcgacgccgccgagcacugcgggaccgucgccaacggcgugcugcagaccuucaugcggauggcguggggcgggcgcuacaucgcccucgacuccggcaaggggaacugggacugcaucaugaccagcuaccaguaccugaucauccagaacacgaccugggaggaccacugccaguucucccggcccagccccaucggcuaccugggccuccugucccagcgcacccgggacaucuacaucagccgccggcgccgggggaccuucacguggacccugagcgacuccgagggcaacgagacccccgggggcuacugccucacccgcuggaugcugaucgaggccgagcugaagugcuucgggaacacggccguggccaagugcaacgagaagcacgacgaggaguucugcgacaugcuccggcuguucgacuucugcaagcaggcgauccgccggcugaaggccccggcccagaugagcauccagcucaucaacaaggccgucaacgcccugaucaacgaccagcugaucaugaagaaccaccuccgcgacaucaugggcauccccuacugcaacuacuccaaguacugguaccugaaccacaccagcuccggccggaccagccugcccaagugcuggcucaucuccaacgggagcuaccugaacgagacccaguucuccgacgacaucgagcagcaggcggacaacaugaucacggagaugcugcagaaggaguacaucgagcgccagggcaagaccccgcucgggcugguggacaucuucaucuucagcaccuccuucuaccugaucagcaucuuccugcaccucaucaagauccccacccaccggcacaucgugggcaagcccugccccaagccgcaccgccugaaccacaugggggucugcuccugcggccuguacaagcaccccggcgugcccacgaaguggaagcggugaggacuaguaauaaggaaacuguaugaaugucugugggcaggaagugaagagauccuucuguaaagguuuuuggaauuaugucugcugaauaauaaacuuuuuugaaauaauaaaucugguagaaaaaugagaucuaaaaaaaaaaaaaaaaaaaaaaaaaaaaaaaaaaaaaaaaaaaaaaaaaaaaaaaaaaaaaaaaaaaaaaaaaaaaaaaaaaaaaaaaaaaaaaaaaaaa

SEQ ID NO: 24167 - RNA, 1785 nt, Artificial Sequence
  mRNA product Design b-4 (A100) comprising derived and/or modified sequence from LASV(803213;Clade II)__AAF86703__GPCmut2 (opt1)
aggagagucccgcagucggcguccagcggcucugcuuguucgugugugugucguugcaggccuuauucaagcuuaccaugggccagaucaucaccuucuuccaggaggugccccacgucaucgaggaggugaugaacaucgugcugaucgcccucagccugcuggccauccucaaggggaucuacaacgucgcgaccugcggccuguucgggcugaucuccuuccuccugcugugcggccgcagcugcuccgugacguacaaggggguguacgagcuccagacccuggagcugaacauggccaaccucaacaugugcaugccgcugagcugcaccaagaacaacucccaccacuacaucauggucggcaacgagaccggccuggagcucacgcugaccaacaccagcaucaucaaccacaaguucugcaaccuguccgacgcccacaagaagaaccucuacgaccacgcccugaugagcaucaucuccaccuuccaccugagcauccccaacuucaaccaguacgaggccauguccugcgacuucaacgggggcaagaucagcgugcaguacaaccucucccacagcuucgcgguggacgccgccaaccacugcgggacgaucgccaacggcguccugcagaccuucaugcggauggcguggggcggguccuacaucgcccuggacagcggcaaggggaacugggacugcaucaugaccuccuaccaguaccucaucauccagaacaccacgugggaggaccacugccaguucagccgccccucccccaucggcuaccuggggcugcucagccagcggacccgcgacaucuacaucagccggcgccggcgcggcaccuucaccuggacgcuguccgacagcgagggcaacgaggcccccgggggcuacugccugacccgguggaugcucaucgaggccgagcugaagugcuucgggaacaccgccguggcgaagugcaacgagaagcacgacgaggaguucugcgacaugcugcgccucuucgacuucugcaagcaggccaucaagcggcugaagaccccggcccagauguccauccagcugaucaacaaggccgugaacgcccucaucaacgaccagcugaucaugaagaaccaccuccgcgacaucaugggcauccccuacugcaacuacagccgguacugguaccugaaccacacggucaccgggaagaccucccugccccgcugcuggcuggugagcaacggcuccuaccucaacgagacccacuucagcgacgacaucgagcagcaggcggacaacaugaucacggagaugcugcagaaggaguacauggaccggcagggcaagaccccgcuggggcucguggaccuguucgucuucuccaccagcuucuaccugaucuccaucuuccugcaccucgugaagauccccacccaccgccacaucgugggcaagcccugccccaagccgcaccggcugaaccacauggggaucugcagcugcggccuguacaagcaccccgggguccccgugaaguggaagcgcugaggacuaguaauaaggaaacuguaugaaugucugugggcaggaagugaagagauccuucuguaaagguuuuuggaauuaugucugcugaauaauaaacuuuuuugaaauaauaaaucugguagaaaaaugagaucuaaaaaaaaaaaaaaaaaaaaaaaaaaaaaaaaaaaaaaaaaaaaaaaaaaaaaaaaaaaaaaaaaaaaaaaaaaaaaaaaaaaaaaaaaaaaaaaaaaaa

SEQ ID NO: 24168 - RNA, 1785 nt, Artificial Sequence
  mRNA product Design b-4 (A100) comprising derived and/or modified sequence from LASV(GA391;Clade III)__CAA36645__GPCmut2 (opt1)
aggagagucccgcagucggcguccagcggcucugcuuguucgugugugugucguugcaggccuuauucaagcuuaccaugggccagaucgugaccuucuuccaggaggucccccacgugaucgaggaggugaugaacaucguccugaucgcccucagcauccuggccauccugaaggggcucuacaacguggcgaccugcggccugaucgggcuggugacguuccuccugcuguccggccgcagcugcucccucaucuacaaggggaccuacgagcugcagacccuggagcucaacauggagacccugaacaugugcaugccgcugagcugcacgaagaacaacucccaccacuacauccgggucggcaacgagaccggccucgagcugacccugaccaacacgagcauccucaaccacaaguucugcaaccuguccgacgcccacaagcgcaaccuguacgaccacagccucauguccaucaucagcaccuuccaccuguccauccccaacuucaaccaguacgaggccaugagcugcgacuucaacgggggcaagaucaccgugcaguacaaccugucccacagcuucgccguggacgccgcggggcacugcggcacccucgccaacgggguccugcagacguucaugcggauggccuggggcggcuccuacaucgcccuggacagcgggcgcggcaacugggacugcaucaugaccuccuaccaguaccucaucauccagaacaccaccugggacgaccacugccaguucagccggcccucccccaucggguaccugggccugcucagccagcgcacgcgggacaucuacaucagccgccggcgccggggcaccuucaccuggacccuguccgacagcgaggggaacgagacgccgggcggguacugccugacccgcuggaugcucaucgaggcggagcugaagugcuucggcaacaccgccguggccaagugcaacgagaagcacgacgaggaguucugcgacaugcugcggcuguucgacuucugcaagcaggccauccgccggcugaagacccccgcccagauguccauccagcugaucaacaaggcggugaacgcccucaucaacgaccagcugaucaugaagaaccaccuccgcgacaucauggggauccccuacugcaacuacagccgguacugguaccucaaccacacguccaccggcaagaccagccugccccgcugcuggcugaucuccaacggcagcuaccucaacgagaccaaguucuccgacgacaucgagcagcaggccgacaacaugaucacggagaugcugcagaaggaguacaucgaccggcaggggaagaccccgcugggccuggucgaccucuucguguucagcaccuccuucuaccugaucagcaucuuccugcaccucgugaagauccccacccaccgccacaucgucgggaagcccugccccaagccgcaccggcugaaccacaugggcaucugcuccugcgggcuguacaagcagcccggcgugcccgugcgcuggaagcgcugaggacuaguaauaaggaaacuguaugaaugucugugggcaggaagugaagagauccuucuguaaagguuuuuggaauuaugucugcugaauaauaaacuuuuuugaaauaauaaaucugguagaaaaaugagaucuaaaaaaaaaaaaaaaaaaaaaaaaaaaaaaaaaaaaaaaaaaaaaaaaaaaaaaaaaaaaaaaaaaaaaaaaaaaaaaaaaaaaaaaaaaaaaaaaaaaa

SEQ ID NO: 24169 - RNA, 1788 nt, Artificial Sequence
  mRNA product Design b-4 (A100) comprising derived and/or modified sequence from LASV(AV;Clade V)__CCA30314__GPCmut2 (opt1)
aggagagucccgcagucggcguccagcggcucugcuuguucgugugugugucguugcaggccuuauucaagcuuaccaugggccagaucgugaccuucuuccaggaggucccccacgugaucgaggaggugaugaacaucguccugaucgcccucagcauccuggccgugcugaaggggcucuacaacaucgcgaccugcggccugaucgggcugaucacguuccuccugcugugcggccgcuccugcagcuccaaccucuacaaggggguguacgagcugcagagccuggaccucaacauggagacccugaacaugugcaugccgcuguccugcaccaagaacaacagccaccacuacauccgggucggcaacgacaccggccucgagcugacgcugaccaacaccuccauccucaaccacaaguucugcaaccugagcgacgcccacaagaaggaccuguacgaccacgcccucauguccaucaucagcaccuuccaccuguccauccccaacuucaaccaguacgaggccaugagcugcgacuucaacgggggcaagaucuccgugcaguacaaccugagccacuccuacgccaucgacgcggccaaccacugcgggacgguggccaacggcauccuccagaccuucaugcgcauggccuggggcgggagcuacaucgcgcuggacuccggccgggggaacugggacugcaucaugaccagcuaccaguaccugaucauccagaacaccacgugggagaaccacugccaguucucccgccccagccccaucggcuaccucgggcugcugagccagcggacccgcgacaucuacaucucccggcgccggcgcggcaccuucaccuggacgcucagcgacuccgagggcaacgccacccccgggggcuacugccugacccgguggaugcugaucgaggccgagcucaagugcuucgggaacaccgccgucgccaagugcaacgagaagcacgacgaggaguucugcgacaugcugcgccuguucgacuucugcaagcaggcgaucagccggcucaaguccccggcccagaugagcauccagcugaucaacaaggccgugaacgcccugaucaacgaccagcucaucaugaagaaccaccuccgcgacaucaugggcauccccuacugcaacuacuccaaguacugguaccugaaccacacgaucaccgggaagaccagccugcccaagugcuggcugguguccaacggcagcuaccugaacgagacccacuucuccgacgacaucgagcagcaggccgacaacaugaucacggagaugcuccagaaggaguacauggagcggcagggcaagaccccgcuggggcuggucgaccuguucguguucagcaccuccuucuaccucaucagcaucuuccugcgccuggugaagauccccacccaccggcacaucgucggcaagcccugccccaagccgcaccgccucaaccacauggggaucugcuccugcggccuguacaagcagcccggggugcccgugcgguggaagcgcugaggacuaguaauaaggaaacuguaugaaugucugugggcaggaagugaagagauccuucuguaaagguuuuuggaauuaugucugcugaauaauaaacuuuuuugaaauaauaaaucugguagaaaaaugagaucuaaaaaaaaaaaaaaaaaaaaaaaaaaaaaaaaaaaaaaaaaaaaaaaaaaaaaaaaaaaaaaaaaaaaaaaaaaaaaaaaaaaaaaaaaaaaaaaaaaaa

SEQ ID NO: 24170 - RNA, 1785 nt, Artificial Sequence
  mRNA product Design b-4 (A100) comprising derived and/or modified sequence from LASV(Togo/2016/7082;Clade VI)__AMR44577__GPCmut2 (opt1)
aggagagucccgcagucggcguccagcggcucugcuuguucgugugugugucguugcaggccuuauucaagcuuaccaugggccagaucaucaccuucuuccaggaggugccccacgucaucgaggaggugaugaacaucgugcugaucgcccucagccugcuggccauccucaagggggucuacaacguggcgaccugcggcaucaucgggcuggugacguuccuguuccucugcggccgcuccugcagccugaucuacaagggguccuacgagcugcagacccucgagcugaacauggagacccugaacaugugcaugccgcucagcugcaccaagaacuccagccaccacuacauccgggucggcaacgagacgggccuggagcugacccucaccaacaccuccaucaucaaccacaaguucugcaaccugagcgacgcccacaagcgcaaccuguacgaccacgcccucauguccauccugagcacguuccaccuguccauccccaacuucaaccaguacgaggccaugagcugcgacuucaacgggggcaagaucuccgugcaguacaaccucagccacgccuacgcgguggacgccgccgagcacugcgggaccgucgccaacggcgugcugcagaccuucaugcggauggcguggggcggguccuacaucgcccuggacagcggccgcgggaacugggacugcaucaugaccuccuaccaguaccucaucauccagaacacgaccugggaggaccacugccaguucagccggcccucccccaucggcuaccuggggcugcucagccagcgcacccgggacaucuacaucagccgccggcgccggggcaccuucacguggacccuguccgacagcgagggcaacgagacccccgggggcuacugccugacccgcuggaugcucaucgaggccgagcugaagugcuucgggaacacggccguggccaagugcaacgagaagcacgacgaggaguucugcgacaugcugcggcuguucgacuucugcaagcaggcgauccagcgccugaaguccccggcccagaugagcauccagcugaucaacaaggccgucaacgcccucaucaacgaccagcugaucaugaagaaccaccuccgggacaugaugggcauccccuacugcaacuacuccaaguacugguaccucaaccacaccagcuccgggcgcaccagccugcccaagugcuggcugguguccaacggcagcuaccucaacgagacccacuucuccgacgacaucgagcagcaggccgacaacaugaucacggagaugcugcagaaggaguacaucgaccggcagggcaagaccccgcuggggcucguggaccuguucgucuucagcaccuccuucuaccugaucagcaucuuccugcaccucaucaagauccccacccaccgccacaucgugggcaagcccugccccaagccgcaccggcugaaccacauggggaucugcuccugcggccuguacaagcagcccggggugcccacgcgcuggaagcggugaggacuaguaauaaggaaacuguaugaaugucugugggcaggaagugaagagauccuucuguaaagguuuuuggaauuaugucugcugaauaauaaacuuuuuugaaauaauaaaucugguagaaaaaugagaucuaaaaaaaaaaaaaaaaaaaaaaaaaaaaaaaaaaaaaaaaaaaaaaaaaaaaaaaaaaaaaaaaaaaaaaaaaaaaaaaaaaaaaaaaaaaaaaaaaaaa

SEQ ID NO: 24171 - RNA, 1785 nt, Artificial Sequence
  mRNA product Design b-4 (A100) comprising derived and/or modified sequence from LASV(KAK-428;Clade n.d. (VII))__ANH09740__GPCmut2 (opt1)
aggagagucccgcagucggcguccagcggcucugcuuguucgugugugugucguugcaggccuuauucaagcuuaccaugggccagaucgugaccuucuuccaggaggucccccacgugaucgaggaggugaugaacaucguccugaucgcccucagccugcuggccauccucaaggggcuguacaacuucgcgaccugcggcgugaucgggcugaucacguuccuccugcugugcggccgcuccugcagcgccaccuacaaggggcaguacgagcuccagacccuggagcugaacauggagucccucaacaugugcaugccgcugagcugcaccaagaacaacucccaccacuacauccgggccggcaacaacacgggccuggagcucacccugaccaacaccagcaucaucucccacaaguucugcaaccugagcgacgcccacaagaagaaccucuacgaccacacgcugauguccaucaucaccaccuuccaccugagcauccccaacuucaaccaguacgaggccauguccugcgacuucaacgggggcaagaucagcauccaguacaaccucucccacagcuacgcgggggacgccgcccagcacugcggcaccguggccaacgggguccugcagacguucaugcgcauggcguggggcggcuccuaccuggcccucgacagcgggcggcgcggcugggacugcaucaucuccagcuaccaguaccugaucauccagaacaccaccugggacgaccacugccaguucucccggcccagccccaucggguaccugggcuucgugagccagaagacccgcgacaucuacaucucccggcgccggcgcggcacguucaccuggacccucagcgacuccgaggggcacgacaugccgggcggguacugccugacccgguggaugcugaucgaggccgaccucaagugcuucggcaacacggccguggccaagugcaacgagaagcacgacgaggaguucugcgacauguggcgccuguucgacuucugcaagcaggcgauccagcggcugaaggcccccgcccagaugaacauccagcucaucaacaaggccgucaacgcccugaucaacgaccagcugaugaugaagaaccaccuccgcgacaucauggggauccccuacugcaacuacagcaaguucugguaccugaacaacaccaccaccggccggacgucccugccccgcugcuggcucaucagcaacggcuccuaccugaacgagacccacuucagcgacgacaucgagcagcaggcggacaacaugaucaccgagaugcugcagaaggaguacauggaccggcaggggaagaccccgcucggccugguggaccuguucguguucuccacgagcuucuaccucaucaccaucuuccugcaccuggucaagauccccacccaccgccacaucguggggaagcccugccccaagccgcaccggcugaaccacaugggcaucugcuccugcgggcucuacaagcagcccggcgugcccguccgcuggaagcggugaggacuaguaauaaggaaacuguaugaaugucugugggcaggaagugaagagauccuucuguaaagguuuuuggaauuaugucugcugaauaauaaacuuuuuugaaauaauaaaucugguagaaaaaugagaucuaaaaaaaaaaaaaaaaaaaaaaaaaaaaaaaaaaaaaaaaaaaaaaaaaaaaaaaaaaaaaaaaaaaaaaaaaaaaaaaaaaaaaaaaaaaaaaaaaaaa

SEQ ID NO: 24172 - RNA, 1785 nt, Artificial Sequence; identical to SEQ ID NO: 24166
  mRNA product Design b-4 (A100) comprising derived and/or modified sequence from LASV(Pinneo-NIG-1969;Clade I)__AIT17836__GPCmut2 (opt1)

SEQ ID NO: 24173 - RNA, 1785 nt, Artificial Sequence
  mRNA product Design b-4 (A100) comprising derived and/or modified sequence from LASV(ISTH0009-NIG-2011;Clade II)__AIT17404__GPCmut2 (opt1)
aggagagucccgcagucggcguccagcggcucugcuuguucgugugugugucguugcaggccuuauucaagcuuaccaugggccagaucaucaccuucuuccaggaggugccccacgucaucgaggaggugaugaacaucgugcugaucgcccucagccugcuggccauccucaaggggaucuacaacgucgcgaccugcggccuguucgggcugguguccuuccuccugcugugcggccgcagcugcuccacgaccuacaaggggguguacgagcuccagacccuggagcuggacauggccagccucaacaugugcaugccgcuguccugcaccaagaacaacagccaccacuacaucauggucggcaacgagacgggccuggagcucacccugaccaacaccuccaucaucaaccacaaguucugcaaccugagcgacgcccacaagaagaaccucuacgaccacgcccugauguccaucaucagcacguuccaccuguccauccccaacuucaaccaguacgaggccaugagcugcgacuucaacgggggcaagaucuccgugcaguacaaccucagccacgcguacgccguggacgccgccaaccacugcgggaccaucgcgaacggcguccugcagaccuucaugcggauggccuggggcggguccuacaucgcccuggacagcggcaagggguccugggacugcaucaugaccagcuaccaguaccucaucauccagaacacgaccugggaggaccacugccaguucucccgccccagccccaucggcuaccuggggcugcucagccagcggacccgcgacaucuacaucucccggcgccggcgcggcaccuucacguggacccugagcgacuccgagggcaacgagacccccgggggcuacugccugacccgguggaugcucaucgaggccgagcugaagugcuucgggaacacggccguggcgaagugcaacgagaagcacgacgaggaguucugcgacaugcugcgccucuucgacuucugcaagcaggccauccggcgccugaagaccccggcccagaugagcauccagcugaucaacaaggccgugaacgcccucaucaacgaccagcugaucaugaagaaccaccuccgggacaucaugggcauccccuacugcaacuacuccaaguacugguaccugaaccacaccgucaccgggaagacgagccugccccgcugcuggcugguguccaacggcagcuaccucaacgagacccacuucuccgacgacaucgagcagcaggcggacaacaugaucaccgagcugcugcagaaggaguacauggaccggcagggcaagaccccgcucgggcugguggaccuguucgucuucagcacguccuucuaccugaucagcaucuuccuccaccugaucaagauccccacccaccgccacaucaccggcaagcccugccccaagccgcaccggcugaaccacauggggaucugcuccugcggccucuacaagcaccccggggugcccgugaaguggaagcgcugaggacuaguaauaaggaaacuguaugaaugucugugggcaggaagugaagagauccuucuguaaagguuuuuggaauuaugucugcugaauaauaaacuuuuuugaaauaauaaaucugguagaaaaaugagaucuaaaaaaaaaaaaaaaaaaaaaaaaaaaaaaaaaaaaaaaaaaaaaaaaaaaaaaaaaaaaaaaaaaaaaaaaaaaaaaaaaaaaaaaaaaaaaaaaaaaa

SEQ ID NO: 24174 - RNA, 1785 nt, Artificial Sequence
  mRNA product Design b-4 (A100) comprising derived and/or modified sequence from LASV(ISTH2010-NIG-2012;Clade II)__AIT17482__GPCmut2 (opt1)
aggagagucccgcagucggcguccagcggcucugcuuguucgugugugugucguugcaggccuuauucaagcuuaccaugggccagaucaucaccuucuuccaggaggugccccacgucaucgaggaggugaugaacaucgugcugaucgcccucagccugcuggccauccucaaggggaucuacaacgucgcgaccugcggccuguucgggcugguguccuuccuccugcugugcggccgcagcugcuccacgaccuacaaggggguguacgagcuccagacccuggagcuggacauggccagccucaacaugugcaugccgcuguccugcaccaagaacaacagccaccacuacaucauggucggcaacgagacgggccuggagcucacccugaccaacaccuccaucaucaaccacaaguucugcaaccugagcgacgcccacaagaagaaccucuacgaccacgcccugauguccaucaucagcacguuccaccuguccauccccaacuucaaccaguacgaggccaugagcugcgacuucaacgggggcaagaucuccgugcaguacaaccucagccacgcguacgccguggacgccgccaaccacugcgggaccaucgcgaacggcguccugcagaccuucaugcggauggccuggggcggguccuacaucgcccuggacagcggcaagggguccugggacugcaucaugaccagcuaccaguaccucaucauccagaacaucacgugggaggaccacugccaguucucccgccccagccccaucggcuaccuggggcugcucagccagcggacccgcgacaucuacaucucccggcgccggcgcggcaccuucaccuggacgcugagcgacuccgagggcaacgagacccccgggggcuacugccugacccgguggaugcucaucgaggccgagcugaagugcuucgggaacaccgccguggcgaagugcaacgagaagcacgacgaggaguucugcgacaugcugcgccucuucgacuucugcaagcaggccauccggcgccugaagacgccggcccagaugagcauccagcugaucaacaaggccgugaacgcccucaucaacgaccagcugaucaugaagaaccaccuccgggacaucaugggcauccccuacugcaacuacuccaaguacugguaccugaaccacaccgucaccgggaagaccagccugccccgcugcuggcugguguccaacggcagcuaccucaacgagacgcacuucuccgacgacaucgagcagcaggcggacaacaugaucaccgagcugcugcagaaggaguacaucgaccggcagggcaagaccccgcucgggcugguggaccuguucgucuucagcaccuccuucuaccugaucagcaucuuccuccaccuggugaagauccccacgcaccgccacguggucggcaagcccugccccaagccgcaccggcugaaccacauggggaucugcuccugcggccucuacaagcaccccggggugcccgugaaguggaagcgcugaggacuaguaauaaggaaacuguaugaaugucugugggcaggaagugaagagauccuucuguaaagguuuuuggaauuaugucugcugaauaauaaacuuuuuugaaauaauaaaucugguagaaaaaugagaucuaaaaaaaaaaaaaaaaaaaaaaaaaaaaaaaaaaaaaaaaaaaaaaaaaaaaaaaaaaaaaaaaaaaaaaaaaaaaaaaaaaaaaaaaaaaaaaaaaaaa

SEQ ID NO: 24175 - RNA, 1785 nt, Artificial Sequence
  mRNA product Design b-4 (A100) comprising derived and/or modified sequence from LASV(Lassa virus/H.sapiens-wt/NGA/2015/ISTH_0543;Clade II)__AVO03639__GPCmut2 (opt1)
aggagagucccgcagucggcguccagcggcucugcuuguucgugugugugucguugcaggccuuauucaagcuuaccaugggccagaucaucaccuucuuccaggaggugccccacgucaucgaggaggugaugaacaucgugcugaucgcccucagccugcuggccauccucaaggggaucuacaacgucgcgaccugcggccuguucgggcugguguccuuccuccugcugugcggccgcagcugcuccacgaccuacaaggggguguacgagcuccagacccuggagcuggacauggccaaccucaacaugugcaugccgcugagcugcaccaagaacaacucccaccacuacaucauggucggcaacgagacgggccuggagcucacccugaccaacaccagcaucaucaaccacaaguucugcaaccuguccgacgcccacaagaagaaccucuacgaccacgcccugaugagcaucaucuccacguuccaccugagcauccccaacuucaaccaguacgaggccauguccugcgacuucaacgggggcaagaucagcgugcaguacaaccucucccacaccuacgcgguggacgccgccaaccacugcgggaccaucgccaacggcguccugcagaccuucaugcggauggcguggggcgggagcuacaucgcccuggacuccggcaaggggagcugggacugcaucaugacguccuaccaguaccucgugauccagaacaccaccugggaggaccacugccaguucagccgccccucccccaucggcuaccuggggcugcucagccagcggacccgcgacaucuacaucagccggcgccggcgcggcacguucaccuggacccuguccgacagcgagggcaacgagacccccgggggcuacugccugacgcgguggaugcucaucgaggccgagcugaagugcuucgggaacaccgccguggccaagugcaacgagaagcacgacgaggaguucugcgacaugcugcgccucuucgacuucugcaagcaggcgauccggcgccugaagaccccggcccagauguccauccagcugaucaacaaggccgucaacgcccucaucaacgaccagcugaucaugaagaaccaccuccgggacaucaugggcauccccuacugcaacuacagcaaguacugguaccugaaccacaccgugacggggaagaccucccugccccgcugcuggcuggugagcaacggcuccuaccucaacgagacccacuucagcgacgacaucgagcagcaggccgacaacaugaucaccgagcugcugcagaaggaguacaucgaccggcagggcaagacgccgcucgggcuggucgaccuguucguguucuccaccagcuucuaccugaucuccaucuuccuccaccuggugaagauccccacccaccgccacaucaccggcaagcccugccccaagccgcaccggcugaaccacauggggaucugcagcugcggccucuacaagcaccccgggguccccgugaaguggaagcgcugaggacuaguaauaaggaaacuguaugaaugucugugggcaggaagugaagagauccuucuguaaagguuuuuggaauuaugucugcugaauaauaaacuuuuuugaaauaauaaaucugguagaaaaaugagaucuaaaaaaaaaaaaaaaaaaaaaaaaaaaaaaaaaaaaaaaaaaaaaaaaaaaaaaaaaaaaaaaaaaaaaaaaaaaaaaaaaaaaaaaaaaaaaaaaaaaa

SEQ ID NO: 24176 - RNA, 1785 nt, Artificial Sequence
  mRNA product Design b-4 (A100) comprising derived and/or modified sequence from LASV(Lassa virus/H.sapiens-wt/NGA/2016/ISTH_0009;Clade II)__AVO03571__GPCmut2 (opt1)
aggagagucccgcagucggcguccagcggcucugcuuguucgugugugugucguugcaggccuuauucaagcuuaccaugggccagaucaucaccuucuuccaggaggugccccacgucaucgaggaggugaugaacaucgugcugaucgcccucagccugcuggccauccucaaggggaucuacaacgucgcgaccugcggccugcuggggcucguguccuuccugcugcucugcggccgcagcugcuccacgaccuacaaggggguguacgagcugcagacccuggagcucgacauggccagccugaacaugugcaugccgcuguccugcaccaagaacaacagccaccacuacaucauggucggcaacgagacgggccucgagcugacccugaccaacaccuccaucaucaaccacaaguucugcaaccucagcgacgcccacaagaagaaccuguacgaccacgcccugauguccaucaucagcacguuccaccucuccauccccaacuucaaccaguacgaggccaugagcugcgacuucaacgggggccggaucuccgugcaguacaaccugagccacuccuacgcgguggacgccgccaaccacugcgggaccaucgccaacggcguccugcagaccuucaugcgcauggcguggggcgggagcuacaucgcccucgacuccggcaaggggagcugggacugcaucaugaccuccuaccaguaccugaucauccagaacacgaccugggaggaccacugccaguucagccggcccagccccaucggcuaccuggggcuccugucccagcgcacccgggacaucuacaucagccgccggcgccggggcaccuucacguggacccuguccgacagcgagggcaacgagacccccgggggcuacugccucacccgcuggaugcugaucgaggccgagcugaagugcuucgggaacacggccguggccaagugcaacgagaagcacgacgaggaguucugcgacaugcuccggcuguucgacuucugcaagcaggcgauccgccggcugaagaccccggcccagauguccauccagcucaucaacaaggccgugaacgcccugaucaacgaccagcugaucaugaagaaccaccuccgcgacaucaugggcauccccuacugcaacuacagcaaguacugguaccugaaccacaccgucaccgggaagacgucccugccccggugcuggcucgugagcaacggcuccuaccugaacgagacccacuucagcgacgacaucgagcagcaggccgacaacaugaucaccgagcugcuccagaaggaguacaucgaccgccagggcaagaccccgcuggggcugguggaccuguucgucuucuccacgagcuucuaccucaucuccaucuuccugcaccuggugaagauccccacccaccggcacaucaccggcaagcccugccccaagccgcaccgccucaaccacauggggaucugcagcugcggccuguacaaccaccccggggugcccgucaaguggaagcggugaggacuaguaauaaggaaacuguaugaaugucugugggcaggaagugaagagauccuucuguaaagguuuuuggaauuaugucugcugaauaauaaacuuuuuugaaauaauaaaucugguagaaaaaugagaucuaaaaaaaaaaaaaaaaaaaaaaaaaaaaaaaaaaaaaaaaaaaaaaaaaaaaaaaaaaaaaaaaaaaaaaaaaaaaaaaaaaaaaaaaaaaaaaaaaaaa

SEQ ID NO: 24177 - RNA, 1785 nt, Artificial Sequence
  mRNA product Design b-4 (A100) comprising derived and/or modified sequence from LASV(Lassa virus/H.sapiens-wt/NGA/2016/ISTH_0017;Clade II)__AVO03567__GPCmut2 (opt1)
aggagagucccgcagucggcguccagcggcucugcuuguucgugugugugucguugcaggccuuauucaagcuuaccaugggccagaucaucaccuucuuccaggaggugccccacgucaucgaggaggugaugaacaucgugcugaucgcccucagccugcuggccauccucaaggggaucuacaacgucgcgaccugcggccuguucgggcugguguccuuccuccugcugugcggccgcagcugcuccacgaccuacaaggggguguacgagcuccagacccuggagcuggacauggccagccucaacaugugcaugccgcuguccugcaccaagaacaacagccaccacuacaucauggucggcaacgagacgggccuggagcucacccugaccaacaccuccaucaucaaccacaaguucugcaaccugagcgacgcccacaagaagaaccucuacgaccacgcccugauguccaucaucagcacguuccaccuguccauccccaacuucaaccaguacgaggccaugagcugcgacuucaacgggggcaagaucuccgugcaguacaaccucagccacaccuacgcgaucgacgccgccaaccacugcgggaccaucgccaacggcgugcugcagaccuucaugcggauggcguggggcggguccuacaucgcccuggacagcggcaagggguccugggacugcaucaugacgagcuaccaguaccucaucauccagaacaccaccugggaggaccacugccaguucucccgccccagccccaucggcuaccuggggcugcucagccagcggacccgcgacaucuacaucucccggcgccggcgcggcacguucaccuggacccugagcgacuccgagggcaacgagacccccgggggcuacugccugacgcgguggaugcucaucgaggccgagcugaagugcuucgggaacaccgccgucgccaagugcaacgagaagcacgacgaggaguucugcgacaugcugcgccucuucgacuucugcaagcaggcgauccggcgccugaagaccccggcccagaugagcauccagcugaucaacaaggccgugaacgcccucaucaacgaccagcugaucaugaagaaccaccuccgggacaucaugggcauccccuacugcaacuacuccaaguacugguaccugaaccacaccgugacggggaagaccagccugccccgcugcuggcuggucuccaacggcagcuaccucaacgagacccacuucuccgacgacaucgagcagcaggccgacaacaugaucaccgagcugcugcagaaggaguacauggaccggcagggcaagacgccgcucgggcugguggaccuguucguguucagcaccuccuucuaccugaucagcaucuuccuccaccugguccgcauccccacccaccggcacgugaucggcaagcccugccccaagccgcaccgccugaaccacauggggaucugcuccugcggccucuacaagcaccccggggugcccgucaaguggaagcggugaggacuaguaauaaggaaacuguaugaaugucugugggcaggaagugaagagauccuucuguaaagguuuuuggaauuaugucugcugaauaauaaacuuuuuugaaauaauaaaucugguagaaaaaugagaucuaaaaaaaaaaaaaaaaaaaaaaaaaaaaaaaaaaaaaaaaaaaaaaaaaaaaaaaaaaaaaaaaaaaaaaaaaaaaaaaaaaaaaaaaaaaaaaaaaaaa

SEQ ID NO: 24178 - RNA, 1785 nt, Artificial Sequence
  mRNA product Design b-4 (A100) comprising derived and/or modified sequence from LASV(Lassa virus/H.sapiens-wt/NGA/2018/ISTH_0959;Clade II)__AVV65099__GPCmut2 (opt1)
aggagagucccgcagucggcguccagcggcucugcuuguucgugugugugucguugcaggccuuauucaagcuuaccaugggccagaucaucaccuucuuccaggaggugccccacgucaucgaggaggugaugaacaucgugcugaucgcccucagccugcuggccauccucaaggggaucuacaacgucgugaccugcggccuguucgggcugguguccuuccuccugcugugcggccgcagcugcuccacgaccuacaagggggucuacgagcuccagacccuggagcuggacauggcgagccucaacaugugcaugccgcuguccugcaccaagaacaacagccaccacuacaucauggugggcaacgagacgggccuggagcucacccugaccaacaccuccaucaucaaccacaaguucugcaaccugagcgacgcccacaagaagaaccucuacgaccacgcccugauguccaucaucagcacguuccaccuguccauccccaacuucaaccaguacgaggccaugagcugcgacuucaacgggggcaagaucuccgugcaguacaaccucagccacgccuacgcgaucgacgccgccaaccacugcgggaccaucgccaacggcguccugcagaccuucaugcggauggcguggggcggguccuacaucgcccuggacagcggcaagggguccugggacugcaucaugaccagcuaccaguaccucaucauccagaacacgaccugggaggaccacugccaguucucccgccccagccccaucggcuaccuggggcugcucagccagcggacccgcgacaucuacaucucccggcgccggcgcggcaccuucacguggacccugagcgacuccgagggcaacgagacccccgggggcuacugccugacccgguggaugcucaucgaggccgagcugaagugcuucgggaacacggccguggccaagugcaacgagaagcacgacgaggaguucugcgacaugcugcgccucuucgacuucugcaagcaggcgauccggcgccugaagaccccggcccagaugagcauccagcugaucaacaaggccgugaacgcccucaucaacgaccagcugaucaugaagaaccaccuccgggacaucaugggcauccccuacugcaacuacuccaaguacugguaccugaaccacaccgucaccgggaagacgagccugccccgcugcuggcugguguccaacggcagcuaccucaacgagacccacuucuccgacgacaucgagcagcaggccgacaacaugaucaccgagcugcugcagaaggaguacaucgaccggcagggcaagaccccgcucgggcugguggaccuguucgucuucagcacguccuucuaccugaucagcaucuuccuccaccuggugaagauccccacccaccgccacgugaucggcaagcccugccccaagccgcaccggcugaaccacauggggaucugcuccugcggccucuacaagcaccccgggguccccgugaaguggaagcgcugaggacuaguaauaaggaaacuguaugaaugucugugggcaggaagugaagagauccuucuguaaagguuuuuggaauuaugucugcugaauaauaaacuuuuuugaaauaauaaaucugguagaaaaaugagaucuaaaaaaaaaaaaaaaaaaaaaaaaaaaaaaaaaaaaaaaaaaaaaaaaaaaaaaaaaaaaaaaaaaaaaaaaaaaaaaaaaaaaaaaaaaaaaaaaaaaa

SEQ ID NO: 24179 - RNA, 1785 nt, Artificial Sequence
  mRNA product Design b-4 (A100) comprising derived and/or modified sequence from LASV(LASV003-NIG-2008;Clade II)__AIT17580__GPCmut2 (opt1)
aggagagucccgcagucggcguccagcggcucugcuuguucgugugugugucguugcaggccuuauucaagcuuaccaugggccagaucaucaccuucuuccaggaggugccccacgucaucgaggaggugaugaacaucgugcugaucgcccucagccugcuggccauccucaaggggaucuacaacgucgcgaccugcggccuguucgggcugguguccuuccuccugcugugcggccgcagcugcuccacgaccuacaaggggguguacgagcuccagacccuggagcuggacauggccagccucaacaugugcaugccgcuguccugcaccaagaacaacagccaccacuacaucauggucggcaacgagacgggccuggagcucacccugaccaacaccuccaucaucaaccacaaguucugcaaccugagcgacgcccacaagaagaaccucuacgaccacgcccugauguccaucaucagcacguuccaccuguccauccccaacuucaaccaguacgaggccaugagcugcgacuucaacgggggcaagaucuccgugcaguacaaccucagccacaccuacgcgguggacgccgccaaccacugcgggaccaucgccaacggcguccugcagaccuucaugcggauggcguggggcggguccuacaucgcccuggacagcggcaagggguccugggacugcaucaugacgagcuaccaguaccucaucauccagaacaccaccugggaggaccacugccaguucucccgccccagccccaucggcuaccuggggcugcucagccagcggacccgcgacaucuacaucucccggcgccggcgcggcacguucaccuggacccugagcgacuccgagagcaacgagaccccgggcggguacugccugacgcgguggaugcucaucgaggccgagcugaagugcuucggcaacaccgccguggccaagugcaacgagaagcacgacgaggaguucugcgacaugcugcgccucuucgacuucugcaagcaggcgauccggcgccugaaggcccccgcccagauguccauccagcugaucaacaaggccgugaacgcccucaucaacgaccagcugaucaugaagaaccaccuccgggacaucauggggauccccuacugcaacuacagcaaguacugguaccugaaccacaccgucaccggccgcacgucccugccccggugcuggcuggugagcaacggguccuaccucaacgagacccacuucagcgacgacaucgagcagcaggcggacaacaugaucaccgagcugcugcagaaggaguacauggaccgccagggcaagaccccgcucggccugguggaccuguucgucuucuccacgagcuucuaccugaucuccaucuuccuccaccuggugaagauccccacccaccggcacgugaucgggaagcccugccccaagccgcaccgccugaaccacaugggcaucugcagcugcgggcucuacaagcaccccggcguccccgugaaguggaagcggugaggacuaguaauaaggaaacuguaugaaugucugugggcaggaagugaagagauccuucuguaaagguuuuuggaauuaugucugcugaauaauaaacuuuuuugaaauaauaaaucugguagaaaaaugagaucuaaaaaaaaaaaaaaaaaaaaaaaaaaaaaaaaaaaaaaaaaaaaaaaaaaaaaaaaaaaaaaaaaaaaaaaaaaaaaaaaaaaaaaaaaaaaaaaaaaaa

SEQ ID NO: 24180 - RNA, 1785 nt, Artificial Sequence
  mRNA product Design b-4 (A100) comprising derived and/or modified sequence from LASV(LASV035-NIG-2009;Clade II)__AIT17588__GPCmut2 (opt1)
aggagagucccgcagucggcguccagcggcucugcuuguucgugugugugucguugcaggccuuauucaagcuuaccaugggccagaucaucaccuucuuccaggaggugccccacgucaucgaggaggugaugaacaucgugcugaucgcccucagccugcuggccauccucaaggggaucuacaacgucgcgaccugcggccuguucgggcugguguccuuccuccugcugugcggccgcagcugcuccacgaccuacaaggggguguacgagcuccagacccuggagcuggacauggccagccucaacaugugcaugccgcuguccugcaccaagaacaacagccaccacuacaucauggucggcaacgagacgggccuggagcucacccugaccaacaccuccaucaucaaccacaaguucugcaaccugagcgacgcccacaagaagaaccucuacgaccacgcccugauguccaucaucagcacguuccaccuguccauccccaacuucaaccaguacgaggccaugagcugcgacuucaacgggggcaagaucuccgugcaguacaaccucagccacgcguacgccguggacgccgccaaccacugcgggaccaucgcgaacggcguccugcagaccuucaugcggauggccuggggcggguccuacaucgcccuggacagcggcaagggguccugggacugcaucaugaccagcuaccaguaccucaucauccagaacacgaccugggaggaccacugccaguucucccgccccagccccaucggcuaccuggggcugcucagccagcggacccgcgacaucuacaucucccggcgccggcgcggcaccuucacguggacccugagcgacuccgagggcaacgagacccccgggggcuacugccugacccgguggaugcucaucgaggccgagcugaagugcuucgggaacacggccguggcgaagugcaacgagaagcacgacgaggaguucugcgacaugcugcgccucuucgacuucugcaagcaggccauccggcgccugaaggccccggcccagaugagcauccagcugaucaacaaggccgugaacgcgcucaucaacgaccagcugaucaugaagaaccaccuccgggacaucaugggcauccccuacugcaacuacuccaaguacugguaccugaaccacaccgucaccgggaagaccagccugccccgcugcuggcugguguccaacggcagcuaccucaacgagacgcacuucuccgacgacaucgagcagcaggccgacaacaugaucaccgagcugcugcagaaggaguacaucgaccggcagggcaagaccccgcucgggcugguggaccuguucgucuucagcaccuccuucuaccugaucagcaucuuccuccaccuggugaagauccccacgcaccgccacgugaucggcaagcccugccccaagccgcaccggcugaaccacauggggaucugcuccugcggccucuacaagcaccccgggguccccgugaaguggaagcgcugaggacuaguaauaaggaaacuguaugaaugucugugggcaggaagugaagagauccuucuguaaagguuuuuggaauuaugucugcugaauaauaaacuuuuuugaaauaauaaaucugguagaaaaaugagaucuaaaaaaaaaaaaaaaaaaaaaaaaaaaaaaaaaaaaaaaaaaaaaaaaaaaaaaaaaaaaaaaaaaaaaaaaaaaaaaaaaaaaaaaaaaaaaaaaaaaa

SEQ ID NO: 24181 - RNA, 1785 nt, Artificial Sequence
  mRNA product Design b-4 (A100) comprising derived and/or modified sequence from LASV(LASV1000-NIG-2009;Clade II)__AIT17782__GPCmut2 (opt1)
aggagagucccgcagucggcguccagcggcucugcuuguucgugugugugucguugcaggccuuauucaagcuuaccaugggccagaucaucaccuucuuccaggaggugccccacgucaucgaggaggugaugaacaucgugcugaucgcccucagccugcuggccauccucaaggggaucuacaacgucgcgaccugcggccuguucgggcugguguccuuccuccugcugugcggccgcagcugcuccacgaccuacaaggggguguacgagcuccagacccuggagcuggacauggccagccucaacaugugcaugccgcuguccugcaccaagaacaacagccaccacuacaucauggucggcaacgagacgggccuggagcucacccugaccaacaccuccaucaucaaccacaaguucugcaaccugagcgacgcccacaagaagaaccucuacgaccacgcccugauguccaucaucagcacguuccaccuguccauccccaacuucaaccaguacgaggccaugagcugcgacuucaacgggggcaagaucuccgugcaguacaaccucagccacaccuacgcgguggacgccgccaaccacugcgggaccaucgccaacggcguccugcagaccuucaugcggauggcguggggcggguccuacaucgcccuggacagcggcaagggguccugggacugcaucaugacgagcuaccaguaccucaucauccagaacaccaccugggaggaccacugccaguucucccgccccagccccaucggcuaccuggggcugcucagccagcggacccgcgacaucuacaucucccggcgccggcgcggcacguucaccuggacccugagcgacuccgagggcaacgagacccccgggggcuacugccugacgcgguggaugcucaucgaggccgagcugaagugcuucgggaacaccgccguggccaagugcaacgagaagcacgacgaggaguucugcgacaugcugcgccucuucgacuucugcaagcaggcgaucaagcggcugaagaccccggcccagaugagcauccagcugaucaacaaggccgugaacgcccucaucaacgaccagcugaucaugaagaaccaccuccgcgacaucaugggcauccccuacugcaacuacuccaaguacugguaccugaaccacaccgucacggggaagaccagccugccccggugcuggcugguguccaacggcagcuaccucaacgagacccacuucuccgacgacaucgagcagcaggccgacaacaugaucaccgagcugcugcagaaggaguacaucgaccgccagggcaagacgccgcucgggcugguggaccuguucgucuucagcaccuccuucuaccugaucagcaucuuccuccaccuggugaagauccccacccaccggcacguggucggcaagcccugccccaagccgcaccgccugaaccacauggggaucugcuccugcggccucuacaagcaccccggggugcccgugaaguggaagcggugaggacuaguaauaaggaaacuguaugaaugucugugggcaggaagugaagagauccuucuguaaagguuuuuggaauuaugucugcugaauaauaaacuuuuuugaaauaauaaaucugguagaaaaaugagaucuaaaaaaaaaaaaaaaaaaaaaaaaaaaaaaaaaaaaaaaaaaaaaaaaaaaaaaaaaaaaaaaaaaaaaaaaaaaaaaaaaaaaaaaaaaaaaaaaaaaa

SEQ ID NO: 24182 - RNA, 1785 nt, Artificial Sequence
  mRNA product Design b-4 (A100) comprising derived and/or modified sequence from LASV(LASV221-NIG-2010;Clade II)__AIT17624__GPCmut2 (opt1)
aggagagucccgcagucggcguccagcggcucugcuuguucgugugugugucguugcaggccuuauucaagcuuaccaugggccagaucaucaccuucuuccaggaggugccccacgucaucgaggaggugaugaacaucgugcugaucgcccucagccugcuggccauccucaaggggaucuacaacgucgcgaccugcggccuguucgggcugguguccuuccuccugcugugcggccgcagcugcuccacgaccuacaaggggguguacgagcuccagacccuggagcuggacauggccagccucaacaugugcaugccgcuguccugcaccaagaacaacagccaccacuacaucauggucggcaacgagacgggccuggagcucacccugaccaacaccuccaucaucaaccacaaguucugcaaccugagcgacgcccacaagaagaaccucuacgaccacgcccugauguccaucaucagcacguuccaccuguccauccccaacuucaaccaguacgaggccaugagcugcgacuucaacgggggcaagaucuccgugcaguacaaccucagccacaccuacgcgaucgacgccgccaaccacugcgggaccaucgccaacggcgugcugcagaccuucaugcggauggcguggggcggguccuacaucgcccuggacagcggcaagggguccugggacugcaucaugacgagcuaccaguaccucaucauccagaacaccaccugggaggaccacugccaguucucccgccccagccccaucggcuaccuggggcugcucagccagcggacccgcgacaucuacaucucccggcgccggcgcggcacguucaccuggacccugagcgacuccgagggcaacgagacccccgggggcuacugccugacgcgguggaugcucaucgaggccgagcugaagugcuucgggaacaccgccgucgccaagugcaacgagaagcacgacgaggaguucugcgacaugcugcgccucuucgacuucugcaagcaggcgauccggcgccugaagaccccggcccagaugagcauccagcugaucaacaaggccgugaacgcccucaucaacgaccagcugaucaugaagaaccaccuccgggacaucaugggcauccccuacugcaacuacuccaaguacugguaccugaaccacaccgugacggggaagaccagccugccccgcugcuggcuggucuccaacggcagcuaccucaacgagacccacuucuccgacgacaucgagcagcaggccgacaacaugaucaccgagaugcugcagaaggaguacauggaccggcagggcaagacgccgcuggggcucguggaccuguucguguucagcaccuccuucuaccugaucagcaucuuccugcaccucgucaagauccccacccaccgccacgugaucggcaagcccugccccaagccgcaccggcugaaccacauggggaucugcuccugcggccuguacaagcaccccggggugcccgucaaguggaagcgcugaggacuaguaauaaggaaacuguaugaaugucugugggcaggaagugaagagauccuucuguaaagguuuuuggaauuaugucugcugaauaauaaacuuuuuugaaauaauaaaucugguagaaaaaugagaucuaaaaaaaaaaaaaaaaaaaaaaaaaaaaaaaaaaaaaaaaaaaaaaaaaaaaaaaaaaaaaaaaaaaaaaaaaaaaaaaaaaaaaaaaaaaaaaaaaaaa

SEQ ID NO: 24183 - RNA, 1785 nt, Artificial Sequence
  mRNA product Design b-4 (A100) comprising derived and/or modified sequence from LASV(LASV237-NIG-2010;Clade II)__AIT17638__GPCmut2 (opt1)
aggagagucccgcagucggcguccagcggcucugcuuguucgugugugugucguugcaggccuuauucaagcuuaccaugggccagaucaucaccuucuuccaggaggugccccacgucaucgaggaggugaugaacaucgugcugaucgcccucagccugcuggccauccucaaggggaucuacaacgucgcgaccugcggccuguucgggcugguguccuuccuccugcugugcggccgcagcugcuccacgaccuacaaggggguguacgagcuccagacccuggagcuggacauggccagccucaacaugugcaugccgcuguccugcaccaagaacaacagccaccacuacaucauggucggcaacgagacgggccuggagcucacccugaccaacaccuccaucaucaaccacaaguucugcaaccugagcgacgcccacaagaaggaccucuacgaccacgcccugauguccaucaucagcacguuccaccuguccauccccaacuucaaccaguacgaggccaugagcugcgacuucaacgggggcaagaucuccgugcaguacaaccucagccacaccuacgcgguggacgccgccaaccacugcgggaccaucgccaacggcguccugcagaccuucaugcggauggcguggggcggguccuacaucgcccuggacagcggcaagggguccugggacugcaucaugacgagcuaccaguaccucaucauccagaacaccaccugggaggaccacugccaguucucccgccccagccccaucggcuaccuggggcugcucagccagcggacccgcgacaucuacaucucccggcgccggcgcggcacguucaccuggacccugagcgacuccgagggcaacgagacccccgggggcuacugccugacgcgguggaugcucaucgaggccgagcugaagugcuucgggaacaccgccguggccaagugcaacgagaagcacgacgaggaguucugcgacaugcugcgccucuucgacuucugcaagcaggcgauccggcgccugaagaccccggcccagaugagcauccagcugaucaacaaggccgugaacgcccucaucaacgaccagcugaucaugaagaaccaccuccgggacaucaugggcauccccuacugcaacuacuccaaguacugguaccugaaccacaccgucacggggaagaccagccugccccgcugcuggcugguguccaacggcagcuaccucaacgagacccacuucuccgacgacaucgagcagcaggccgacaacaugaucaccgagcugcugcagaaggaguacauggaccggcagggcaagacgccgcucgggcugguggaccuguucgucuucagcaccuccuucuaccugaucagcaucuuccuccaccugaucaagauccccacccaccgccacaucaccggcaagcccugccccaagccgcaccggcugaaccacauggggaucugcuccugcggccucuacaagcaccccggggugcccgugaaguggaagcgcugaggacuaguaauaaggaaacuguaugaaugucugugggcaggaagugaagagauccuucuguaaagguuuuuggaauuaugucugcugaauaauaaacuuuuuugaaauaauaaaucugguagaaaaaugagaucuaaaaaaaaaaaaaaaaaaaaaaaaaaaaaaaaaaaaaaaaaaaaaaaaaaaaaaaaaaaaaaaaaaaaaaaaaaaaaaaaaaaaaaaaaaaaaaaaaaaa

SEQ ID NO: 24184 - RNA, 1785 nt, Artificial Sequence
  mRNA product Design b-4 (A100) comprising derived and/or modified sequence from LASV(LASV253-NIG-2011;Clade II)__AIT17670__GPCmut2 (opt1)
aggagagucccgcagucggcguccagcggcucugcuuguucgugugugugucguugcaggccuuauucaagcuuaccaugggccagaucaucaccuucuuccaggaggugccccacgucaucgaggaggugaugaacaucgugcugaucgcccucagccugcuggccauccucaaggggaucuacaacgucgcgaccugcggccuguucgggcugguguccuuccuccugcugugcggccgcagcugcuccacgaccuacaaggggguguacgagcuccagacccuggagcuggacauggccagccucaacaugugcaugccgcuguccugcaccaagaacaacagccaccacuacaucauggucggcaacgagacgggccuggagcucacccugaccaacaccuccaucaucaaccacaaguucugcaaccugagcgacgcccacaagaagaaccucuacgaccacgcccugauguccaucaucagcacguuccaccuguccauccccaacuucaaccaguacgaggccaugagcugcgacuucaacgggggcaagaucuccgugcaguacaaccucagccacaccuacgcgguggacgccgccaaccacugcgggaccaucgccaacggcguccugcagaccuucaugcggauggcguggggcggguccuacaucgcccuggacagcggcaagggguccugggacugcaucaugacgagcuaccaguaccucaucauccagaacaccaccugggaggaccacugccaguucucccgccccagccccaucggcuaccuggggcugcucagccagcggacccgcgacaucuacaucucccggcgccggcgcggcacguucaccuggacccugagcgacuccgagggcaacgagacccccgggggcuacugccugacgcgguggaugcucaucgaggccgagcugaagugcuucgggaacaccgccguggccaagugcaacgagaagcacgacgaggaguucugcgacaugcugcgccucuucgacuucugcaagcaggcgauccggcgccugaaggccccggcccagaugagcauccagcugaucaacaaggccgugaacgcccucaucaacgaccagcugaucaugaagaaccaccuccgggacaucaugggcauccccuacugcaacuacuccaaguacugguaccugaaccacaccgucaccgggcgcacgagccugccccggugcuggcugguguccaacggcagcuaccucaacgagacccacuucuccgacgacaucgagcagcaggcggacaacaugaucaccgagcugcugcagaaggaguacaucgaccgccagggcaagaccccgcucgggcugguggaccuguucgucuucagcacguccuucuaccugaucagcaucuuccuccaccuggugaagauccccacccaccggcacaucaucggcaagcccugccccaagccgcaccgccugaaccacauggggaucugcuccugcggccucuacaagcaccccggggugcccgucaaguggaagcggugaggacuaguaauaaggaaacuguaugaaugucugugggcaggaagugaagagauccuucuguaaagguuuuuggaauuaugucugcugaauaauaaacuuuuuugaaauaauaaaucugguagaaaaaugagaucuaaaaaaaaaaaaaaaaaaaaaaaaaaaaaaaaaaaaaaaaaaaaaaaaaaaaaaaaaaaaaaaaaaaaaaaaaaaaaaaaaaaaaaaaaaaaaaaaaaaa

SEQ ID NO: 24185 - RNA, 1785 nt, Artificial Sequence
  mRNA product Design b-4 (A100) comprising derived and/or modified sequence from LASV(LASV254-NIG-2011;Clade II)__AIT17674__GPCmut2 (opt1)
aggagagucccgcagucggcguccagcggcucugcuuguucgugugugugucguugcaggccuuauucaagcuuaccaugggccagaucaucaccuucuuccaggaggugccccacgucaucgaggaggugaugaacaucgugcugaucgcccucagccugcuggccauccucaaggggaucuacaacgucgcgaccugcggccuguucgggcugguguccuuccuccugcugugcggccgcagcugcuccacgaccuacaaggggguguacgagcuccagacccuggagcuggacaugaccaaccucaacaugugcaugccgcugagcugcacgaagaacaacucccaccacuacaucauggucggcaacgagaccggccuggagcucacccugaccaacacgagcaucaucaaccacaaguucugcaaccuguccgacgcccacaagaagaaccucuacaaccacgcccugaugagcaucaucuccaccuuccaccugagcauccccaacuucaaccaguacgaggccauguccugcgacuucaacgggggcaagaucagcgugcaguacaaccucucccacagcuacgccguggacgcggccaaccacugcgggaccaucgccaacggcguccugcagaccuucaugcggauggccuggggcggguccuacaucgcgcuggacagcggcaaggggaacugggacugcaucaugacguccuaccaguaccucaucauccagaacaccaccugggaggaccacugccaguucagccgccccucccccaucggcuaccuggggcugcucagccagcggacccgcgacaucuacaucagccggcgccggcgcggcacguucaccuggacccuguccgacagcgagggcaacgagacccccgggggcuacugccugacgcgguggaugcucaucgaggccgagcugaagugcuucgggaacaccgccguggccaagugcaacgagaagcacgacgaggaguucugcgacaugcugcgccucuucgacuucugcaagcaggccauccggcgccugaagaccccggcgcaggccaacauccagcugaucaacaaggccgugaacgcccucaucaacgaccagcugaucaugaagaaccaccuccgggacaucaugggcauccccuacugcaacuacuccaaguacugguaccugaaccacaccgucacggggaagaccagccugccccgcugcuggcugguguccaacggcagcuaccucaacgagacccacuucuccgacgacaucgagcagcaggccgacaacaugaucaccgagcugcugcagaaggaguacauggaccggcagggcaagacgccgcucgggcugguggaccuguucgucuucagcaccuccuucuaccugaucagcaucuuccuccaccuggugaagauccccacccaccgccacgugaucggcaagcccugccccaagccgcaccggcugaaccacauggggaucugcuccugcggccucuacaagcaccccgggguccccgugaaguggaagcgcugaggacuaguaauaaggaaacuguaugaaugucugugggcaggaagugaagagauccuucuguaaagguuuuuggaauuaugucugcugaauaauaaacuuuuuugaaauaauaaaucugguagaaaaaugagaucuaaaaaaaaaaaaaaaaaaaaaaaaaaaaaaaaaaaaaaaaaaaaaaaaaaaaaaaaaaaaaaaaaaaaaaaaaaaaaaaaaaaaaaaaaaaaaaaaaaaa

SEQ ID NO: 24186 - RNA, 1785 nt, Artificial Sequence
  mRNA product Design b-4 (A100) comprising derived and/or modified sequence from LASV(Nig08-A19;Clade III)__ADU56618__GPCmut2 (opt1)
aggagagucccgcagucggcguccagcggcucugcuuguucgugugugugucguugcaggccuuauucaagcuuaccaugggccagaucgugaccuucuuccaggaggucccccacgugaucgaggaggugaugaacaucguccugaucgcccucagcauccuggccauccugaaggggcucuacaacaucgcgaccugcggccugaucgggcuggugacguuccuccugcuguccggccgcagcugcuccaugaccuacaaggggguguacgagcuccagacccuggagcugaacaugaacacccucaacaugugcaugccgcugagcugcacgaagaacaacucccaccacuacaucauggucggcaacgagaccggccuggagcucacccugaccaacacgagccugcuccaccacaaguucugcaaccuguccgacgcccacaagaagaaccuguacgaccacacccucaugagcaucaucuccaccuuccaccugagcauccccaacuucaaccaguacgaggccauguccugcgacuucaacgggggcaagaucaccgugcaguacaaccugagccacuccuacgccaucgacgccgcgaaccacugcgggacgguggccaacggcguccuccagaccuucaugcggauggccuggggcgggagcuacaucgcccuggacuccggccgcgggaagugggacugcaucaugaccagcuaccaguaccugaucauccagaacaccacgugggaggaccacugccaguucucccggcccagccccaucggcuaccucgggcugcugucccagcgcacccgggacaucuacaucagccgccggcgccggggcaccuucaccuggacgcucagcgacuccgagggcaacgagacccccgggggcuacugccugacccgcuggaugcugaucgaggcggagcucaagugcuucgggaacaccgccguggccaagugcaacgagaagcacgacgaggaguucugcgacaugcugcggcuguucgacuucugcaagcaggccauccgccggcucaaggccccggcgcagaugagcauccagcugaucaacaaggccgugaacgcccugaucaacgaccagcucaucaugaagaaccaccuccgcgacaucaugggcauccccuacugcaacuacuccaaguacugguaccugaaccacacgagcaccgggcggaccucccugccccgcugcuggcuggucagcaacggcuccuaccugaacgagacccacuucagcgacgacaucgagcagcaggccgacaacaugaucacggagaugcuccagaaggaguaccuggaccggcagggcaagaccccgcuggggcugguggaccucuucguguucuccaccagcuucuaccugaucuccaucuuccugcaccucgucaagauccccacccaccgccacaucgugggcaagcccugccccaagccgcaccggcugaaccacauggggaucugcagcugcggccuguacaagcagcccggggugcccguccgcuggaagcggugaggacuaguaauaaggaaacuguaugaaugucugugggcaggaagugaagagauccuucuguaaagguuuuuggaauuaugucugcugaauaauaaacuuuuuugaaauaauaaaucugguagaaaaaugagaucuaaaaaaaaaaaaaaaaaaaaaaaaaaaaaaaaaaaaaaaaaaaaaaaaaaaaaaaaaaaaaaaaaaaaaaaaaaaaaaaaaaaaaaaaaaaaaaaaaaaa

SEQ ID NO: 24187 - RNA, 1788 nt, Artificial Sequence
  mRNA product Design b-4 (A100) comprising derived and/or modified sequence from LASV(G1180-SLE-2010;Clade IV)__AIT17168__GPCmut2 (opt1)
aggagagucccgcagucggcguccagcggcucugcuuguucgugugugugucguugcaggccuuauucaagcuuaccaugggccagaucgugaccuucuuccaggaggucccccacgugaucgaggaggugaugaacaucguccugaucgcccucagcauccuggccgugcugaaggggcucuacaacuucgcgaccugcggccugguggggcugcucacguuccugcugcucugcggccgcuccugcaccgccagccgguacaagggggucuacgagcugcagacccuggagcucaacauggagacccugaacaugugcaugccgcuguccugcacgaagaacaacagccaccacuacaucauggugggcaacgagaccggccucgagcugacccugaccaacacguccaucaucaaccacaaguucugcaaccucagcgacgcccacaagaagaaccuguacgaccacgcccugauguccaucaucagcaccuuccaccucuccauccccaacuucaaccaguacgaggccaugagcugcgacuucaacgggggcaagaucuccgugcaguacaaccugagccacuccuacgcgggggacgccgccaaccacugcggcaccgucgccaacggggugcugcagaccuucaugcgcauggcguggggcggcagcuacaucgcccucgacuccgggcacggcagcugggacugcaucaugacguccuaccaguaccugaucauccagaacaccaccugggaggaccacugccaguucagccggcccucccccaucggguaccugggccuccugagccagcgcacccgggacaucuacaucagccgccggcgccggggcacguucaccuggacccuguccgacagcgaggggaaggacaccccgggcggguacugccucacgcgcuggaugcugaucgaggccgagcugaagugcuucggcaacaccgccguggccaagugcaacgagaagcacgacgaggaguucugcgacaugcuccggcuguucgacuucugcaagcaggcgauccagcgccugaaggcccccgcccagauguccauccagcucaucaacaaggccgucaacgcccugaucaacgaccagcugaucaugaagaaccaccuccgggacaucauggggauccccuacugcaacuacagcaaguacugguaccugaaccacaccaccacgggcaagaccucccugcccaagugcuggcucgugagcaacggcuccuaccugaacgagacccacuucagcgacgacaucgagcagcaggcggacaacaugaucaccgagaugcugcagaaggaguacauggagcgccaggggaagacgccgcucggccugguggaccuguucgucuucuccaccagcuucuaccugaucuccaucuuccuccaccuggugaagauccccacccaccggcacaucgugggcaagagcugccccaagccccaccgccugaaccacauggggaucugcuccugcgggcucuacaagcagccgggcguccccgugaaguggaagcggugaggacuaguaauaaggaaacuguaugaaugucugugggcaggaagugaagagauccuucuguaaagguuuuuggaauuaugucugcugaauaauaaacuuuuuugaaauaauaaaucugguagaaaaaugagaucuaaaaaaaaaaaaaaaaaaaaaaaaaaaaaaaaaaaaaaaaaaaaaaaaaaaaaaaaaaaaaaaaaaaaaaaaaaaaaaaaaaaaaaaaaaaaaaaaaaaa

SEQ ID NO: 24188 - RNA, 1788 nt, Artificial Sequence
  mRNA product Design b-4 (A100) comprising derived and/or modified sequence from LASV(G1442-SLE-2011;Clade IV)__AIT17180__GPCmut2 (opt1)
aggagagucccgcagucggcguccagcggcucugcuuguucgugugugugucguugcaggccuuauucaagcuuaccaugggccagaucgugaccuucuuccaggaggucccccacgugaucgaggaggugaugaacaucguccugaucgcccucagcauccuggccgugcugaaggggcucuacaacguggcgaccugcggccugaucgggcuggucacguuccuccugcugugcggccgcuccugcaccaccacccucuacaaggggguguacgagcugcagacgcuggagcucaacauggagacccugaacaugugcaugccgcugagcugcaccaagaacaacucccaccacuacauccgggugggcaacgagaccggccucgagcugacgcugaccaacaccagcaucaucaaccacaaguucugcaaccucuccgacgcccacaagaagaaccuguacgaccacgcccugaugagcaucaucuccaccuuccaccucagcauccccaacuucaaccaguacgaggccauguccugcgacuucaacgggggcaagaucagcguccaguacaaccugucccacagcuacgccggggacgcggccaaccacugcggcacgguggccaacggggugcugcagaccuucaugcgcauggccuggggcggcuccuacaucgcgcucgacagcgggcggggcaacugggacugcaucaugaccuccuaccaguaccugaucauccagaacaccacgugggacgaccacugccaguucagccgccccucccccaucggguaccugggccuccugagccagcggacccgcgacgucuacaucucccggcgccggcgcggcaccuucaccuggacgcugagcgacagcgaggggaaggacaccccgggcggguacugccucacccgguggaugcugaucgaggccgagcugaagugcuucggcaacaccgccguggccaagugcaacgagaagcacgacgaggaguucugcgacaugcuccgccuguucgacuucugcaagcaggccauccagcggcugaaggcgcccgcccagauguccauccagcucaucaacaaggccgugaacgcccugaucaacgaccagcugaucaugaagaaccaccuccgcgacaucauggggauccccuacugcaacuacagcaaguacugguaccugaacaacacggccaccggcaagaccucccugcccaagugcuggcucaucagcaacggcuccuaccugaacgagacccacuucagcgacgacaucgagcaggaggcggacaacaugaucacggagaugcugcagaaggaguacauggagcggcaggggaagaccccgcucggccuggucgaccuguucguguucuccaccagcuucuaccugaucuccaucuuccuccaccuggugaagauccccacccaccgccacaucgucggcaagagcugccccaagccccaccggcugaaccacauggggaucugcuccugcgggcucuacaagcagccgggcgugcccgugcgcuggaagcggugaggacuaguaauaaggaaacuguaugaaugucugugggcaggaagugaagagauccuucuguaaagguuuuuggaauuaugucugcugaauaauaaacuuuuuugaaauaauaaaucugguagaaaaaugagaucuaaaaaaaaaaaaaaaaaaaaaaaaaaaaaaaaaaaaaaaaaaaaaaaaaaaaaaaaaaaaaaaaaaaaaaaaaaaaaaaaaaaaaaaaaaaaaaaaaaaa

SEQ ID NO: 24189 - RNA, 1788 nt, Artificial Sequence
  mRNA product Design b-4 (A100) comprising derived and/or modified sequence from LASV(G3010-SLE-2013;Clade IV)__AIT17344__GPCmut2 (opt1)
aggagagucccgcagucggcguccagcggcucugcuuguucgugugugugucguugcaggccuuauucaagcuuaccaugggccagaucgugaccuucuuccaggaggucccccacgugaucgaggaggugaugaacaucguccugaucgcccucagcauccuggccgugcugaaggggcucuacaacuucgcgaccugcggccugguggggcuggucacguuccuccugcugugcggccgcuccugcaccaccagccucuacaaggggguguacgagcugcagacccuggagcucaacauggagacgcugaacaugugcaugccgcuguccugcaccaagaacaacagccaccacuacaucauggugggcaacgagaccggccucgagcugacccugacgaacaccuccaucaucaaccacaaguucugcaaccucagcgacgcccacaagaagaaccuguacaaccacgcccugauguccaucaucagcaccuuccaccucuccauccccaacuucaaccaguacgaggccaugagcugcgacuucaacgggggcaagaucuccguccaguacaaccugagccacuccuacgccggggacgcggccagccacugcggcaccguggccaacggggugcugcagacguucaugcggauggccuggggcggcuccuacaucgcgcucgacagcggguacggcaagugggacugcaucaugaccuccuaccaguaccugaucauccagaacaccaccugggaggaccacugccaguucagccgccccucccccaucggguaccugggccuccugagccagcggacgcgcgacaucuacaucagccggcgccggcgcggcaccuucaccuggacccuguccgacagcgaggggaaggacacgccgggcggguacugccucacccgguggaugcugaucgaggccgagcugaagugcuucggcaacaccgccgucgccaagugcaacgagaagcacgacgaggaguucugcgacaugcuccgccuguucgacuucugcaagcaggccauccagcggcugaagacccccgcgcagauguccauccagcucaucaacaaggccgugaacgcccugaucaacgaccagcugaucaugaagaaccaccuccgcgacaucauggggauccccuacugcaacuacagcaaguacugguaccugaaccacacgaccaccggcaagaccucccugcccaagugcuggcucgugagcaacggcuccuaccugaacgagacgcacuucagcgacgacaucgagcagcaggccgacaacaugaucaccgagaugcugcagaaggaguacauggagcggcaggggaagaccccgcucggccuggucgaccuguucguguucuccaccagcuucuaccugaucuccaucuuccuccaccuggugaagauccccacgcaccgccacaucgucggcaagagcugccccaagccccaccggcugaaccacauggggaucugcuccugcgggcucuacaagcagccgggcgugcccgugcgcuggaagcggugaggacuaguaauaaggaaacuguaugaaugucugugggcaggaagugaagagauccuucuguaaagguuuuuggaauuaugucugcugaauaauaaacuuuuuugaaauaauaaaucugguagaaaaaugagaucuaaaaaaaaaaaaaaaaaaaaaaaaaaaaaaaaaaaaaaaaaaaaaaaaaaaaaaaaaaaaaaaaaaaaaaaaaaaaaaaaaaaaaaaaaaaaaaaaaaaa

SEQ ID NO: 24190 - RNA, 1788 nt, Artificial Sequence
  mRNA product Design b-4 (A100) comprising derived and/or modified sequence from LASV(G502-SLE-2009;Clade IV)__AIT17126__GPCmut2 (opt1)
aggagagucccgcagucggcguccagcggcucugcuuguucgugugugugucguugcaggccuuauucaagcuuaccaugggccagaucgugaccuucuuccaggaggucccccacgugaucgaggaggugaugaacaucguccugaucgcccucagcauccuggccgugcugaaggggcucuacaacuucgcgaccugcggccugguggggcugcucacguuccugcugcucugcggccgcuccugcaccaccgggcuguacaagggcgucuacgagcugcagacccucgagcugaacauggagacgcugaacaugugcaugccgcucagcugcaccaagaacaacucccaccacuacaucauggugggcaacgagaccgggcuggagcugacccucacgaacaccagcaucaucaaccacaaguucugcaaccuguccgacgcccacaagaagaaccuguacgaccacgcccucaugagcaucaucuccaccuuccaccugagcauccccaacuucaaccaguacgaggccauguccugcgacuucaacggcgggaagaucagcgugcaguacaaccugucccacagcuacgccggcgacgcggccgaccacugcgggaccgucgccaacggcgugcuccagacguucaugcggauggccuggggcggguccuacaucgcgcuggacagcggccgcgggcggugggacugcaucaugaccuccuaccaguaccugaucauccagaacaccaccugggaggaccacugccaguucagccgccccucccccaucggcuaccucggccugcugagccagcggacgcgcgacaucuacaucucccggcgccggcgcgggaccuucaccuggacccucagcgacagcgagggcaaggacacgcccgggggcuacugccugacccgguggaugcugaucgaggccgagcucaagugcuucgggaacaccgccguggccaagugcaacgagaagcacgacgaggaguucugcgacaugcugcgccuguucgacuucugcaagcaggccauccagcggcucaaggcgccggcccagauguccauccagcugaucaacaaggccgucaacgcccugaucaacgaccagcucgugaugaagaaccaccuccgcgacaucaugggcauccccuacugcaacuacagccgguacugguaccugaaccacaccacgaccggccgcaccucccugcccaagugcuggcuggugagcaacggguccuaccugaacgagacccacuucagcgacgacaucgagcagcaggccgacaacaugaucacggagaugcuccagaaggaguacauggagcggcagggcaagaccccgcuggggcuggucgaccuguucguguucuccaccagcuucuaccucaucuccaucuuccugcaccuggugaagauccccacccaccgccacaucgucggcaagagcugccccaagccccaccggcucaaccacauggggaucugcuccugcggccuguacaagcagccgggcgugcccgugaaguggaagcgcugaggacuaguaauaaggaaacuguaugaaugucugugggcaggaagugaagagauccuucuguaaagguuuuuggaauuaugucugcugaauaauaaacuuuuuugaaauaauaaaucugguagaaaaaugagaucuaaaaaaaaaaaaaaaaaaaaaaaaaaaaaaaaaaaaaaaaaaaaaaaaaaaaaaaaaaaaaaaaaaaaaaaaaaaaaaaaaaaaaaaaaaaaaaaaaaaa

SEQ ID NO: 24191 - RNA, 1788 nt, Artificial Sequence
  mRNA product Design b-4 (A100) comprising derived and/or modified sequence from LASV(G733-SLE-2010;Clade IV)__AIT17154__GPCmut2 (opt1)
aggagagucccgcagucggcguccagcggcucugcuuguucgugugugugucguugcaggccuuauucaagcuuaccaugggccagaucgugaccuucuuccaggaggucccccacgugaucgaggaggugaugaacaucguccugaucgcccucagcauccuggccgugcugaaggggcucuacaacuucgcgaccugcggcaucguggggcuggucuccuuccugcuccugugcggccgcagcugcacgaccucccuguacaaggggguguacgagcuccagacccuggagcugaacauggagacccucaacaugugcaugccgcugagcugcacgaagaacaacucccaccacuacaucauggugggcaacgagaccggccuggagcucacccugaccaacacgagcaucaucaaccacaaguucugcaaccuguccgacgcccacaagaagaaccucuacgaccacgcccugaugagcaucaucuccaccuuccaccugagcauccccaacuucaaccaguacgaggccauguccugcgacuucaacgggggcaagaucagcguccaguacaaccucucccacagcuacgccggggacgcggccaaccacugcggcaccaucgccaacggggugcugcagaccuucaugcggauggccuggggcggcuccuacaucgcgcuggacagcgggcgcgaccggugggacugcaucaugacguccuaccaguaccucaucauccagaacaccaccugggaggaccacugccaguucagccgccccucccccaucggcuaccuggggcugcucagccagcggacccgcgacaucuacaucagccggcgccggcgcggcacguucaccuggacccuguccgacagcgagggcaaggacacccccgggggcuacugccugacgcgguggaugcucaucgaggccgagcugaagugcuucgggaacaccgccguggccaagugcaacgagaagcacgacgaggaguucugcgacaugcugcgccucuucgacuucugcaagcaggccauccagcggcugaaggcgccggcccagauguccauccagcugaucaacaaggccgucaacgcccucaucaacgaccagcugaucaugaagaaccaccuccgcgacaucaugggcauccccuacugcaacuacagcaaguacugguaccugaaccacaccaccacggggaagaccucccugcccaagugcuggcuggugagcaacggcuccuaccucaacgagacccacuucagcgacgacaucgagcagcaggccgacaacaugaucaccgagaugcugcagaaggaguacauggagcggcagggcaagacgccgcuggggcucguggaccuguucgucuucuccaccagcuucuaccugaucuccaucuuccugcaccucgugaagauccccacccaccgccacguggucggcaagagcugccccaagccccaccggcugaaccacauggggaucugcuccugcggccuguacgggcagccgggcgugcccgugaaguggaagcgcugaggacuaguaauaaggaaacuguaugaaugucugugggcaggaagugaagagauccuucuguaaagguuuuuggaauuaugucugcugaauaauaaacuuuuuugaaauaauaaaucugguagaaaaaugagaucuaaaaaaaaaaaaaaaaaaaaaaaaaaaaaaaaaaaaaaaaaaaaaaaaaaaaaaaaaaaaaaaaaaaaaaaaaaaaaaaaaaaaaaaaaaaaaaaaaaaa

SEQ ID NO: 24192 - RNA, 1788 nt, Artificial Sequence
  mRNA product Design b-4 (A100) comprising derived and/or modified sequence from MOPV/LASV reassortant(IGS-1;Clade IV)__AFY05576__GPCmut2 (opt1)
aggagagucccgcagucggcguccagcggcucugcuuguucgugugugugucguugcaggccuuauucaagcuuaccaugggccagaucgugaccuucuuccaggaggucccccacgugaucgaggaggugaugaacaucguccugaucgcccucagcgugcuggccgugcugaaggggcucuacaacuucgcgaccugcggccuggucgggcuggugacguuccuccugcugugcggccgcuccugcaccaccagccucuacaaggggguguacgagcugcagacccuggagcucaacauggagacgcugaacaugugcaugccgcuguccugcaccaagaacaacagccaccacuacaucauggucggcaacgagaccggccucgagcugacccugacgaacaccuccaucaucaaccacaaguucugcaaccucagcgacgcccacaagaagaaccuguacgaccacgcccugauguccaucaucagcaccuuccaccucuccauccccaacuucaaccaguacgaggccaugagcugcgacuucaacgggggcaagaucuccgugcaguacaaccugagccacuccuacgccggggacgcggccaaccacugcggcaccguggccaacgggguccugcagacguucaugcggauggccuggggcggcagcuacaucgcgcucgacuccgggcgcggcaacugggacugcaucaugaccagcuaccaguaccugaucauccagaacaccaccugggaggaccacugccaguucucccggcccagccccaucggguaccugggccuccugucccagcgcacgcgggacaucuacaucagccgccggcgccggggcaccuucaccuggacccugagcgacuccgagggggaggacacgccgggcggguacugccucacccgcuggaugcugaucgaggccgagcugaagugcuucggcaacaccgccguggccaagugcaacgagaagcacgacgaggaguucugcgacaugcuccggcuguucgacuucugcaagcaggccauccagcgccugaaggcgcccgcccagaugagcauccagcucaucaacaaggccgugaacgcccugaucaacgaccagcugaucaugaagaaccaccuccgggacaucauggggauccccuacugcaacuacuccaaguacugguaccugaaccacaccacgaccggccgcaccagccugcccaagugcuggcucgucuccaacggcagcuaccugaacgagacccacuucuccgacgacaucgagcagcaggccgacaacaugaucacggagaugcugcagaaggaguacauggagcggcaggggaagaccccgcucggccugguggaccuguucguguucagcaccuccuucuaccugaucagcaucuuccuccaccuggucaagauccccacccaccgccacaucguggggaaguccugccccaagccccaccggcugaaccacaugggcaucugcagcugcgggcucuacaagcagccgggcgugcccgucaaguggaagcgcugaggacuaguaauaaggaaacuguaugaaugucugugggcaggaagugaagagauccuucuguaaagguuuuuggaauuaugucugcugaauaauaaacuuuuuugaaauaauaaaucugguagaaaaaugagaucuaaaaaaaaaaaaaaaaaaaaaaaaaaaaaaaaaaaaaaaaaaaaaaaaaaaaaaaaaaaaaaaaaaaaaaaaaaaaaaaaaaaaaaaaaaaaaaaaaaaa

SEQ ID NO: 24193 - RNA, 1788 nt, Artificial Sequence
  mRNA product Design b-4 (A100) comprising derived and/or modified sequence from LASV(LM765-SLE-2012;Clade IV)__AIT17814__GPCmut2 (opt1)
aggagagucccgcagucggcguccagcggcucugcuuguucgugugugugucguugcaggccuuauucaagcuuaccaugggccagaucgugaccuucuuccaggaggucccccacgugaucgaggaggugaugaacaucguccugaucgcccucagcauccuggccgugcugaaggggcucuacaacuucgcgaccugcggccugguggggcuggucacguuccuccugcugugcggccgcuccugcaccaccagccucuacaaggggguguacgagcugcagacccuggagcucaacauggagacgcugaacaugugcaugccgcuguccugcaccaagaacaacagccaccacuacaucauggugggcaacgagaccggccucgagcugacccugacgaacaccuccaucaucgaccacaaguucugcaaccucagcgacgcccaccggaagaaccuguacgaccacgcccugauguccaucaucagcaccuuccaccucuccauccccaacuucaaccaguacgaggccaugagcugcgacuucaacgggggcaagaucuccguccaguacaaccugagccacuccuacgccaaggacgcggccgaccacugcgggaccguggccaacggcgugcugcagacguucaugcgcauggccuggggcgggagcuacaucgcgcucgacuccggccgggggcgcugggacugcaucaugaccagcuaccaguaccugaucauccagaacaccaccugggaggaccacugccaguucucccggcccagccccaucggcuaccuggggcuccugucccagcgcacgcgggacaucuacaucagccgccggcgccggggcaccuucaccuggacccugagcgacuccgagggcaaggacacgcccgggggcuacugccucacccgcuggaugcugaucgaggccgagcugaagugcuucgggaacaccgccgucgccaagugcaacgagaagcacgacgaggaguucugcgacaugcuccggcuguucgacuucugcaagcaggccauccagcgccugaaggcgccggcccagaugagcauccagcucaucaacaaggccgugaacgcccugaucaacgaccagcugaucaugaagaaccaccuccgggacaucaugggcauccccuacugcaacuacuccaaguacugguaccugaaccacaccacgaccgggaagaccagccugcccaagugcuggcucguguccaacggcagcuaccugaacgagacccacuucuccgacgacaucgagcagcaggccgacaacaugaucacggagaugcugcagaaggaguacauggagcgccagggcaagaccccgcucgggcuggucgaccuguucguguucagcaccuccuucuaccugaucagcaucuuccuccaccuggugaagauccccacccaccggcacaucgucggcaagcccugccccaagccgcaccgccugaaccacauggggaucugcuccugcggccucuacaagcagcccggggugcccgugaaguggaagcggugaggacuaguaauaaggaaacuguaugaaugucugugggcaggaagugaagagauccuucuguaaagguuuuuggaauuaugucugcugaauaauaaacuuuuuugaaauaauaaaucugguagaaaaaugagaucuaaaaaaaaaaaaaaaaaaaaaaaaaaaaaaaaaaaaaaaaaaaaaaaaaaaaaaaaaaaaaaaaaaaaaaaaaaaaaaaaaaaaaaaaaaaaaaaaaaaa

SEQ ID NO: 24194 - RNA, 1788 nt, Artificial Sequence
  mRNA product Design b-4 (A100) comprising derived and/or modified sequence from LASV(LM776-SLE-2012;Clade IV)__AIT17824__GPCmut2 (opt1)
aggagagucccgcagucggcguccagcggcucugcuuguucgugugugugucguugcaggccuuauucaagcuuaccaugggccagaucgugaccuucuuccaggaggucccccacgugaucgaggaggugaugaacaucguccugaucgcccucagcauccuggccgugcugaaggggcucuacaacuucgcgaccugcggccugguggggcuggucacguuccuccugcugugcggccgcuccugcaccaccagcguguacaaggggguguacgagcuccagacccuggagcugaacauggagacgcucaacaugugcaugccgcuguccugcaccaagaacaacagccaccacuacaucauggucggcaacgagaccggccuggagcucacccugacgaacaccuccaucaucaaccacaaguucugcaaccugagcgacgcccacaagaagaaccucuacgaccacgcccugauguccaucaucagcaccuuccaccuguccauccccaacuucaaccaguacgaggccaugagcugcgacuucaacgggggcaagaucuccgugcaguacaaccucagccacuccuacgccggggacgcggccaaccacugcggcaccguggccaacgggguccugcagacguucaugcggauggccuggggcggcagcuacaucgcgcuggacuccgggcacggcaagugggacugcaucaugaccagcuaccaguaccucaucauccagaacaccaccugggaggaccacugccaguucucccgccccagccccaucggguaccugggccugcucucccagcggacgcgcgacaucuacaucagccggcgccggcgcggcaccuucaccuggacccugagcgacuccgaggggaaggacacgccgggcggguacugccugacccgguggaugcucaucgaggccgagcugaagugcuucggcaacaccgccguggccaagugcaacgagaagcacgacgaggaguucugcgacaugcugcgccucuucgacuucugcaagcaggccauccagcggcugaaggcgcccgcccagaugagcauccagcugaucaacaaggccgugaacgcccucaucaacgaccagcugaucaugaagaaccaccuccgcgacaucauggggauccccuacugcaacuacuccaaguacugguaccugaaccacaccacgaccggcaagaccagccugcccaagugcuggcuggucuccaacggcagcuaccucaacgagacccacuucuccgacgacaucgagcagcaggccgacaacaugaucacggagaugcugcagaaggaguacauggagcggcaggggaagaccccgcugggccucguggaccuguucguguucagcaccuccuucuaccugaucagcaucuuccugcaccucgucaagauccccacccaccgccacaucguggggaaguccugccccaagccccaccggcugaaccacaugggcaucugcagcugcgggcuguacaagcagccgggcgugcccguccgcuggaagcggugaggacuaguaauaaggaaacuguaugaaugucugugggcaggaagugaagagauccuucuguaaagguuuuuggaauuaugucugcugaauaauaaacuuuuuugaaauaauaaaucugguagaaaaaugagaucuaaaaaaaaaaaaaaaaaaaaaaaaaaaaaaaaaaaaaaaaaaaaaaaaaaaaaaaaaaaaaaaaaaaaaaaaaaaaaaaaaaaaaaaaaaaaaaaaaaaa

SEQ ID NO: 24195 - RNA, 1788 nt, Artificial Sequence
  mRNA product Design b-4 (A100) comprising derived and/or modified sequence from LASV(Mad39;Clade IV)__ANH09722__GPCmut2 (opt1)
aggagagucccgcagucggcguccagcggcucugcuuguucgugugugugucguugcaggccuuauucaagcuuaccaugggccagaucgugaccuucuuccaggaggucccccacgugaucgaggaggugaugaacaucguccugaucgcccucagcauccuggccgugcugaaggggcucuacaacguggcgaccugcggccugaucgggcuggucacguuccuccugcugugcggccgcuccugcaccaccacccucuacaaggggguguacgagcugcaggcccuggagcucaacauggagacgcugaacaugugcaugccgcugagcugcaccaagaacaacucccaccacuacauccgggugggcaacgagaccggccucgagcugacccugacgaacaccagccucaucaaccacaaguucugcaaccuguccgacgcccacaagaagaaccuguacgaccacgcccucaugagcaucaucuccaccuuccaccugagcauccccaacuucaaccaguacgaggccauguccugcgacuucaacgacgggaagaucagcguccaguacaaccugucccacaccuacgcgggcgacacggccaaccacugcgggaccguggccaacggcgugcuccagaccuucaugcgcauggccuggggcgggagcuacaucgcgcuggacuccggccgcgggggcugggacugcaucaugaccagcuaccaguaccugaucauccagaacacgaccugggaggaccacugccaguucucccggcccagccccaucggguaccucggccugcugucccagcggacccgcgacaucuacaucagccggcgccggcgcggcaccuucacguggacccucuccgacagcgaggggaaggacaccccgggcggguacugccugacccgguggaugcugaucgaggccgagcucaagugcuucggcaacacggccgucgccaagugcaacgagaagcacgacgaggaguucugcgacaugcugcgccuguucgacuucugcaagcaggccauccagcggcucaaggcgcccgcccagaugagcauccagcugaucaacaaggccgugaacgcccugaucaacgaccagcucaucaugaagaaccaccuccgcgacaucauggggauccccuacugcaacuacuccaaguacugguaccugaaccacaccgugaccggcaagaccagccugcccaagugcuggcuggucuccaacggcagcuaccugaacgagacgcacuucuccgacgacaucgagcagcaggccgacaacaugaucaccgagaugcuccagaaggaguacauggagcggcaggggaagaccccgcugggccugguggaccuguucguguucagcaccuccuucuaccucaucagcaucuuccugcaccuggucaagauccccacgcaccgccacgugguggggaagcccugccccaagccgcaccggcucaaccacaugggcaucugcuccugcggguucuacaagcagcccggcguccccgugcgcuggaagcggugaggacuaguaauaaggaaacuguaugaaugucugugggcaggaagugaagagauccuucuguaaagguuuuuggaauuaugucugcugaauaauaaacuuuuuugaaauaauaaaucugguagaaaaaugagaucuaaaaaaaaaaaaaaaaaaaaaaaaaaaaaaaaaaaaaaaaaaaaaaaaaaaaaaaaaaaaaaaaaaaaaaaaaaaaaaaaaaaaaaaaaaaaaaaaaaaa

SEQ ID NO: 24196 - RNA, 1788 nt, Artificial Sequence
  mRNA product Design b-4 (A100) comprising derived and/or modified sequence from LASV(Z0947-SLE-2011;Clade IV)__AIT17840__GPCmut2 (opt1)
aggagagucccgcagucggcguccagcggcucugcuuguucgugugugugucguugcaggccuuauucaagcuuaccaugggccagaucgugaccuucuuccaggaggucccccacgugaucgaggaggugaugaacaucguccugaucgcccucagcauccuggccgugcugaaggggcucuacaacuucgcgaccugcggccugguggggcuggucacguuccuccugcugugcggccgcuccugcaccaucagccucuacaaggggguguacgagcugcagacccuggagcucaacauggagacccugaacaugugcaugccgcuguccugcacgaagaacaacagccaccacuacaucauggugggcaacgagaccggccucgagcugacccugaccaacacguccaucaucaaccacaaguucugcaaccucagcgacgcccacaagaagaaccuguacgaccacgcccugauguccaucaucagcaccuuccaccucuccauccccaacuucaaccaguacgaggccaugagcugcgacuucaacgggggcaagaucuccguccaguacaaccugagccacuccuacgccggggacgcggccaaccacugcggcaccguggccaacggggugcugcagaccuucaugcggauggccuggggcggcagcuacaucgcgcucgacuccgggcgcgaccggugggacugcaucaugacgagcuaccaguaccugaucauccagaacaccaccugggaggaccacugccaguucucccgccccagccccaucggcuaccuggggcuccugucccagcggacccgcgacaucuacaucagccggcgccggcgcggcacguucaccuggacccugagcgacuccgagggcaaggacacccccgggggcuacugccucacgcgguggaugcugaucgaggccgagcugaagugcuucgggaacaccgccgucgccaagugcaacgagaagcacgacgaggaguucugcgacaugcuccgccuguucgacuucugcaagcaggccauccagcggcugaaggcgccggcccagaugagcauccagcucaucaacaaggccgugaacgcccugaucaacgaccagcugaucaugaagaaccaccuccgcgacaucaugggcauccccuacugcaacuacuccaaguacugguaccugaaccacaccaccacggggaagaccagccugcccaagugcuggcucguguccaacggcagcuaccugaacgagacccacuucuccgacgacaucgagcagcaggccgacaacaugaucaccgagaugcugcagaaggaguacauggagcggcagggcaagacgccgcucgggcuggucgaccuguucguguucagcaccuccuucuaccugaucagcaucuuccuccaccuggugaagauccccacccaccgccacaucgucggcaagcccugccccaagccgcaccggcugaaccacauggggaucugcuccugcggccucuacaagcagcccggggugcccgugaaguggaagcgcugaggacuaguaauaaggaaacuguaugaaugucugugggcaggaagugaagagauccuucuguaaagguuuuuggaauuaugucugcugaauaauaaacuuuuuugaaauaauaaaucugguagaaaaaugagaucuaaaaaaaaaaaaaaaaaaaaaaaaaaaaaaaaaaaaaaaaaaaaaaaaaaaaaaaaaaaaaaaaaaaaaaaaaaaaaaaaaaaaaaaaaaaaaaaaaaaa

SEQ ID NO: 24197 - RNA, 1788 nt, Artificial Sequence
  mRNA product Design b-4 (A100) comprising derived and/or modified sequence from LASV(Josiah;Clade IV)__NP_694870__GPCmut2 (opt4)
aggagagucccgcagucggcguccagcggcucugcuuguucgugugugugucguugcaggccuuauucaagcuuaccaugggccagaucgugaccuucuuccaggaggugccccacgugaucgaggaggugaugaacaucgugcugaucgcccugagcgugcuggccgugcugaagggccuguacaacuucgccaccugcggccuggugggccuggugaccuuccugcugcugugcggcagaagcugcaccaccagccuguacaagggcguguacgagcugcagacccuggagcugaacauggagacccugaacaugugcaugccccugagcugcaccaagaacaacagccaccacuacaucauggugggcaacgagaccggccuggagcugacccugaccaacaccagcaucaucaaccacaaguucugcaaccugagcgacgcccacaagaagaaccuguacgaccacgcccugaugagcaucaucagcaccuuccaccugagcauccccaacuucaaccaguacgaggccaugagcugcgacuucaacggcggcaagaucagcgugcaguacaaccugagccacagcuacgccggcgacgccgccaaccacugcggcaccguggccaacggcgugcugcagaccuucaugagaauggccuggggcggcagcuacaucgcccuggacagcggcagaggcaacugggacugcaucaugaccagcuaccaguaccugaucauccagaacaccaccugggaggaccacugccaguucagcagacccagccccaucggcuaccugggccugcugagccagagaaccagagacaucuacaucagcagaagaagaagaggcaccuucaccuggacccugagcgacagcgagggcaaggacacccccggcggcuacugccugaccagauggaugcugaucgaggccgagcugaagugcuucggcaacaccgccguggccaagugcaacgagaagcacgacgaggaguucugcgacaugcugagacuguucgacuucugcaagcaggccauccagagacugaaggcccccgcccagaugagcauccagcugaucaacaaggccgugaacgcccugaucaacgaccagcugaucaugaagaaccaccugagagacaucaugggcauccccuacugcaacuacagcaaguacugguaccugaaccacaccaccaccggcagaaccagccugcccaagugcuggcuggugagcaacggcagcuaccugaacgagacccacuucagcgacgacaucgagcagcaggccgacaacaugaucaccgagaugcugcagaaggaguacauggagagacagggcaagaccccccugggccugguggaccuguucguguucagcaccagcuucuaccugaucagcaucuuccugcaccuggugaagauccccacccacagacacaucgugggcaagagcugccccaagccccacagacugaaccacaugggcaucugcagcugcggccuguacaagcagcccggcgugcccgugaaguggaagagaugaggacuaguaauaaggaaacuguaugaaugucugugggcaggaagugaagagauccuucuguaaagguuuuuggaauuaugucugcugaauaauaaacuuuuuugaaauaauaaaucugguagaaaaaugagaucuaaaaaaaaaaaaaaaaaaaaaaaaaaaaaaaaaaaaaaaaaaaaaaaaaaaaaaaaaaaaaaaaaaaaaaaaaaaaaaaaaaaaaaaaaaaaaaaaaaaa

SEQ ID NO: 24198 - RNA, 1785 nt, Artificial Sequence
  mRNA product Design b-4 (A100) comprising derived and/or modified sequence from LASV(LP;Clade I)__AAF86701__GPCmut2 (opt4)
aggagagucccgcagucggcguccagcggcucugcuuguucgugugugugucguugcaggccuuauucaagcuuaccaugggccagaucaucaccuucuuccaggaggugccccacgugaucgaggaggugaugaacaucgugcugaucgcccugagccugcuggccauccugaagggccuguacaacaucgccaccugcggcaucaucggccugguggccuuccuguuccugugcggcaagagcugcagccugacccugaagggcggcuacgagcugcagacccuggagcugaacauggagacccugaacaugugcaugccccugagcugcaccaagaacagcagccaccacuacaucagagugggcaacgagaccggccuggagcugacccugaccaacaccagcaucaucaaccacaaguucugcaaccugagcgacgcccacaagaagaaccuguacgaccacgcccugaugagcaucaucagcaccuuccaccugagcauccccaacuucaaccaguacgaggccaugagcugcgacuucaacggcggcaagaucagcgugcaguacaaccugagccacagcuacgccggcgacgccgccgagcacugcggcaccguggccaacggcgugcugcagaccuucaugagaauggccuggggcggcagauacaucgcccuggacagcggcaagggcaacugggacugcaucaugaccagcuaccaguaccugaucauccagaacaccaccugggaggaccacugccaguucagcagacccagccccaucggcuaccugggccugcugagccagagaaccagagacaucuacaucagcagaagaagaagaggcaccuucaccuggacccugagcgacagcgagggcaacgagacccccggcggcuacugccugaccagauggaugcugaucgaggccgagcugaagugcuucggcaacaccgccguggccaagugcaacgagaagcacgacgaggaguucugcgacaugcugagacuguucgacuucugcaagcaggccaucagaagacugaaggcccccgcccagaugagcauccagcugaucaacaaggccgugaacgcccugaucaacgaccagcugaucaugaagaaccaccugagagacaucaugggcauccccuacugcaacuacagcaaguacugguaccugaaccacaccagcagcggcagaaccagccugcccaagugcuggcugaucagcaacggcagcuaccugaacgagacccaguucagcgacgacaucgagcagcaggccgacaacaugaucaccgagaugcugcagaaggaguacaucgagagacagggcaagaccccccugggccugguggacaucuucaucuucagcaccagcuucuaccugaucagcaucuuccugcaccugaucaagauccccacccacagacacaucgugggcaagcccugccccaagccccacagacugaaccacaugggcgugugcagcugcggccuguacaagcaccccggcgugcccaccaaguggaagagaugaggacuaguaauaaggaaacuguaugaaugucugugggcaggaagugaagagauccuucuguaaagguuuuuggaauuaugucugcugaauaauaaacuuuuuugaaauaauaaaucugguagaaaaaugagaucuaaaaaaaaaaaaaaaaaaaaaaaaaaaaaaaaaaaaaaaaaaaaaaaaaaaaaaaaaaaaaaaaaaaaaaaaaaaaaaaaaaaaaaaaaaaaaaaaaaaa

SEQ ID NO: 24199 - RNA, 1785 nt, Artificial Sequence
  mRNA product Design b-4 (A100) comprising derived and/or modified sequence from LASV(803213;Clade II)__AAF86703__GPCmut2 (opt4)
aggagagucccgcagucggcguccagcggcucugcuuguucgugugugugucguugcaggccuuauucaagcuuaccaugggccagaucaucaccuucuuccaggaggugccccacgugaucgaggaggugaugaacaucgugcugaucgcccugagccugcuggccauccugaagggcaucuacaacguggccaccugcggccuguucggccugaucagcuuccugcugcugugcggcagaagcugcagcgugaccuacaagggcguguacgagcugcagacccuggagcugaacauggccaaccugaacaugugcaugccccugagcugcaccaagaacaacagccaccacuacaucauggugggcaacgagaccggccuggagcugacccugaccaacaccagcaucaucaaccacaaguucugcaaccugagcgacgcccacaagaagaaccuguacgaccacgcccugaugagcaucaucagcaccuuccaccugagcauccccaacuucaaccaguacgaggccaugagcugcgacuucaacggcggcaagaucagcgugcaguacaaccugagccacagcuucgccguggacgccgccaaccacugcggcaccaucgccaacggcgugcugcagaccuucaugagaauggccuggggcggcagcuacaucgcccuggacagcggcaagggcaacugggacugcaucaugaccagcuaccaguaccugaucauccagaacaccaccugggaggaccacugccaguucagcagacccagccccaucggcuaccugggccugcugagccagagaaccagagacaucuacaucagcagaagaagaagaggcaccuucaccuggacccugagcgacagcgagggcaacgaggcccccggcggcuacugccugaccagauggaugcugaucgaggccgagcugaagugcuucggcaacaccgccguggccaagugcaacgagaagcacgacgaggaguucugcgacaugcugagacuguucgacuucugcaagcaggccaucaagagacugaagacccccgcccagaugagcauccagcugaucaacaaggccgugaacgcccugaucaacgaccagcugaucaugaagaaccaccugagagacaucaugggcauccccuacugcaacuacagcagauacugguaccugaaccacaccgugaccggcaagaccagccugcccagaugcuggcuggugagcaacggcagcuaccugaacgagacccacuucagcgacgacaucgagcagcaggccgacaacaugaucaccgagaugcugcagaaggaguacauggacagacagggcaagaccccccugggccugguggaccuguucguguucagcaccagcuucuaccugaucagcaucuuccugcaccuggugaagauccccacccacagacacaucgugggcaagcccugccccaagccccacagacugaaccacaugggcaucugcagcugcggccuguacaagcaccccggcgugcccgugaaguggaagagaugaggacuaguaauaaggaaacuguaugaaugucugugggcaggaagugaagagauccuucuguaaagguuuuuggaauuaugucugcugaauaauaaacuuuuuugaaauaauaaaucugguagaaaaaugagaucuaaaaaaaaaaaaaaaaaaaaaaaaaaaaaaaaaaaaaaaaaaaaaaaaaaaaaaaaaaaaaaaaaaaaaaaaaaaaaaaaaaaaaaaaaaaaaaaaaaaa

SEQ ID NO: 24200 - RNA, 1785 nt, Artificial Sequence
  mRNA product Design b-4 (A100) comprising derived and/or modified sequence from LASV(GA391;Clade III)__CAA36645__GPCmut2 (opt4)
aggagagucccgcagucggcguccagcggcucugcuuguucgugugugugucguugcaggccuuauucaagcuuaccaugggccagaucgugaccuucuuccaggaggugccccacgugaucgaggaggugaugaacaucgugcugaucgcccugagcauccuggccauccugaagggccuguacaacguggccaccugcggccugaucggccuggugaccuuccugcugcugagcggcagaagcugcagccugaucuacaagggcaccuacgagcugcagacccuggagcugaacauggagacccugaacaugugcaugccccugagcugcaccaagaacaacagccaccacuacaucagagugggcaacgagaccggccuggagcugacccugaccaacaccagcauccugaaccacaaguucugcaaccugagcgacgcccacaagagaaaccuguacgaccacagccugaugagcaucaucagcaccuuccaccugagcauccccaacuucaaccaguacgaggccaugagcugcgacuucaacggcggcaagaucaccgugcaguacaaccugagccacagcuucgccguggacgccgccggccacugcggcacccuggccaacggcgugcugcagaccuucaugagaauggccuggggcggcagcuacaucgcccuggacagcggcagaggcaacugggacugcaucaugaccagcuaccaguaccugaucauccagaacaccaccugggacgaccacugccaguucagcagacccagccccaucggcuaccugggccugcugagccagagaaccagagacaucuacaucagcagaagaagaagaggcaccuucaccuggacccugagcgacagcgagggcaacgagacccccggcggcuacugccugaccagauggaugcugaucgaggccgagcugaagugcuucggcaacaccgccguggccaagugcaacgagaagcacgacgaggaguucugcgacaugcugagacuguucgacuucugcaagcaggccaucagaagacugaagacccccgcccagaugagcauccagcugaucaacaaggccgugaacgcccugaucaacgaccagcugaucaugaagaaccaccugagagacaucaugggcauccccuacugcaacuacagcagauacugguaccugaaccacaccagcaccggcaagaccagccugcccagaugcuggcugaucagcaacggcagcuaccugaacgagaccaaguucagcgacgacaucgagcagcaggccgacaacaugaucaccgagaugcugcagaaggaguacaucgacagacagggcaagaccccccugggccugguggaccuguucguguucagcaccagcuucuaccugaucagcaucuuccugcaccuggugaagauccccacccacagacacaucgugggcaagcccugccccaagccccacagacugaaccacaugggcaucugcagcugcggccuguacaagcagcccggcgugcccgugagauggaagagaugaggacuaguaauaaggaaacuguaugaaugucugugggcaggaagugaagagauccuucuguaaagguuuuuggaauuaugucugcugaauaauaaacuuuuuugaaauaauaaaucugguagaaaaaugagaucuaaaaaaaaaaaaaaaaaaaaaaaaaaaaaaaaaaaaaaaaaaaaaaaaaaaaaaaaaaaaaaaaaaaaaaaaaaaaaaaaaaaaaaaaaaaaaaaaaaaa

SEQ ID NO: 24201 - RNA, 1788 nt, Artificial Sequence
  mRNA product Design b-4 (A100) comprising derived and/or modified sequence from LASV(AV;Clade V)__CCA30314__GPCmut2 (opt4)
aggagagucccgcagucggcguccagcggcucugcuuguucgugugugugucguugcaggccuuauucaagcuuaccaugggccagaucgugaccuucuuccaggaggugccccacgugaucgaggaggugaugaacaucgugcugaucgcccugagcauccuggccgugcugaagggccuguacaacaucgccaccugcggccugaucggccugaucaccuuccugcugcugugcggcagaagcugcagcagcaaccuguacaagggcguguacgagcugcagagccuggaccugaacauggagacccugaacaugugcaugccccugagcugcaccaagaacaacagccaccacuacaucagagugggcaacgacaccggccuggagcugacccugaccaacaccagcauccugaaccacaaguucugcaaccugagcgacgcccacaagaaggaccuguacgaccacgcccugaugagcaucaucagcaccuuccaccugagcauccccaacuucaaccaguacgaggccaugagcugcgacuucaacggcggcaagaucagcgugcaguacaaccugagccacagcuacgccaucgacgccgccaaccacugcggcaccguggccaacggcauccugcagaccuucaugagaauggccuggggcggcagcuacaucgcccuggacagcggcagaggcaacugggacugcaucaugaccagcuaccaguaccugaucauccagaacaccaccugggagaaccacugccaguucagcagacccagccccaucggcuaccugggccugcugagccagagaaccagagacaucuacaucagcagaagaagaagaggcaccuucaccuggacccugagcgacagcgagggcaacgccacccccggcggcuacugccugaccagauggaugcugaucgaggccgagcugaagugcuucggcaacaccgccguggccaagugcaacgagaagcacgacgaggaguucugcgacaugcugagacuguucgacuucugcaagcaggccaucagcagacugaagagccccgcccagaugagcauccagcugaucaacaaggccgugaacgcccugaucaacgaccagcugaucaugaagaaccaccugagagacaucaugggcauccccuacugcaacuacagcaaguacugguaccugaaccacaccaucaccggcaagaccagccugcccaagugcuggcuggugagcaacggcagcuaccugaacgagacccacuucagcgacgacaucgagcagcaggccgacaacaugaucaccgagaugcugcagaaggaguacauggagagacagggcaagaccccccugggccugguggaccuguucguguucagcaccagcuucuaccugaucagcaucuuccugagacuggugaagauccccacccacagacacaucgugggcaagcccugccccaagccccacagacugaaccacaugggcaucugcagcugcggccuguacaagcagcccggcgugcccgugagauggaagagaugaggacuaguaauaaggaaacuguaugaaugucugugggcaggaagugaagagauccuucuguaaagguuuuuggaauuaugucugcugaauaauaaacuuuuuugaaauaauaaaucugguagaaaaaugagaucuaaaaaaaaaaaaaaaaaaaaaaaaaaaaaaaaaaaaaaaaaaaaaaaaaaaaaaaaaaaaaaaaaaaaaaaaaaaaaaaaaaaaaaaaaaaaaaaaaaaa

SEQ ID NO: 24202 - RNA, 1785 nt, Artificial Sequence
  mRNA product Design b-4 (A100) comprising derived and/or modified sequence from LASV(Togo/2016/7082;Clade VI)__AMR44577__GPCmut2 (opt4)
aggagagucccgcagucggcguccagcggcucugcuuguucgugugugugucguugcaggccuuauucaagcuuaccaugggccagaucaucaccuucuuccaggaggugccccacgugaucgaggaggugaugaacaucgugcugaucgcccugagccugcuggccauccugaagggcguguacaacguggccaccugcggcaucaucggccuggugaccuuccuguuccugugcggcagaagcugcagccugaucuacaagggcagcuacgagcugcagacccuggagcugaacauggagacccugaacaugugcaugccccugagcugcaccaagaacagcagccaccacuacaucagagugggcaacgagaccggccuggagcugacccugaccaacaccagcaucaucaaccacaaguucugcaaccugagcgacgcccacaagagaaaccuguacgaccacgcccugaugagcauccugagcaccuuccaccugagcauccccaacuucaaccaguacgaggccaugagcugcgacuucaacggcggcaagaucagcgugcaguacaaccugagccacgccuacgccguggacgccgccgagcacugcggcaccguggccaacggcgugcugcagaccuucaugagaauggccuggggcggcagcuacaucgcccuggacagcggcagaggcaacugggacugcaucaugaccagcuaccaguaccugaucauccagaacaccaccugggaggaccacugccaguucagcagacccagccccaucggcuaccugggccugcugagccagagaaccagagacaucuacaucagcagaagaagaagaggcaccuucaccuggacccugagcgacagcgagggcaacgagacccccggcggcuacugccugaccagauggaugcugaucgaggccgagcugaagugcuucggcaacaccgccguggccaagugcaacgagaagcacgacgaggaguucugcgacaugcugagacuguucgacuucugcaagcaggccauccagagacugaagagccccgcccagaugagcauccagcugaucaacaaggccgugaacgcccugaucaacgaccagcugaucaugaagaaccaccugagagacaugaugggcauccccuacugcaacuacagcaaguacugguaccugaaccacaccagcagcggcagaaccagccugcccaagugcuggcuggugagcaacggcagcuaccugaacgagacccacuucagcgacgacaucgagcagcaggccgacaacaugaucaccgagaugcugcagaaggaguacaucgacagacagggcaagaccccccugggccugguggaccuguucguguucagcaccagcuucuaccugaucagcaucuuccugcaccugaucaagauccccacccacagacacaucgugggcaagcccugccccaagccccacagacugaaccacaugggcaucugcagcugcggccuguacaagcagcccggcgugcccaccagauggaagagaugaggacuaguaauaaggaaacuguaugaaugucugugggcaggaagugaagagauccuucuguaaagguuuuuggaauuaugucugcugaauaauaaacuuuuuugaaauaauaaaucugguagaaaaaugagaucuaaaaaaaaaaaaaaaaaaaaaaaaaaaaaaaaaaaaaaaaaaaaaaaaaaaaaaaaaaaaaaaaaaaaaaaaaaaaaaaaaaaaaaaaaaaaaaaaaaaa

SEQ ID NO: 24203 - RNA, 1785 nt, Artificial Sequence
  mRNA product Design b-4 (A100) comprising derived and/or modified sequence from LASV(KAK-428;Clade n.d. (VII))__ANH09740__GPCmut2 (opt4)
aggagagucccgcagucggcguccagcggcucugcuuguucgugugugugucguugcaggccuuauucaagcuuaccaugggccagaucgugaccuucuuccaggaggugccccacgugaucgaggaggugaugaacaucgugcugaucgcccugagccugcuggccauccugaagggccuguacaacuucgccaccugcggcgugaucggccugaucaccuuccugcugcugugcggcagaagcugcagcgccaccuacaagggccaguacgagcugcagacccuggagcugaacauggagagccugaacaugugcaugccccugagcugcaccaagaacaacagccaccacuacaucagagccggcaacaacaccggccuggagcugacccugaccaacaccagcaucaucagccacaaguucugcaaccugagcgacgcccacaagaagaaccuguacgaccacacccugaugagcaucaucaccaccuuccaccugagcauccccaacuucaaccaguacgaggccaugagcugcgacuucaacggcggcaagaucagcauccaguacaaccugagccacagcuacgccggcgacgccgcccagcacugcggcaccguggccaacggcgugcugcagaccuucaugagaauggccuggggcggcagcuaccuggcccuggacagcggcagaagaggcugggacugcaucaucagcagcuaccaguaccugaucauccagaacaccaccugggacgaccacugccaguucagcagacccagccccaucggcuaccugggcuucgugagccagaagaccagagacaucuacaucagcagaagaagaagaggcaccuucaccuggacccugagcgacagcgagggccacgacaugcccggcggcuacugccugaccagauggaugcugaucgaggccgaccugaagugcuucggcaacaccgccguggccaagugcaacgagaagcacgacgaggaguucugcgacauguggagacuguucgacuucugcaagcaggccauccagagacugaaggcccccgcccagaugaacauccagcugaucaacaaggccgugaacgcccugaucaacgaccagcugaugaugaagaaccaccugagagacaucaugggcauccccuacugcaacuacagcaaguucugguaccugaacaacaccaccaccggcagaaccagccugcccagaugcuggcugaucagcaacggcagcuaccugaacgagacccacuucagcgacgacaucgagcagcaggccgacaacaugaucaccgagaugcugcagaaggaguacauggacagacagggcaagaccccccugggccugguggaccuguucguguucagcaccagcuucuaccugaucaccaucuuccugcaccuggugaagauccccacccacagacacaucgugggcaagcccugccccaagccccacagacugaaccacaugggcaucugcagcugcggccuguacaagcagcccggcgugcccgugagauggaagagaugaggacuaguaauaaggaaacuguaugaaugucugugggcaggaagugaagagauccuucuguaaagguuuuuggaauuaugucugcugaauaauaaacuuuuuugaaauaauaaaucugguagaaaaaugagaucuaaaaaaaaaaaaaaaaaaaaaaaaaaaaaaaaaaaaaaaaaaaaaaaaaaaaaaaaaaaaaaaaaaaaaaaaaaaaaaaaaaaaaaaaaaaaaaaaaaaa

SEQ ID NO: 24204 - RNA, 1785 nt, Artificial Sequence; identical to SEQ ID NO: 24198
  mRNA product Design b-4 (A100) comprising derived and/or modified sequence from LASV(Pinneo-NIG-1969;Clade I)__AIT17836__GPCmut2 (opt4)

SEQ ID NO: 24205 - RNA, 1785 nt, Artificial Sequence
  mRNA product Design b-4 (A100) comprising derived and/or modified sequence from LASV(ISTH0009-NIG-2011;Clade II)__AIT17404__GPCmut2 (opt4)
aggagagucccgcagucggcguccagcggcucugcuuguucgugugugugucguugcaggccuuauucaagcuuaccaugggccagaucaucaccuucuuccaggaggugccccacgugaucgaggaggugaugaacaucgugcugaucgcccugagccugcuggccauccugaagggcaucuacaacguggccaccugcggccuguucggccuggugagcuuccugcugcugugcggcagaagcugcagcaccaccuacaagggcguguacgagcugcagacccuggagcuggacauggccagccugaacaugugcaugccccugagcugcaccaagaacaacagccaccacuacaucauggugggcaacgagaccggccuggagcugacccugaccaacaccagcaucaucaaccacaaguucugcaaccugagcgacgcccacaagaagaaccuguacgaccacgcccugaugagcaucaucagcaccuuccaccugagcauccccaacuucaaccaguacgaggccaugagcugcgacuucaacggcggcaagaucagcgugcaguacaaccugagccacgccuacgccguggacgccgccaaccacugcggcaccaucgccaacggcgugcugcagaccuucaugagaauggccuggggcggcagcuacaucgcccuggacagcggcaagggcagcugggacugcaucaugaccagcuaccaguaccugaucauccagaacaccaccugggaggaccacugccaguucagcagacccagccccaucggcuaccugggccugcugagccagagaaccagagacaucuacaucagcagaagaagaagaggcaccuucaccuggacccugagcgacagcgagggcaacgagacccccggcggcuacugccugaccagauggaugcugaucgaggccgagcugaagugcuucggcaacaccgccguggccaagugcaacgagaagcacgacgaggaguucugcgacaugcugagacuguucgacuucugcaagcaggccaucagaagacugaagacccccgcccagaugagcauccagcugaucaacaaggccgugaacgcccugaucaacgaccagcugaucaugaagaaccaccugagagacaucaugggcauccccuacugcaacuacagcaaguacugguaccugaaccacaccgugaccggcaagaccagccugcccagaugcuggcuggugagcaacggcagcuaccugaacgagacccacuucagcgacgacaucgagcagcaggccgacaacaugaucaccgagcugcugcagaaggaguacauggacagacagggcaagaccccccugggccugguggaccuguucguguucagcaccagcuucuaccugaucagcaucuuccugcaccugaucaagauccccacccacagacacaucaccggcaagcccugccccaagccccacagacugaaccacaugggcaucugcagcugcggccuguacaagcaccccggcgugcccgugaaguggaagagaugaggacuaguaauaaggaaacuguaugaaugucugugggcaggaagugaagagauccuucuguaaagguuuuuggaauuaugucugcugaauaauaaacuuuuuugaaauaauaaaucugguagaaaaaugagaucuaaaaaaaaaaaaaaaaaaaaaaaaaaaaaaaaaaaaaaaaaaaaaaaaaaaaaaaaaaaaaaaaaaaaaaaaaaaaaaaaaaaaaaaaaaaaaaaaaaaa

SEQ ID NO: 24206 - RNA, 1785 nt, Artificial Sequence
  mRNA product Design b-4 (A100) comprising derived and/or modified sequence from LASV(ISTH2010-NIG-2012;Clade II)__AIT17482__GPCmut2 (opt4)
aggagagucccgcagucggcguccagcggcucugcuuguucgugugugugucguugcaggccuuauucaagcuuaccaugggccagaucaucaccuucuuccaggaggugccccacgugaucgaggaggugaugaacaucgugcugaucgcccugagccugcuggccauccugaagggcaucuacaacguggccaccugcggccuguucggccuggugagcuuccugcugcugugcggcagaagcugcagcaccaccuacaagggcguguacgagcugcagacccuggagcuggacauggccagccugaacaugugcaugccccugagcugcaccaagaacaacagccaccacuacaucauggugggcaacgagaccggccuggagcugacccugaccaacaccagcaucaucaaccacaaguucugcaaccugagcgacgcccacaagaagaaccuguacgaccacgcccugaugagcaucaucagcaccuuccaccugagcauccccaacuucaaccaguacgaggccaugagcugcgacuucaacggcggcaagaucagcgugcaguacaaccugagccacgccuacgccguggacgccgccaaccacugcggcaccaucgccaacggcgugcugcagaccuucaugagaauggccuggggcggcagcuacaucgcccuggacagcggcaagggcagcugggacugcaucaugaccagcuaccaguaccugaucauccagaacaucaccugggaggaccacugccaguucagcagacccagccccaucggcuaccugggccugcugagccagagaaccagagacaucuacaucagcagaagaagaagaggcaccuucaccuggacccugagcgacagcgagggcaacgagacccccggcggcuacugccugaccagauggaugcugaucgaggccgagcugaagugcuucggcaacaccgccguggccaagugcaacgagaagcacgacgaggaguucugcgacaugcugagacuguucgacuucugcaagcaggccaucagaagacugaagacccccgcccagaugagcauccagcugaucaacaaggccgugaacgcccugaucaacgaccagcugaucaugaagaaccaccugagagacaucaugggcauccccuacugcaacuacagcaaguacugguaccugaaccacaccgugaccggcaagaccagccugcccagaugcuggcuggugagcaacggcagcuaccugaacgagacccacuucagcgacgacaucgagcagcaggccgacaacaugaucaccgagcugcugcagaaggaguacaucgacagacagggcaagaccccccugggccugguggaccuguucguguucagcaccagcuucuaccugaucagcaucuuccugcaccuggugaagauccccacccacagacacguggugggcaagcccugccccaagccccacagacugaaccacaugggcaucugcagcugcggccuguacaagcaccccggcgugcccgugaaguggaagagaugaggacuaguaauaaggaaacuguaugaaugucugugggcaggaagugaagagauccuucuguaaagguuuuuggaauuaugucugcugaauaauaaacuuuuuugaaauaauaaaucugguagaaaaaugagaucuaaaaaaaaaaaaaaaaaaaaaaaaaaaaaaaaaaaaaaaaaaaaaaaaaaaaaaaaaaaaaaaaaaaaaaaaaaaaaaaaaaaaaaaaaaaaaaaaaaaa

SEQ ID NO: 24207 - RNA, 1785 nt, Artificial Sequence
  mRNA product Design b-4 (A100) comprising derived and/or modified sequence from LASV(Lassa virus/H.sapiens-wt/NGA/2015/ISTH_0543;Clade II)__AVO03639__GPCmut2 (opt4)
aggagagucccgcagucggcguccagcggcucugcuuguucgugugugugucguugcaggccuuauucaagcuuaccaugggccagaucaucaccuucuuccaggaggugccccacgugaucgaggaggugaugaacaucgugcugaucgcccugagccugcuggccauccugaagggcaucuacaacguggccaccugcggccuguucggccuggugagcuuccugcugcugugcggcagaagcugcagcaccaccuacaagggcguguacgagcugcagacccuggagcuggacauggccaaccugaacaugugcaugccccugagcugcaccaagaacaacagccaccacuacaucauggugggcaacgagaccggccuggagcugacccugaccaacaccagcaucaucaaccacaaguucugcaaccugagcgacgcccacaagaagaaccuguacgaccacgcccugaugagcaucaucagcaccuuccaccugagcauccccaacuucaaccaguacgaggccaugagcugcgacuucaacggcggcaagaucagcgugcaguacaaccugagccacaccuacgccguggacgccgccaaccacugcggcaccaucgccaacggcgugcugcagaccuucaugagaauggccuggggcggcagcuacaucgcccuggacagcggcaagggcagcugggacugcaucaugaccagcuaccaguaccuggugauccagaacaccaccugggaggaccacugccaguucagcagacccagccccaucggcuaccugggccugcugagccagagaaccagagacaucuacaucagcagaagaagaagaggcaccuucaccuggacccugagcgacagcgagggcaacgagacccccggcggcuacugccugaccagauggaugcugaucgaggccgagcugaagugcuucggcaacaccgccguggccaagugcaacgagaagcacgacgaggaguucugcgacaugcugagacuguucgacuucugcaagcaggccaucagaagacugaagacccccgcccagaugagcauccagcugaucaacaaggccgugaacgcccugaucaacgaccagcugaucaugaagaaccaccugagagacaucaugggcauccccuacugcaacuacagcaaguacugguaccugaaccacaccgugaccggcaagaccagccugcccagaugcuggcuggugagcaacggcagcuaccugaacgagacccacuucagcgacgacaucgagcagcaggccgacaacaugaucaccgagcugcugcagaaggaguacaucgacagacagggcaagaccccccugggccugguggaccuguucguguucagcaccagcuucuaccugaucagcaucuuccugcaccuggugaagauccccacccacagacacaucaccggcaagcccugccccaagccccacagacugaaccacaugggcaucugcagcugcggccuguacaagcaccccggcgugcccgugaaguggaagagaugaggacuaguaauaaggaaacuguaugaaugucugugggcaggaagugaagagauccuucuguaaagguuuuuggaauuaugucugcugaauaauaaacuuuuuugaaauaauaaaucugguagaaaaaugagaucuaaaaaaaaaaaaaaaaaaaaaaaaaaaaaaaaaaaaaaaaaaaaaaaaaaaaaaaaaaaaaaaaaaaaaaaaaaaaaaaaaaaaaaaaaaaaaaaaaaaa

SEQ ID NO: 24208 - RNA, 1785 nt, Artificial Sequence
  mRNA product Design b-4 (A100) comprising derived and/or modified sequence from LASV(Lassa virus/H.sapiens-wt/NGA/2016/ISTH_0009;Clade II)__AVO03571__GPCmut2 (opt4)
aggagagucccgcagucggcguccagcggcucugcuuguucgugugugugucguugcaggccuuauucaagcuuaccaugggccagaucaucaccuucuuccaggaggugccccacgugaucgaggaggugaugaacaucgugcugaucgcccugagccugcuggccauccugaagggcaucuacaacguggccaccugcggccugcugggccuggugagcuuccugcugcugugcggcagaagcugcagcaccaccuacaagggcguguacgagcugcagacccuggagcuggacauggccagccugaacaugugcaugccccugagcugcaccaagaacaacagccaccacuacaucauggugggcaacgagaccggccuggagcugacccugaccaacaccagcaucaucaaccacaaguucugcaaccugagcgacgcccacaagaagaaccuguacgaccacgcccugaugagcaucaucagcaccuuccaccugagcauccccaacuucaaccaguacgaggccaugagcugcgacuucaacggcggcagaaucagcgugcaguacaaccugagccacagcuacgccguggacgccgccaaccacugcggcaccaucgccaacggcgugcugcagaccuucaugagaauggccuggggcggcagcuacaucgcccuggacagcggcaagggcagcugggacugcaucaugaccagcuaccaguaccugaucauccagaacaccaccugggaggaccacugccaguucagcagacccagccccaucggcuaccugggccugcugagccagagaaccagagacaucuacaucagcagaagaagaagaggcaccuucaccuggacccugagcgacagcgagggcaacgagacccccggcggcuacugccugaccagauggaugcugaucgaggccgagcugaagugcuucggcaacaccgccguggccaagugcaacgagaagcacgacgaggaguucugcgacaugcugagacuguucgacuucugcaagcaggccaucagaagacugaagacccccgcccagaugagcauccagcugaucaacaaggccgugaacgcccugaucaacgaccagcugaucaugaagaaccaccugagagacaucaugggcauccccuacugcaacuacagcaaguacugguaccugaaccacaccgugaccggcaagaccagccugcccagaugcuggcuggugagcaacggcagcuaccugaacgagacccacuucagcgacgacaucgagcagcaggccgacaacaugaucaccgagcugcugcagaaggaguacaucgacagacagggcaagaccccccugggccugguggaccuguucguguucagcaccagcuucuaccugaucagcaucuuccugcaccuggugaagauccccacccacagacacaucaccggcaagcccugccccaagccccacagacugaaccacaugggcaucugcagcugcggccuguacaaccaccccggcgugcccgugaaguggaagagaugaggacuaguaauaaggaaacuguaugaaugucugugggcaggaagugaagagauccuucuguaaagguuuuuggaauuaugucugcugaauaauaaacuuuuuugaaauaauaaaucugguagaaaaaugagaucuaaaaaaaaaaaaaaaaaaaaaaaaaaaaaaaaaaaaaaaaaaaaaaaaaaaaaaaaaaaaaaaaaaaaaaaaaaaaaaaaaaaaaaaaaaaaaaaaaaaa

SEQ ID NO: 24209 - RNA, 1785 nt, Artificial Sequence
  mRNA product Design b-4 (A100) comprising derived and/or modified sequence from LASV(Lassa virus/H.sapiens-wt/NGA/2016/ISTH_0017;Clade II)__AVO03567__GPCmut2 (opt4)
aggagagucccgcagucggcguccagcggcucugcuuguucgugugugugucguugcaggccuuauucaagcuuaccaugggccagaucaucaccuucuuccaggaggugccccacgugaucgaggaggugaugaacaucgugcugaucgcccugagccugcuggccauccugaagggcaucuacaacguggccaccugcggccuguucggccuggugagcuuccugcugcugugcggcagaagcugcagcaccaccuacaagggcguguacgagcugcagacccuggagcuggacauggccagccugaacaugugcaugccccugagcugcaccaagaacaacagccaccacuacaucauggugggcaacgagaccggccuggagcugacccugaccaacaccagcaucaucaaccacaaguucugcaaccugagcgacgcccacaagaagaaccuguacgaccacgcccugaugagcaucaucagcaccuuccaccugagcauccccaacuucaaccaguacgaggccaugagcugcgacuucaacggcggcaagaucagcgugcaguacaaccugagccacaccuacgccaucgacgccgccaaccacugcggcaccaucgccaacggcgugcugcagaccuucaugagaauggccuggggcggcagcuacaucgcccuggacagcggcaagggcagcugggacugcaucaugaccagcuaccaguaccugaucauccagaacaccaccugggaggaccacugccaguucagcagacccagccccaucggcuaccugggccugcugagccagagaaccagagacaucuacaucagcagaagaagaagaggcaccuucaccuggacccugagcgacagcgagggcaacgagacccccggcggcuacugccugaccagauggaugcugaucgaggccgagcugaagugcuucggcaacaccgccguggccaagugcaacgagaagcacgacgaggaguucugcgacaugcugagacuguucgacuucugcaagcaggccaucagaagacugaagacccccgcccagaugagcauccagcugaucaacaaggccgugaacgcccugaucaacgaccagcugaucaugaagaaccaccugagagacaucaugggcauccccuacugcaacuacagcaaguacugguaccugaaccacaccgugaccggcaagaccagccugcccagaugcuggcuggugagcaacggcagcuaccugaacgagacccacuucagcgacgacaucgagcagcaggccgacaacaugaucaccgagcugcugcagaaggaguacauggacagacagggcaagaccccccugggccugguggaccuguucguguucagcaccagcuucuaccugaucagcaucuuccugcaccuggugagaauccccacccacagacacgugaucggcaagcccugccccaagccccacagacugaaccacaugggcaucugcagcugcggccuguacaagcaccccggcgugcccgugaaguggaagagaugaggacuaguaauaaggaaacuguaugaaugucugugggcaggaagugaagagauccuucuguaaagguuuuuggaauuaugucugcugaauaauaaacuuuuuugaaauaauaaaucugguagaaaaaugagaucuaaaaaaaaaaaaaaaaaaaaaaaaaaaaaaaaaaaaaaaaaaaaaaaaaaaaaaaaaaaaaaaaaaaaaaaaaaaaaaaaaaaaaaaaaaaaaaaaaaaa

SEQ ID NO: 24210 - RNA, 1785 nt, Artificial Sequence
  mRNA product Design b-4 (A100) comprising derived and/or modified sequence from LASV(Lassa virus/H.sapiens-wt/NGA/2018/ISTH_0959;Clade II)__AVV65099__GPCmut2 (opt4)
aggagagucccgcagucggcguccagcggcucugcuuguucgugugugugucguugcaggccuuauucaagcuuaccaugggccagaucaucaccuucuuccaggaggugccccacgugaucgaggaggugaugaacaucgugcugaucgcccugagccugcuggccauccugaagggcaucuacaacguggugaccugcggccuguucggccuggugagcuuccugcugcugugcggcagaagcugcagcaccaccuacaagggcguguacgagcugcagacccuggagcuggacauggccagccugaacaugugcaugccccugagcugcaccaagaacaacagccaccacuacaucauggugggcaacgagaccggccuggagcugacccugaccaacaccagcaucaucaaccacaaguucugcaaccugagcgacgcccacaagaagaaccuguacgaccacgcccugaugagcaucaucagcaccuuccaccugagcauccccaacuucaaccaguacgaggccaugagcugcgacuucaacggcggcaagaucagcgugcaguacaaccugagccacgccuacgccaucgacgccgccaaccacugcggcaccaucgccaacggcgugcugcagaccuucaugagaauggccuggggcggcagcuacaucgcccuggacagcggcaagggcagcugggacugcaucaugaccagcuaccaguaccugaucauccagaacaccaccugggaggaccacugccaguucagcagacccagccccaucggcuaccugggccugcugagccagagaaccagagacaucuacaucagcagaagaagaagaggcaccuucaccuggacccugagcgacagcgagggcaacgagacccccggcggcuacugccugaccagauggaugcugaucgaggccgagcugaagugcuucggcaacaccgccguggccaagugcaacgagaagcacgacgaggaguucugcgacaugcugagacuguucgacuucugcaagcaggccaucagaagacugaagacccccgcccagaugagcauccagcugaucaacaaggccgugaacgcccugaucaacgaccagcugaucaugaagaaccaccugagagacaucaugggcauccccuacugcaacuacagcaaguacugguaccugaaccacaccgugaccggcaagaccagccugcccagaugcuggcuggugagcaacggcagcuaccugaacgagacccacuucagcgacgacaucgagcagcaggccgacaacaugaucaccgagcugcugcagaaggaguacaucgacagacagggcaagaccccccugggccugguggaccuguucguguucagcaccagcuucuaccugaucagcaucuuccugcaccuggugaagauccccacccacagacacgugaucggcaagcccugccccaagccccacagacugaaccacaugggcaucugcagcugcggccuguacaagcaccccggcgugcccgugaaguggaagagaugaggacuaguaauaaggaaacuguaugaaugucugugggcaggaagugaagagauccuucuguaaagguuuuuggaauuaugucugcugaauaauaaacuuuuuugaaauaauaaaucugguagaaaaaugagaucuaaaaaaaaaaaaaaaaaaaaaaaaaaaaaaaaaaaaaaaaaaaaaaaaaaaaaaaaaaaaaaaaaaaaaaaaaaaaaaaaaaaaaaaaaaaaaaaaaaaa

SEQ ID NO: 24211 - RNA, 1785 nt, Artificial Sequence
  mRNA product Design b-4 (A100) comprising derived and/or modified sequence from LASV(LASV003-NIG-2008;Clade II)__AIT17580__GPCmut2 (opt4)
aggagagucccgcagucggcguccagcggcucugcuuguucgugugugugucguugcaggccuuauucaagcuuaccaugggccagaucaucaccuucuuccaggaggugccccacgugaucgaggaggugaugaacaucgugcugaucgcccugagccugcuggccauccugaagggcaucuacaacguggccaccugcggccuguucggccuggugagcuuccugcugcugugcggcagaagcugcagcaccaccuacaagggcguguacgagcugcagacccuggagcuggacauggccagccugaacaugugcaugccccugagcugcaccaagaacaacagccaccacuacaucauggugggcaacgagaccggccuggagcugacccugaccaacaccagcaucaucaaccacaaguucugcaaccugagcgacgcccacaagaagaaccuguacgaccacgcccugaugagcaucaucagcaccuuccaccugagcauccccaacuucaaccaguacgaggccaugagcugcgacuucaacggcggcaagaucagcgugcaguacaaccugagccacaccuacgccguggacgccgccaaccacugcggcaccaucgccaacggcgugcugcagaccuucaugagaauggccuggggcggcagcuacaucgcccuggacagcggcaagggcagcugggacugcaucaugaccagcuaccaguaccugaucauccagaacaccaccugggaggaccacugccaguucagcagacccagccccaucggcuaccugggccugcugagccagagaaccagagacaucuacaucagcagaagaagaagaggcaccuucaccuggacccugagcgacagcgagagcaacgagacccccggcggcuacugccugaccagauggaugcugaucgaggccgagcugaagugcuucggcaacaccgccguggccaagugcaacgagaagcacgacgaggaguucugcgacaugcugagacuguucgacuucugcaagcaggccaucagaagacugaaggcccccgcccagaugagcauccagcugaucaacaaggccgugaacgcccugaucaacgaccagcugaucaugaagaaccaccugagagacaucaugggcauccccuacugcaacuacagcaaguacugguaccugaaccacaccgugaccggcagaaccagccugcccagaugcuggcuggugagcaacggcagcuaccugaacgagacccacuucagcgacgacaucgagcagcaggccgacaacaugaucaccgagcugcugcagaaggaguacauggacagacagggcaagaccccccugggccugguggaccuguucguguucagcaccagcuucuaccugaucagcaucuuccugcaccuggugaagauccccacccacagacacgugaucggcaagcccugccccaagccccacagacugaaccacaugggcaucugcagcugcggccuguacaagcaccccggcgugcccgugaaguggaagagaugaggacuaguaauaaggaaacuguaugaaugucugugggcaggaagugaagagauccuucuguaaagguuuuuggaauuaugucugcugaauaauaaacuuuuuugaaauaauaaaucugguagaaaaaugagaucuaaaaaaaaaaaaaaaaaaaaaaaaaaaaaaaaaaaaaaaaaaaaaaaaaaaaaaaaaaaaaaaaaaaaaaaaaaaaaaaaaaaaaaaaaaaaaaaaaaaa

SEQ ID NO: 24212 - RNA, 1785 nt, Artificial Sequence
  mRNA product Design b-4 (A100) comprising derived and/or modified sequence from LASV(LASV035-NIG-2009;Clade II)__AIT17588__GPCmut2 (opt4)
aggagagucccgcagucggcguccagcggcucugcuuguucgugugugugucguugcaggccuuauucaagcuuaccaugggccagaucaucaccuucuuccaggaggugccccacgugaucgaggaggugaugaacaucgugcugaucgcccugagccugcuggccauccugaagggcaucuacaacguggccaccugcggccuguucggccuggugagcuuccugcugcugugcggcagaagcugcagcaccaccuacaagggcguguacgagcugcagacccuggagcuggacauggccagccugaacaugugcaugccccugagcugcaccaagaacaacagccaccacuacaucauggugggcaacgagaccggccuggagcugacccugaccaacaccagcaucaucaaccacaaguucugcaaccugagcgacgcccacaagaagaaccuguacgaccacgcccugaugagcaucaucagcaccuuccaccugagcauccccaacuucaaccaguacgaggccaugagcugcgacuucaacggcggcaagaucagcgugcaguacaaccugagccacgccuacgccguggacgccgccaaccacugcggcaccaucgccaacggcgugcugcagaccuucaugagaauggccuggggcggcagcuacaucgcccuggacagcggcaagggcagcugggacugcaucaugaccagcuaccaguaccugaucauccagaacaccaccugggaggaccacugccaguucagcagacccagccccaucggcuaccugggccugcugagccagagaaccagagacaucuacaucagcagaagaagaagaggcaccuucaccuggacccugagcgacagcgagggcaacgagacccccggcggcuacugccugaccagauggaugcugaucgaggccgagcugaagugcuucggcaacaccgccguggccaagugcaacgagaagcacgacgaggaguucugcgacaugcugagacuguucgacuucugcaagcaggccaucagaagacugaaggcccccgcccagaugagcauccagcugaucaacaaggccgugaacgcccugaucaacgaccagcugaucaugaagaaccaccugagagacaucaugggcauccccuacugcaacuacagcaaguacugguaccugaaccacaccgugaccggcaagaccagccugcccagaugcuggcuggugagcaacggcagcuaccugaacgagacccacuucagcgacgacaucgagcagcaggccgacaacaugaucaccgagcugcugcagaaggaguacaucgacagacagggcaagaccccccugggccugguggaccuguucguguucagcaccagcuucuaccugaucagcaucuuccugcaccuggugaagauccccacccacagacacgugaucggcaagcccugccccaagccccacagacugaaccacaugggcaucugcagcugcggccuguacaagcaccccggcgugcccgugaaguggaagagaugaggacuaguaauaaggaaacuguaugaaugucugugggcaggaagugaagagauccuucuguaaagguuuuuggaauuaugucugcugaauaauaaacuuuuuugaaauaauaaaucugguagaaaaaugagaucuaaaaaaaaaaaaaaaaaaaaaaaaaaaaaaaaaaaaaaaaaaaaaaaaaaaaaaaaaaaaaaaaaaaaaaaaaaaaaaaaaaaaaaaaaaaaaaaaaaaa

SEQ ID NO: 24213 - RNA, 1785 nt, Artificial Sequence
  mRNA product Design b-4 (A100) comprising derived and/or modified sequence from LASV(LASV1000-NIG-2009;Clade II)__AIT17782__GPCmut2 (opt4)
aggagagucccgcagucggcguccagcggcucugcuuguucgugugugugucguugcaggccuuauucaagcuuaccaugggccagaucaucaccuucuuccaggaggugccccacgugaucgaggaggugaugaacaucgugcugaucgcccugagccugcuggccauccugaagggcaucuacaacguggccaccugcggccuguucggccuggugagcuuccugcugcugugcggcagaagcugcagcaccaccuacaagggcguguacgagcugcagacccuggagcuggacauggccagccugaacaugugcaugccccugagcugcaccaagaacaacagccaccacuacaucauggugggcaacgagaccggccuggagcugacccugaccaacaccagcaucaucaaccacaaguucugcaaccugagcgacgcccacaagaagaaccuguacgaccacgcccugaugagcaucaucagcaccuuccaccugagcauccccaacuucaaccaguacgaggccaugagcugcgacuucaacggcggcaagaucagcgugcaguacaaccugagccacaccuacgccguggacgccgccaaccacugcggcaccaucgccaacggcgugcugcagaccuucaugagaauggccuggggcggcagcuacaucgcccuggacagcggcaagggcagcugggacugcaucaugaccagcuaccaguaccugaucauccagaacaccaccugggaggaccacugccaguucagcagacccagccccaucggcuaccugggccugcugagccagagaaccagagacaucuacaucagcagaagaagaagaggcaccuucaccuggacccugagcgacagcgagggcaacgagacccccggcggcuacugccugaccagauggaugcugaucgaggccgagcugaagugcuucggcaacaccgccguggccaagugcaacgagaagcacgacgaggaguucugcgacaugcugagacuguucgacuucugcaagcaggccaucaagagacugaagacccccgcccagaugagcauccagcugaucaacaaggccgugaacgcccugaucaacgaccagcugaucaugaagaaccaccugagagacaucaugggcauccccuacugcaacuacagcaaguacugguaccugaaccacaccgugaccggcaagaccagccugcccagaugcuggcuggugagcaacggcagcuaccugaacgagacccacuucagcgacgacaucgagcagcaggccgacaacaugaucaccgagcugcugcagaaggaguacaucgacagacagggcaagaccccccugggccugguggaccuguucguguucagcaccagcuucuaccugaucagcaucuuccugcaccuggugaagauccccacccacagacacguggugggcaagcccugccccaagccccacagacugaaccacaugggcaucugcagcugcggccuguacaagcaccccggcgugcccgugaaguggaagagaugaggacuaguaauaaggaaacuguaugaaugucugugggcaggaagugaagagauccuucuguaaagguuuuuggaauuaugucugcugaauaauaaacuuuuuugaaauaauaaaucugguagaaaaaugagaucuaaaaaaaaaaaaaaaaaaaaaaaaaaaaaaaaaaaaaaaaaaaaaaaaaaaaaaaaaaaaaaaaaaaaaaaaaaaaaaaaaaaaaaaaaaaaaaaaaaaa

SEQ ID NO: 24214 - RNA, 1785 nt, Artificial Sequence
  mRNA product Design b-4 (A100) comprising derived and/or modified sequence from LASV(LASV221-NIG-2010;Clade II)__AIT17624__GPCmut2 (opt4)
aggagagucccgcagucggcguccagcggcucugcuuguucgugugugugucguugcaggccuuauucaagcuuaccaugggccagaucaucaccuucuuccaggaggugccccacgugaucgaggaggugaugaacaucgugcugaucgcccugagccugcuggccauccugaagggcaucuacaacguggccaccugcggccuguucggccuggugagcuuccugcugcugugcggcagaagcugcagcaccaccuacaagggcguguacgagcugcagacccuggagcuggacauggccagccugaacaugugcaugccccugagcugcaccaagaacaacagccaccacuacaucauggugggcaacgagaccggccuggagcugacccugaccaacaccagcaucaucaaccacaaguucugcaaccugagcgacgcccacaagaagaaccuguacgaccacgcccugaugagcaucaucagcaccuuccaccugagcauccccaacuucaaccaguacgaggccaugagcugcgacuucaacggcggcaagaucagcgugcaguacaaccugagccacaccuacgccaucgacgccgccaaccacugcggcaccaucgccaacggcgugcugcagaccuucaugagaauggccuggggcggcagcuacaucgcccuggacagcggcaagggcagcugggacugcaucaugaccagcuaccaguaccugaucauccagaacaccaccugggaggaccacugccaguucagcagacccagccccaucggcuaccugggccugcugagccagagaaccagagacaucuacaucagcagaagaagaagaggcaccuucaccuggacccugagcgacagcgagggcaacgagacccccggcggcuacugccugaccagauggaugcugaucgaggccgagcugaagugcuucggcaacaccgccguggccaagugcaacgagaagcacgacgaggaguucugcgacaugcugagacuguucgacuucugcaagcaggccaucagaagacugaagacccccgcccagaugagcauccagcugaucaacaaggccgugaacgcccugaucaacgaccagcugaucaugaagaaccaccugagagacaucaugggcauccccuacugcaacuacagcaaguacugguaccugaaccacaccgugaccggcaagaccagccugcccagaugcuggcuggugagcaacggcagcuaccugaacgagacccacuucagcgacgacaucgagcagcaggccgacaacaugaucaccgagaugcugcagaaggaguacauggacagacagggcaagaccccccugggccugguggaccuguucguguucagcaccagcuucuaccugaucagcaucuuccugcaccuggugaagauccccacccacagacacgugaucggcaagcccugccccaagccccacagacugaaccacaugggcaucugcagcugcggccuguacaagcaccccggcgugcccgugaaguggaagagaugaggacuaguaauaaggaaacuguaugaaugucugugggcaggaagugaagagauccuucuguaaagguuuuuggaauuaugucugcugaauaauaaacuuuuuugaaauaauaaaucugguagaaaaaugagaucuaaaaaaaaaaaaaaaaaaaaaaaaaaaaaaaaaaaaaaaaaaaaaaaaaaaaaaaaaaaaaaaaaaaaaaaaaaaaaaaaaaaaaaaaaaaaaaaaaaaa

SEQ ID NO: 24215 - RNA, 1785 nt, Artificial Sequence
  mRNA product Design b-4 (A100) comprising derived and/or modified sequence from LASV(LASV237-NIG-2010;Clade II)__AIT17638__GPCmut2 (opt4)
aggagagucccgcagucggcguccagcggcucugcuuguucgugugugugucguugcaggccuuauucaagcuuaccaugggccagaucaucaccuucuuccaggaggugccccacgugaucgaggaggugaugaacaucgugcugaucgcccugagccugcuggccauccugaagggcaucuacaacguggccaccugcggccuguucggccuggugagcuuccugcugcugugcggcagaagcugcagcaccaccuacaagggcguguacgagcugcagacccuggagcuggacauggccagccugaacaugugcaugccccugagcugcaccaagaacaacagccaccacuacaucauggugggcaacgagaccggccuggagcugacccugaccaacaccagcaucaucaaccacaaguucugcaaccugagcgacgcccacaagaaggaccuguacgaccacgcccugaugagcaucaucagcaccuuccaccugagcauccccaacuucaaccaguacgaggccaugagcugcgacuucaacggcggcaagaucagcgugcaguacaaccugagccacaccuacgccguggacgccgccaaccacugcggcaccaucgccaacggcgugcugcagaccuucaugagaauggccuggggcggcagcuacaucgcccuggacagcggcaagggcagcugggacugcaucaugaccagcuaccaguaccugaucauccagaacaccaccugggaggaccacugccaguucagcagacccagccccaucggcuaccugggccugcugagccagagaaccagagacaucuacaucagcagaagaagaagaggcaccuucaccuggacccugagcgacagcgagggcaacgagacccccggcggcuacugccugaccagauggaugcugaucgaggccgagcugaagugcuucggcaacaccgccguggccaagugcaacgagaagcacgacgaggaguucugcgacaugcugagacuguucgacuucugcaagcaggccaucagaagacugaagacccccgcccagaugagcauccagcugaucaacaaggccgugaacgcccugaucaacgaccagcugaucaugaagaaccaccugagagacaucaugggcauccccuacugcaacuacagcaaguacugguaccugaaccacaccgugaccggcaagaccagccugcccagaugcuggcuggugagcaacggcagcuaccugaacgagacccacuucagcgacgacaucgagcagcaggccgacaacaugaucaccgagcugcugcagaaggaguacauggacagacagggcaagaccccccugggccugguggaccuguucguguucagcaccagcuucuaccugaucagcaucuuccugcaccugaucaagauccccacccacagacacaucaccggcaagcccugccccaagccccacagacugaaccacaugggcaucugcagcugcggccuguacaagcaccccggcgugcccgugaaguggaagagaugaggacuaguaauaaggaaacuguaugaaugucugugggcaggaagugaagagauccuucuguaaagguuuuuggaauuaugucugcugaauaauaaacuuuuuugaaauaauaaaucugguagaaaaaugagaucuaaaaaaaaaaaaaaaaaaaaaaaaaaaaaaaaaaaaaaaaaaaaaaaaaaaaaaaaaaaaaaaaaaaaaaaaaaaaaaaaaaaaaaaaaaaaaaaaaaaa

SEQ ID NO: 24216 - RNA, 1785 nt, Artificial Sequence
  mRNA product Design b-4 (A100) comprising derived and/or modified sequence from LASV(LASV253-NIG-2011;Clade II)__AIT17670__GPCmut2 (opt4)
aggagagucccgcagucggcguccagcggcucugcuuguucgugugugugucguugcaggccuuauucaagcuuaccaugggccagaucaucaccuucuuccaggaggugccccacgugaucgaggaggugaugaacaucgugcugaucgcccugagccugcuggccauccugaagggcaucuacaacguggccaccugcggccuguucggccuggugagcuuccugcugcugugcggcagaagcugcagcaccaccuacaagggcguguacgagcugcagacccuggagcuggacauggccagccugaacaugugcaugccccugagcugcaccaagaacaacagccaccacuacaucauggugggcaacgagaccggccuggagcugacccugaccaacaccagcaucaucaaccacaaguucugcaaccugagcgacgcccacaagaagaaccuguacgaccacgcccugaugagcaucaucagcaccuuccaccugagcauccccaacuucaaccaguacgaggccaugagcugcgacuucaacggcggcaagaucagcgugcaguacaaccugagccacaccuacgccguggacgccgccaaccacugcggcaccaucgccaacggcgugcugcagaccuucaugagaauggccuggggcggcagcuacaucgcccuggacagcggcaagggcagcugggacugcaucaugaccagcuaccaguaccugaucauccagaacaccaccugggaggaccacugccaguucagcagacccagccccaucggcuaccugggccugcugagccagagaaccagagacaucuacaucagcagaagaagaagaggcaccuucaccuggacccugagcgacagcgagggcaacgagacccccggcggcuacugccugaccagauggaugcugaucgaggccgagcugaagugcuucggcaacaccgccguggccaagugcaacgagaagcacgacgaggaguucugcgacaugcugagacuguucgacuucugcaagcaggccaucagaagacugaaggcccccgcccagaugagcauccagcugaucaacaaggccgugaacgcccugaucaacgaccagcugaucaugaagaaccaccugagagacaucaugggcauccccuacugcaacuacagcaaguacugguaccugaaccacaccgugaccggcagaaccagccugcccagaugcuggcuggugagcaacggcagcuaccugaacgagacccacuucagcgacgacaucgagcagcaggccgacaacaugaucaccgagcugcugcagaaggaguacaucgacagacagggcaagaccccccugggccugguggaccuguucguguucagcaccagcuucuaccugaucagcaucuuccugcaccuggugaagauccccacccacagacacaucaucggcaagcccugccccaagccccacagacugaaccacaugggcaucugcagcugcggccuguacaagcaccccggcgugcccgugaaguggaagagaugaggacuaguaauaaggaaacuguaugaaugucugugggcaggaagugaagagauccuucuguaaagguuuuuggaauuaugucugcugaauaauaaacuuuuuugaaauaauaaaucugguagaaaaaugagaucuaaaaaaaaaaaaaaaaaaaaaaaaaaaaaaaaaaaaaaaaaaaaaaaaaaaaaaaaaaaaaaaaaaaaaaaaaaaaaaaaaaaaaaaaaaaaaaaaaaaa

SEQ ID NO: 24217 - RNA, 1785 nt, Artificial Sequence
  mRNA product Design b-4 (A100) comprising derived and/or modified sequence from LASV(LASV254-NIG-2011;Clade II)__AIT17674__GPCmut2 (opt4)
aggagagucccgcagucggcguccagcggcucugcuuguucgugugugugucguugcaggccuuauucaagcuuaccaugggccagaucaucaccuucuuccaggaggugccccacgugaucgaggaggugaugaacaucgugcugaucgcccugagccugcuggccauccugaagggcaucuacaacguggccaccugcggccuguucggccuggugagcuuccugcugcugugcggcagaagcugcagcaccaccuacaagggcguguacgagcugcagacccuggagcuggacaugaccaaccugaacaugugcaugccccugagcugcaccaagaacaacagccaccacuacaucauggugggcaacgagaccggccuggagcugacccugaccaacaccagcaucaucaaccacaaguucugcaaccugagcgacgcccacaagaagaaccuguacaaccacgcccugaugagcaucaucagcaccuuccaccugagcauccccaacuucaaccaguacgaggccaugagcugcgacuucaacggcggcaagaucagcgugcaguacaaccugagccacagcuacgccguggacgccgccaaccacugcggcaccaucgccaacggcgugcugcagaccuucaugagaauggccuggggcggcagcuacaucgcccuggacagcggcaagggcaacugggacugcaucaugaccagcuaccaguaccugaucauccagaacaccaccugggaggaccacugccaguucagcagacccagccccaucggcuaccugggccugcugagccagagaaccagagacaucuacaucagcagaagaagaagaggcaccuucaccuggacccugagcgacagcgagggcaacgagacccccggcggcuacugccugaccagauggaugcugaucgaggccgagcugaagugcuucggcaacaccgccguggccaagugcaacgagaagcacgacgaggaguucugcgacaugcugagacuguucgacuucugcaagcaggccaucagaagacugaagacccccgcccaggccaacauccagcugaucaacaaggccgugaacgcccugaucaacgaccagcugaucaugaagaaccaccugagagacaucaugggcauccccuacugcaacuacagcaaguacugguaccugaaccacaccgugaccggcaagaccagccugcccagaugcuggcuggugagcaacggcagcuaccugaacgagacccacuucagcgacgacaucgagcagcaggccgacaacaugaucaccgagcugcugcagaaggaguacauggacagacagggcaagaccccccugggccugguggaccuguucguguucagcaccagcuucuaccugaucagcaucuuccugcaccuggugaagauccccacccacagacacgugaucggcaagcccugccccaagccccacagacugaaccacaugggcaucugcagcugcggccuguacaagcaccccggcgugcccgugaaguggaagagaugaggacuaguaauaaggaaacuguaugaaugucugugggcaggaagugaagagauccuucuguaaagguuuuuggaauuaugucugcugaauaauaaacuuuuuugaaauaauaaaucugguagaaaaaugagaucuaaaaaaaaaaaaaaaaaaaaaaaaaaaaaaaaaaaaaaaaaaaaaaaaaaaaaaaaaaaaaaaaaaaaaaaaaaaaaaaaaaaaaaaaaaaaaaaaaaaa

SEQ ID NO: 24218 - RNA, 1785 nt, Artificial Sequence
  mRNA product Design b-4 (A100) comprising derived and/or modified sequence from LASV(Nig08-A19;Clade III)__ADU56618__GPCmut2 (opt4)
aggagagucccgcagucggcguccagcggcucugcuuguucgugugugugucguugcaggccuuauucaagcuuaccaugggccagaucgugaccuucuuccaggaggugccccacgugaucgaggaggugaugaacaucgugcugaucgcccugagcauccuggccauccugaagggccuguacaacaucgccaccugcggccugaucggccuggugaccuuccugcugcugagcggcagaagcugcagcaugaccuacaagggcguguacgagcugcagacccuggagcugaacaugaacacccugaacaugugcaugccccugagcugcaccaagaacaacagccaccacuacaucauggugggcaacgagaccggccuggagcugacccugaccaacaccagccugcugcaccacaaguucugcaaccugagcgacgcccacaagaagaaccuguacgaccacacccugaugagcaucaucagcaccuuccaccugagcauccccaacuucaaccaguacgaggccaugagcugcgacuucaacggcggcaagaucaccgugcaguacaaccugagccacagcuacgccaucgacgccgccaaccacugcggcaccguggccaacggcgugcugcagaccuucaugagaauggccuggggcggcagcuacaucgcccuggacagcggcagaggcaagugggacugcaucaugaccagcuaccaguaccugaucauccagaacaccaccugggaggaccacugccaguucagcagacccagccccaucggcuaccugggccugcugagccagagaaccagagacaucuacaucagcagaagaagaagaggcaccuucaccuggacccugagcgacagcgagggcaacgagacccccggcggcuacugccugaccagauggaugcugaucgaggccgagcugaagugcuucggcaacaccgccguggccaagugcaacgagaagcacgacgaggaguucugcgacaugcugagacuguucgacuucugcaagcaggccaucagaagacugaaggcccccgcccagaugagcauccagcugaucaacaaggccgugaacgcccugaucaacgaccagcugaucaugaagaaccaccugagagacaucaugggcauccccuacugcaacuacagcaaguacugguaccugaaccacaccagcaccggcagaaccagccugcccagaugcuggcuggugagcaacggcagcuaccugaacgagacccacuucagcgacgacaucgagcagcaggccgacaacaugaucaccgagaugcugcagaaggaguaccuggacagacagggcaagaccccccugggccugguggaccuguucguguucagcaccagcuucuaccugaucagcaucuuccugcaccuggugaagauccccacccacagacacaucgugggcaagcccugccccaagccccacagacugaaccacaugggcaucugcagcugcggccuguacaagcagcccggcgugcccgugagauggaagagaugaggacuaguaauaaggaaacuguaugaaugucugugggcaggaagugaagagauccuucuguaaagguuuuuggaauuaugucugcugaauaauaaacuuuuuugaaauaauaaaucugguagaaaaaugagaucuaaaaaaaaaaaaaaaaaaaaaaaaaaaaaaaaaaaaaaaaaaaaaaaaaaaaaaaaaaaaaaaaaaaaaaaaaaaaaaaaaaaaaaaaaaaaaaaaaaaa

SEQ ID NO: 24219 - RNA, 1788 nt, Artificial Sequence
  mRNA product Design b-4 (A100) comprising derived and/or modified sequence from LASV(G1180-SLE-2010;Clade IV)__AIT17168__GPCmut2 (opt4)
aggagagucccgcagucggcguccagcggcucugcuuguucgugugugugucguugcaggccuuauucaagcuuaccaugggccagaucgugaccuucuuccaggaggugccccacgugaucgaggaggugaugaacaucgugcugaucgcccugagcauccuggccgugcugaagggccuguacaacuucgccaccugcggccuggugggccugcugaccuuccugcugcugugcggcagaagcugcaccgccagcagauacaagggcguguacgagcugcagacccuggagcugaacauggagacccugaacaugugcaugccccugagcugcaccaagaacaacagccaccacuacaucauggugggcaacgagaccggccuggagcugacccugaccaacaccagcaucaucaaccacaaguucugcaaccugagcgacgcccacaagaagaaccuguacgaccacgcccugaugagcaucaucagcaccuuccaccugagcauccccaacuucaaccaguacgaggccaugagcugcgacuucaacggcggcaagaucagcgugcaguacaaccugagccacagcuacgccggcgacgccgccaaccacugcggcaccguggccaacggcgugcugcagaccuucaugagaauggccuggggcggcagcuacaucgcccuggacagcggccacggcagcugggacugcaucaugaccagcuaccaguaccugaucauccagaacaccaccugggaggaccacugccaguucagcagacccagccccaucggcuaccugggccugcugagccagagaaccagagacaucuacaucagcagaagaagaagaggcaccuucaccuggacccugagcgacagcgagggcaaggacacccccggcggcuacugccugaccagauggaugcugaucgaggccgagcugaagugcuucggcaacaccgccguggccaagugcaacgagaagcacgacgaggaguucugcgacaugcugagacuguucgacuucugcaagcaggccauccagagacugaaggcccccgcccagaugagcauccagcugaucaacaaggccgugaacgcccugaucaacgaccagcugaucaugaagaaccaccugagagacaucaugggcauccccuacugcaacuacagcaaguacugguaccugaaccacaccaccaccggcaagaccagccugcccaagugcuggcuggugagcaacggcagcuaccugaacgagacccacuucagcgacgacaucgagcagcaggccgacaacaugaucaccgagaugcugcagaaggaguacauggagagacagggcaagaccccccugggccugguggaccuguucguguucagcaccagcuucuaccugaucagcaucuuccugcaccuggugaagauccccacccacagacacaucgugggcaagagcugccccaagccccacagacugaaccacaugggcaucugcagcugcggccuguacaagcagcccggcgugcccgugaaguggaagagaugaggacuaguaauaaggaaacuguaugaaugucugugggcaggaagugaagagauccuucuguaaagguuuuuggaauuaugucugcugaauaauaaacuuuuuugaaauaauaaaucugguagaaaaaugagaucuaaaaaaaaaaaaaaaaaaaaaaaaaaaaaaaaaaaaaaaaaaaaaaaaaaaaaaaaaaaaaaaaaaaaaaaaaaaaaaaaaaaaaaaaaaaaaaaaaaaa

SEQ ID NO: 24220 - RNA, 1788 nt, Artificial Sequence
  mRNA product Design b-4 (A100) comprising derived and/or modified sequence from LASV(G1442-SLE-2011;Clade IV)__AIT17180__GPCmut2 (opt4)
aggagagucccgcagucggcguccagcggcucugcuuguucgugugugugucguugcaggccuuauucaagcuuaccaugggccagaucgugaccuucuuccaggaggugccccacgugaucgaggaggugaugaacaucgugcugaucgcccugagcauccuggccgugcugaagggccuguacaacguggccaccugcggccugaucggccuggugaccuuccugcugcugugcggcagaagcugcaccaccacccuguacaagggcguguacgagcugcagacccuggagcugaacauggagacccugaacaugugcaugccccugagcugcaccaagaacaacagccaccacuacaucagagugggcaacgagaccggccuggagcugacccugaccaacaccagcaucaucaaccacaaguucugcaaccugagcgacgcccacaagaagaaccuguacgaccacgcccugaugagcaucaucagcaccuuccaccugagcauccccaacuucaaccaguacgaggccaugagcugcgacuucaacggcggcaagaucagcgugcaguacaaccugagccacagcuacgccggcgacgccgccaaccacugcggcaccguggccaacggcgugcugcagaccuucaugagaauggccuggggcggcagcuacaucgcccuggacagcggcagaggcaacugggacugcaucaugaccagcuaccaguaccugaucauccagaacaccaccugggacgaccacugccaguucagcagacccagccccaucggcuaccugggccugcugagccagagaaccagagacguguacaucagcagaagaagaagaggcaccuucaccuggacccugagcgacagcgagggcaaggacacccccggcggcuacugccugaccagauggaugcugaucgaggccgagcugaagugcuucggcaacaccgccguggccaagugcaacgagaagcacgacgaggaguucugcgacaugcugagacuguucgacuucugcaagcaggccauccagagacugaaggcccccgcccagaugagcauccagcugaucaacaaggccgugaacgcccugaucaacgaccagcugaucaugaagaaccaccugagagacaucaugggcauccccuacugcaacuacagcaaguacugguaccugaacaacaccgccaccggcaagaccagccugcccaagugcuggcugaucagcaacggcagcuaccugaacgagacccacuucagcgacgacaucgagcaggaggccgacaacaugaucaccgagaugcugcagaaggaguacauggagagacagggcaagaccccccugggccugguggaccuguucguguucagcaccagcuucuaccugaucagcaucuuccugcaccuggugaagauccccacccacagacacaucgugggcaagagcugccccaagccccacagacugaaccacaugggcaucugcagcugcggccuguacaagcagcccggcgugcccgugagauggaagagaugaggacuaguaauaaggaaacuguaugaaugucugugggcaggaagugaagagauccuucuguaaagguuuuuggaauuaugucugcugaauaauaaacuuuuuugaaauaauaaaucugguagaaaaaugagaucuaaaaaaaaaaaaaaaaaaaaaaaaaaaaaaaaaaaaaaaaaaaaaaaaaaaaaaaaaaaaaaaaaaaaaaaaaaaaaaaaaaaaaaaaaaaaaaaaaaaa

SEQ ID NO: 24221 - RNA, 1788 nt, Artificial Sequence
  mRNA product Design b-4 (A100) comprising derived and/or modified sequence from LASV(G3010-SLE-2013;Clade IV)__AIT17344__GPCmut2 (opt4)
aggagagucccgcagucggcguccagcggcucugcuuguucgugugugugucguugcaggccuuauucaagcuuaccaugggccagaucgugaccuucuuccaggaggugccccacgugaucgaggaggugaugaacaucgugcugaucgcccugagcauccuggccgugcugaagggccuguacaacuucgccaccugcggccuggugggccuggugaccuuccugcugcugugcggcagaagcugcaccaccagccuguacaagggcguguacgagcugcagacccuggagcugaacauggagacccugaacaugugcaugccccugagcugcaccaagaacaacagccaccacuacaucauggugggcaacgagaccggccuggagcugacccugaccaacaccagcaucaucaaccacaaguucugcaaccugagcgacgcccacaagaagaaccuguacaaccacgcccugaugagcaucaucagcaccuuccaccugagcauccccaacuucaaccaguacgaggccaugagcugcgacuucaacggcggcaagaucagcgugcaguacaaccugagccacagcuacgccggcgacgccgccagccacugcggcaccguggccaacggcgugcugcagaccuucaugagaauggccuggggcggcagcuacaucgcccuggacagcggcuacggcaagugggacugcaucaugaccagcuaccaguaccugaucauccagaacaccaccugggaggaccacugccaguucagcagacccagccccaucggcuaccugggccugcugagccagagaaccagagacaucuacaucagcagaagaagaagaggcaccuucaccuggacccugagcgacagcgagggcaaggacacccccggcggcuacugccugaccagauggaugcugaucgaggccgagcugaagugcuucggcaacaccgccguggccaagugcaacgagaagcacgacgaggaguucugcgacaugcugagacuguucgacuucugcaagcaggccauccagagacugaagacccccgcccagaugagcauccagcugaucaacaaggccgugaacgcccugaucaacgaccagcugaucaugaagaaccaccugagagacaucaugggcauccccuacugcaacuacagcaaguacugguaccugaaccacaccaccaccggcaagaccagccugcccaagugcuggcuggugagcaacggcagcuaccugaacgagacccacuucagcgacgacaucgagcagcaggccgacaacaugaucaccgagaugcugcagaaggaguacauggagagacagggcaagaccccccugggccugguggaccuguucguguucagcaccagcuucuaccugaucagcaucuuccugcaccuggugaagauccccacccacagacacaucgugggcaagagcugccccaagccccacagacugaaccacaugggcaucugcagcugcggccuguacaagcagcccggcgugcccgugagauggaagagaugaggacuaguaauaaggaaacuguaugaaugucugugggcaggaagugaagagauccuucuguaaagguuuuuggaauuaugucugcugaauaauaaacuuuuuugaaauaauaaaucugguagaaaaaugagaucuaaaaaaaaaaaaaaaaaaaaaaaaaaaaaaaaaaaaaaaaaaaaaaaaaaaaaaaaaaaaaaaaaaaaaaaaaaaaaaaaaaaaaaaaaaaaaaaaaaaa

SEQ ID NO: 24222 - RNA, 1788 nt, Artificial Sequence
  mRNA product Design b-4 (A100) comprising derived and/or modified sequence from LASV(G502-SLE-2009;Clade IV)__AIT17126__GPCmut2 (opt4)
aggagagucccgcagucggcguccagcggcucugcuuguucgugugugugucguugcaggccuuauucaagcuuaccaugggccagaucgugaccuucuuccaggaggugccccacgugaucgaggaggugaugaacaucgugcugaucgcccugagcauccuggccgugcugaagggccuguacaacuucgccaccugcggccuggugggccugcugaccuuccugcugcugugcggcagaagcugcaccaccggccuguacaagggcguguacgagcugcagacccuggagcugaacauggagacccugaacaugugcaugccccugagcugcaccaagaacaacagccaccacuacaucauggugggcaacgagaccggccuggagcugacccugaccaacaccagcaucaucaaccacaaguucugcaaccugagcgacgcccacaagaagaaccuguacgaccacgcccugaugagcaucaucagcaccuuccaccugagcauccccaacuucaaccaguacgaggccaugagcugcgacuucaacggcggcaagaucagcgugcaguacaaccugagccacagcuacgccggcgacgccgccgaccacugcggcaccguggccaacggcgugcugcagaccuucaugagaauggccuggggcggcagcuacaucgcccuggacagcggcagaggcagaugggacugcaucaugaccagcuaccaguaccugaucauccagaacaccaccugggaggaccacugccaguucagcagacccagccccaucggcuaccugggccugcugagccagagaaccagagacaucuacaucagcagaagaagaagaggcaccuucaccuggacccugagcgacagcgagggcaaggacacccccggcggcuacugccugaccagauggaugcugaucgaggccgagcugaagugcuucggcaacaccgccguggccaagugcaacgagaagcacgacgaggaguucugcgacaugcugagacuguucgacuucugcaagcaggccauccagagacugaaggcccccgcccagaugagcauccagcugaucaacaaggccgugaacgcccugaucaacgaccagcuggugaugaagaaccaccugagagacaucaugggcauccccuacugcaacuacagcagauacugguaccugaaccacaccaccaccggcagaaccagccugcccaagugcuggcuggugagcaacggcagcuaccugaacgagacccacuucagcgacgacaucgagcagcaggccgacaacaugaucaccgagaugcugcagaaggaguacauggagagacagggcaagaccccccugggccugguggaccuguucguguucagcaccagcuucuaccugaucagcaucuuccugcaccuggugaagauccccacccacagacacaucgugggcaagagcugccccaagccccacagacugaaccacaugggcaucugcagcugcggccuguacaagcagcccggcgugcccgugaaguggaagagaugaggacuaguaauaaggaaacuguaugaaugucugugggcaggaagugaagagauccuucuguaaagguuuuuggaauuaugucugcugaauaauaaacuuuuuugaaauaauaaaucugguagaaaaaugagaucuaaaaaaaaaaaaaaaaaaaaaaaaaaaaaaaaaaaaaaaaaaaaaaaaaaaaaaaaaaaaaaaaaaaaaaaaaaaaaaaaaaaaaaaaaaaaaaaaaaaa

SEQ ID NO: 24223 - RNA, 1788 nt, Artificial Sequence
  mRNA product Design b-4 (A100) comprising derived and/or modified sequence from LASV(G733-SLE-2010;Clade IV)__AIT17154__GPCmut2 (opt4)
aggagagucccgcagucggcguccagcggcucugcuuguucgugugugugucguugcaggccuuauucaagcuuaccaugggccagaucgugaccuucuuccaggaggugccccacgugaucgaggaggugaugaacaucgugcugaucgcccugagcauccuggccgugcugaagggccuguacaacuucgccaccugcggcaucgugggccuggugagcuuccugcugcugugcggcagaagcugcaccaccagccuguacaagggcguguacgagcugcagacccuggagcugaacauggagacccugaacaugugcaugccccugagcugcaccaagaacaacagccaccacuacaucauggugggcaacgagaccggccuggagcugacccugaccaacaccagcaucaucaaccacaaguucugcaaccugagcgacgcccacaagaagaaccuguacgaccacgcccugaugagcaucaucagcaccuuccaccugagcauccccaacuucaaccaguacgaggccaugagcugcgacuucaacggcggcaagaucagcgugcaguacaaccugagccacagcuacgccggcgacgccgccaaccacugcggcaccaucgccaacggcgugcugcagaccuucaugagaauggccuggggcggcagcuacaucgcccuggacagcggcagagacagaugggacugcaucaugaccagcuaccaguaccugaucauccagaacaccaccugggaggaccacugccaguucagcagacccagccccaucggcuaccugggccugcugagccagagaaccagagacaucuacaucagcagaagaagaagaggcaccuucaccuggacccugagcgacagcgagggcaaggacacccccggcggcuacugccugaccagauggaugcugaucgaggccgagcugaagugcuucggcaacaccgccguggccaagugcaacgagaagcacgacgaggaguucugcgacaugcugagacuguucgacuucugcaagcaggccauccagagacugaaggcccccgcccagaugagcauccagcugaucaacaaggccgugaacgcccugaucaacgaccagcugaucaugaagaaccaccugagagacaucaugggcauccccuacugcaacuacagcaaguacugguaccugaaccacaccaccaccggcaagaccagccugcccaagugcuggcuggugagcaacggcagcuaccugaacgagacccacuucagcgacgacaucgagcagcaggccgacaacaugaucaccgagaugcugcagaaggaguacauggagagacagggcaagaccccccugggccugguggaccuguucguguucagcaccagcuucuaccugaucagcaucuuccugcaccuggugaagauccccacccacagacacguggugggcaagagcugccccaagccccacagacugaaccacaugggcaucugcagcugcggccuguacggccagcccggcgugcccgugaaguggaagagaugaggacuaguaauaaggaaacuguaugaaugucugugggcaggaagugaagagauccuucuguaaagguuuuuggaauuaugucugcugaauaauaaacuuuuuugaaauaauaaaucugguagaaaaaugagaucuaaaaaaaaaaaaaaaaaaaaaaaaaaaaaaaaaaaaaaaaaaaaaaaaaaaaaaaaaaaaaaaaaaaaaaaaaaaaaaaaaaaaaaaaaaaaaaaaaaaa

SEQ ID NO: 24224 - RNA, 1788 nt, Artificial Sequence
  mRNA product Design b-4 (A100) comprising derived and/or modified sequence from MOPV/LASV reassortant(IGS-1;Clade IV)__AFY05576__GPCmut2 (opt4)
aggagagucccgcagucggcguccagcggcucugcuuguucgugugugugucguugcaggccuuauucaagcuuaccaugggccagaucgugaccuucuuccaggaggugccccacgugaucgaggaggugaugaacaucgugcugaucgcccugagcgugcuggccgugcugaagggccuguacaacuucgccaccugcggccuggugggccuggugaccuuccugcugcugugcggcagaagcugcaccaccagccuguacaagggcguguacgagcugcagacccuggagcugaacauggagacccugaacaugugcaugccccugagcugcaccaagaacaacagccaccacuacaucauggugggcaacgagaccggccuggagcugacccugaccaacaccagcaucaucaaccacaaguucugcaaccugagcgacgcccacaagaagaaccuguacgaccacgcccugaugagcaucaucagcaccuuccaccugagcauccccaacuucaaccaguacgaggccaugagcugcgacuucaacggcggcaagaucagcgugcaguacaaccugagccacagcuacgccggcgacgccgccaaccacugcggcaccguggccaacggcgugcugcagaccuucaugagaauggccuggggcggcagcuacaucgcccuggacagcggcagaggcaacugggacugcaucaugaccagcuaccaguaccugaucauccagaacaccaccugggaggaccacugccaguucagcagacccagccccaucggcuaccugggccugcugagccagagaaccagagacaucuacaucagcagaagaagaagaggcaccuucaccuggacccugagcgacagcgagggcgaggacacccccggcggcuacugccugaccagauggaugcugaucgaggccgagcugaagugcuucggcaacaccgccguggccaagugcaacgagaagcacgacgaggaguucugcgacaugcugagacuguucgacuucugcaagcaggccauccagagacugaaggcccccgcccagaugagcauccagcugaucaacaaggccgugaacgcccugaucaacgaccagcugaucaugaagaaccaccugagagacaucaugggcauccccuacugcaacuacagcaaguacugguaccugaaccacaccaccaccggcagaaccagccugcccaagugcuggcuggugagcaacggcagcuaccugaacgagacccacuucagcgacgacaucgagcagcaggccgacaacaugaucaccgagaugcugcagaaggaguacauggagagacagggcaagaccccccugggccugguggaccuguucguguucagcaccagcuucuaccugaucagcaucuuccugcaccuggugaagauccccacccacagacacaucgugggcaagagcugccccaagccccacagacugaaccacaugggcaucugcagcugcggccuguacaagcagcccggcgugcccgugaaguggaagagaugaggacuaguaauaaggaaacuguaugaaugucugugggcaggaagugaagagauccuucuguaaagguuuuuggaauuaugucugcugaauaauaaacuuuuuugaaauaauaaaucugguagaaaaaugagaucuaaaaaaaaaaaaaaaaaaaaaaaaaaaaaaaaaaaaaaaaaaaaaaaaaaaaaaaaaaaaaaaaaaaaaaaaaaaaaaaaaaaaaaaaaaaaaaaaaaaa

SEQ ID NO: 24225 - RNA, 1788 nt, Artificial Sequence
  mRNA product Design b-4 (A100) comprising derived and/or modified sequence from LASV(LM765-SLE-2012;Clade IV)__AIT17814__GPCmut2 (opt4)
aggagagucccgcagucggcguccagcggcucugcuuguucgugugugugucguugcaggccuuauucaagcuuaccaugggccagaucgugaccuucuuccaggaggugccccacgugaucgaggaggugaugaacaucgugcugaucgcccugagcauccuggccgugcugaagggccuguacaacuucgccaccugcggccuggugggccuggugaccuuccugcugcugugcggcagaagcugcaccaccagccuguacaagggcguguacgagcugcagacccuggagcugaacauggagacccugaacaugugcaugccccugagcugcaccaagaacaacagccaccacuacaucauggugggcaacgagaccggccuggagcugacccugaccaacaccagcaucaucgaccacaaguucugcaaccugagcgacgcccacagaaagaaccuguacgaccacgcccugaugagcaucaucagcaccuuccaccugagcauccccaacuucaaccaguacgaggccaugagcugcgacuucaacggcggcaagaucagcgugcaguacaaccugagccacagcuacgccaaggacgccgccgaccacugcggcaccguggccaacggcgugcugcagaccuucaugagaauggccuggggcggcagcuacaucgcccuggacagcggcagaggcagaugggacugcaucaugaccagcuaccaguaccugaucauccagaacaccaccugggaggaccacugccaguucagcagacccagccccaucggcuaccugggccugcugagccagagaaccagagacaucuacaucagcagaagaagaagaggcaccuucaccuggacccugagcgacagcgagggcaaggacacccccggcggcuacugccugaccagauggaugcugaucgaggccgagcugaagugcuucggcaacaccgccguggccaagugcaacgagaagcacgacgaggaguucugcgacaugcugagacuguucgacuucugcaagcaggccauccagagacugaaggcccccgcccagaugagcauccagcugaucaacaaggccgugaacgcccugaucaacgaccagcugaucaugaagaaccaccugagagacaucaugggcauccccuacugcaacuacagcaaguacugguaccugaaccacaccaccaccggcaagaccagccugcccaagugcuggcuggugagcaacggcagcuaccugaacgagacccacuucagcgacgacaucgagcagcaggccgacaacaugaucaccgagaugcugcagaaggaguacauggagagacagggcaagaccccccugggccugguggaccuguucguguucagcaccagcuucuaccugaucagcaucuuccugcaccuggugaagauccccacccacagacacaucgugggcaagcccugccccaagccccacagacugaaccacaugggcaucugcagcugcggccuguacaagcagcccggcgugcccgugaaguggaagagaugaggacuaguaauaaggaaacuguaugaaugucugugggcaggaagugaagagauccuucuguaaagguuuuuggaauuaugucugcugaauaauaaacuuuuuugaaauaauaaaucugguagaaaaaugagaucuaaaaaaaaaaaaaaaaaaaaaaaaaaaaaaaaaaaaaaaaaaaaaaaaaaaaaaaaaaaaaaaaaaaaaaaaaaaaaaaaaaaaaaaaaaaaaaaaaaaa

SEQ ID NO: 24226 - RNA, 1788 nt, Artificial Sequence
  mRNA product Design b-4 (A100) comprising derived and/or modified sequence from LASV(LM776-SLE-2012;Clade IV)__AIT17824__GPCmut2 (opt4)
aggagagucccgcagucggcguccagcggcucugcuuguucgugugugugucguugcaggccuuauucaagcuuaccaugggccagaucgugaccuucuuccaggaggugccccacgugaucgaggaggugaugaacaucgugcugaucgcccugagcauccuggccgugcugaagggccuguacaacuucgccaccugcggccuggugggccuggugaccuuccugcugcugugcggcagaagcugcaccaccagcguguacaagggcguguacgagcugcagacccuggagcugaacauggagacccugaacaugugcaugccccugagcugcaccaagaacaacagccaccacuacaucauggugggcaacgagaccggccuggagcugacccugaccaacaccagcaucaucaaccacaaguucugcaaccugagcgacgcccacaagaagaaccuguacgaccacgcccugaugagcaucaucagcaccuuccaccugagcauccccaacuucaaccaguacgaggccaugagcugcgacuucaacggcggcaagaucagcgugcaguacaaccugagccacagcuacgccggcgacgccgccaaccacugcggcaccguggccaacggcgugcugcagaccuucaugagaauggccuggggcggcagcuacaucgcccuggacagcggccacggcaagugggacugcaucaugaccagcuaccaguaccugaucauccagaacaccaccugggaggaccacugccaguucagcagacccagccccaucggcuaccugggccugcugagccagagaaccagagacaucuacaucagcagaagaagaagaggcaccuucaccuggacccugagcgacagcgagggcaaggacacccccggcggcuacugccugaccagauggaugcugaucgaggccgagcugaagugcuucggcaacaccgccguggccaagugcaacgagaagcacgacgaggaguucugcgacaugcugagacuguucgacuucugcaagcaggccauccagagacugaaggcccccgcccagaugagcauccagcugaucaacaaggccgugaacgcccugaucaacgaccagcugaucaugaagaaccaccugagagacaucaugggcauccccuacugcaacuacagcaaguacugguaccugaaccacaccaccaccggcaagaccagccugcccaagugcuggcuggugagcaacggcagcuaccugaacgagacccacuucagcgacgacaucgagcagcaggccgacaacaugaucaccgagaugcugcagaaggaguacauggagagacagggcaagaccccccugggccugguggaccuguucguguucagcaccagcuucuaccugaucagcaucuuccugcaccuggugaagauccccacccacagacacaucgugggcaagagcugccccaagccccacagacugaaccacaugggcaucugcagcugcggccuguacaagcagcccggcgugcccgugagauggaagagaugaggacuaguaauaaggaaacuguaugaaugucugugggcaggaagugaagagauccuucuguaaagguuuuuggaauuaugucugcugaauaauaaacuuuuuugaaauaauaaaucugguagaaaaaugagaucuaaaaaaaaaaaaaaaaaaaaaaaaaaaaaaaaaaaaaaaaaaaaaaaaaaaaaaaaaaaaaaaaaaaaaaaaaaaaaaaaaaaaaaaaaaaaaaaaaaaa

SEQ ID NO: 24227 - RNA, 1788 nt, Artificial Sequence
  mRNA product Design b-4 (A100) comprising derived and/or modified sequence from LASV(Mad39;Clade IV)__ANH09722__GPCmut2 (opt4)
aggagagucccgcagucggcguccagcggcucugcuuguucgugugugugucguugcaggccuuauucaagcuuaccaugggccagaucgugaccuucuuccaggaggugccccacgugaucgaggaggugaugaacaucgugcugaucgcccugagcauccuggccgugcugaagggccuguacaacguggccaccugcggccugaucggccuggugaccuuccugcugcugugcggcagaagcugcaccaccacccuguacaagggcguguacgagcugcaggcccuggagcugaacauggagacccugaacaugugcaugccccugagcugcaccaagaacaacagccaccacuacaucagagugggcaacgagaccggccuggagcugacccugaccaacaccagccugaucaaccacaaguucugcaaccugagcgacgcccacaagaagaaccuguacgaccacgcccugaugagcaucaucagcaccuuccaccugagcauccccaacuucaaccaguacgaggccaugagcugcgacuucaacgacggcaagaucagcgugcaguacaaccugagccacaccuacgccggcgacaccgccaaccacugcggcaccguggccaacggcgugcugcagaccuucaugagaauggccuggggcggcagcuacaucgcccuggacagcggcagaggcggcugggacugcaucaugaccagcuaccaguaccugaucauccagaacaccaccugggaggaccacugccaguucagcagacccagccccaucggcuaccugggccugcugagccagagaaccagagacaucuacaucagcagaagaagaagaggcaccuucaccuggacccugagcgacagcgagggcaaggacacccccggcggcuacugccugaccagauggaugcugaucgaggccgagcugaagugcuucggcaacaccgccguggccaagugcaacgagaagcacgacgaggaguucugcgacaugcugagacuguucgacuucugcaagcaggccauccagagacugaaggcccccgcccagaugagcauccagcugaucaacaaggccgugaacgcccugaucaacgaccagcugaucaugaagaaccaccugagagacaucaugggcauccccuacugcaacuacagcaaguacugguaccugaaccacaccgugaccggcaagaccagccugcccaagugcuggcuggugagcaacggcagcuaccugaacgagacccacuucagcgacgacaucgagcagcaggccgacaacaugaucaccgagaugcugcagaaggaguacauggagagacagggcaagaccccccugggccugguggaccuguucguguucagcaccagcuucuaccugaucagcaucuuccugcaccuggugaagauccccacccacagacacguggugggcaagcccugccccaagccccacagacugaaccacaugggcaucugcagcugcggcuucuacaagcagcccggcgugcccgugagauggaagagaugaggacuaguaauaaggaaacuguaugaaugucugugggcaggaagugaagagauccuucuguaaagguuuuuggaauuaugucugcugaauaauaaacuuuuuugaaauaauaaaucugguagaaaaaugagaucuaaaaaaaaaaaaaaaaaaaaaaaaaaaaaaaaaaaaaaaaaaaaaaaaaaaaaaaaaaaaaaaaaaaaaaaaaaaaaaaaaaaaaaaaaaaaaaaaaaaa

SEQ ID NO: 24228 - RNA, 1788 nt, Artificial Sequence
  mRNA product Design b-4 (A100) comprising derived and/or modified sequence from LASV(Z0947-SLE-2011;Clade IV)__AIT17840__GPCmut2 (opt4)
aggagagucccgcagucggcguccagcggcucugcuuguucgugugugugucguugcaggccuuauucaagcuuaccaugggccagaucgugaccuucuuccaggaggugccccacgugaucgaggaggugaugaacaucgugcugaucgcccugagcauccuggccgugcugaagggccuguacaacuucgccaccugcggccuggugggccuggugaccuuccugcugcugugcggcagaagcugcaccaucagccuguacaagggcguguacgagcugcagacccuggagcugaacauggagacccugaacaugugcaugccccugagcugcaccaagaacaacagccaccacuacaucauggugggcaacgagaccggccuggagcugacccugaccaacaccagcaucaucaaccacaaguucugcaaccugagcgacgcccacaagaagaaccuguacgaccacgcccugaugagcaucaucagcaccuuccaccugagcauccccaacuucaaccaguacgaggccaugagcugcgacuucaacggcggcaagaucagcgugcaguacaaccugagccacagcuacgccggcgacgccgccaaccacugcggcaccguggccaacggcgugcugcagaccuucaugagaauggccuggggcggcagcuacaucgcccuggacagcggcagagacagaugggacugcaucaugaccagcuaccaguaccugaucauccagaacaccaccugggaggaccacugccaguucagcagacccagccccaucggcuaccugggccugcugagccagagaaccagagacaucuacaucagcagaagaagaagaggcaccuucaccuggacccugagcgacagcgagggcaaggacacccccggcggcuacugccugaccagauggaugcugaucgaggccgagcugaagugcuucggcaacaccgccguggccaagugcaacgagaagcacgacgaggaguucugcgacaugcugagacuguucgacuucugcaagcaggccauccagagacugaaggcccccgcccagaugagcauccagcugaucaacaaggccgugaacgcccugaucaacgaccagcugaucaugaagaaccaccugagagacaucaugggcauccccuacugcaacuacagcaaguacugguaccugaaccacaccaccaccggcaagaccagccugcccaagugcuggcuggugagcaacggcagcuaccugaacgagacccacuucagcgacgacaucgagcagcaggccgacaacaugaucaccgagaugcugcagaaggaguacauggagagacagggcaagaccccccugggccugguggaccuguucguguucagcaccagcuucuaccugaucagcaucuuccugcaccuggugaagauccccacccacagacacaucgugggcaagcccugccccaagccccacagacugaaccacaugggcaucugcagcugcggccuguacaagcagcccggcgugcccgugaaguggaagagaugaggacuaguaauaaggaaacuguaugaaugucugugggcaggaagugaagagauccuucuguaaagguuuuuggaauuaugucugcugaauaauaaacuuuuuugaaauaauaaaucugguagaaaaaugagaucuaaaaaaaaaaaaaaaaaaaaaaaaaaaaaaaaaaaaaaaaaaaaaaaaaaaaaaaaaaaaaaaaaaaaaaaaaaaaaaaaaaaaaaaaaaaaaaaaaaaa

SEQ ID NO: 24229 - RNA, 1788 nt, Artificial Sequence
  mRNA product Design b-4 (A100) comprising derived and/or modified sequence from LASV(Josiah;Clade IV)__NP_694870__GPCmut2 (opt5)
aggagagucccgcagucggcguccagcggcucugcuuguucgugugugugucguugcaggccuuauucaagcuuaccaugggccagaucgugaccuucuuucaagaggucccccacguuauugaagaggugaugaacaucgugcugauugcccucagcguccuggcugugcuuaaggggcuguacaauuucgccacaugcggacucguuggccuggugacguuucuucugcucugugggagauccugcaccacaucucuguauaaaggagucuacgaacugcagacccucgagcugaacauggaaacacuuaauauguguaugccucugagcugcaccaagaacaauucccaucacuauaucauggugggcaacgagacagggcucgagcugacccuuacgaauaccucuauuaucaaccauaaauucuguaaucugagcgacgcgcacaagaaaaaccucuacgaucaugcucugauguccaucauuucuacauuucaccugagcaucccgaauuucaaccaguaugaagccauguccugcgacuuuaauggaggcaagauuagcguucaguacaaccucucucacuccuaugccggcgaugcugccaaucauugugggaccguggcuaacggaguccugcaaacauucaugcggauggccuggggcgggagcuacaucgcgcuugacucuggacgcggcaacugggauugcauuaugaccuccuaccaguaucugaucauucagaauacgacaugggaggaccacugucaguuuagcagacccucuccuaucggguaccucggacugcuuucccaacggacccgcgauaucuauauuagcagacggcgcagaggcacauucaccuggacccuguccgacucugaaggcaaggauacacccgggggauacugccucacgcgguggaugcugaucgaggccgagcugaaauguuuuggcaacaccgcuguggccaagugcaaugaaaaacaugacgaggaguucugcgauaugcuccgccuguuugacuucuguaagcaggcuauucagagacuuaaagccccugcgcagaugagcauccaacugauuaacaaggccgugaaugcucucaucaacgaucagcugaucaugaagaaucaccuucgggacauuauggggauccccuauugcaacuacuccaaauauugguaccugaaucacacaaccacaggacgcaccagccucccuaaguguuggcuggucucuaacggcuccuaccugaaugaaacgcauuucagcgacgauauugaacagcaagccgacaacaugaucacagagaugcuccagaaagaguauauggaaagacaggggaagaccccgcugggacuuguugaucuguuuguguucucuaccagcuuuuaccucauuuccaucuuccugcaccuggugaaaauccccacacaucggcacauugucggcaagucuugcccuaaaccccaucgccuuaaucacaugggcaucuguagcugcgggcucuauaagcagccuggagugcccguuaaguggaaaagaugaggacuaguaauaaggaaacuguaugaaugucugugggcaggaagugaagagauccuucuguaaagguuuuuggaauuaugucugcugaauaauaaacuuuuuugaaauaauaaaucugguagaaaaaugagaucuaaaaaaaaaaaaaaaaaaaaaaaaaaaaaaaaaaaaaaaaaaaaaaaaaaaaaaaaaaaaaaaaaaaaaaaaaaaaaaaaaaaaaaaaaaaaaaaaaaaa

SEQ ID NO: 24230 - RNA, 1785 nt, Artificial Sequence
  mRNA product Design b-4 (A100) comprising derived and/or modified sequence from LASV(LP;Clade I)__AAF86701__GPCmut2 (opt5)
aggagagucccgcagucggcguccagcggcucugcuuguucgugugugugucguugcaggccuuauucaagcuuaccaugggccagaucauuaccuucuuucaagaggugccccacgucaucgaagagguuaugaacauugugcugaucgcccucagccugcuugcuauucugaaggggcucuacaauaucgccacaugcggaaucauuggccugguggcguuccuuuuucugugugggaaauccugcucucucacgcugaagggaggcuaugaacugcagacccucgagcugaacauggaaacacuuaauauguguaugccucugagcugcaccaaaaacuccucucaucacuacaucagagucgggaaugagacaggacucgagcugacccuuacaaacaccagcauuaucaaucauaaguucuguaaccuguccgacgcucacaaaaagaaucucuaugaucaugcccugaugucuauuaucagcacguuucaccuguccauuccgaacuucaaucaguacgaagccaugagcugcgacuuuaacggcggcaagaucucugugcaguauaaucucucccacagcuacgcuggggaugccgcugagcauuguggaaccguugccaacggcgugcugcaaacauucaugcggauggcguggggagggcgcuauaucgcccuugacucuggcaaagggaauugggauugcauuaugaccuccuaccaguaccugaucauucagaacacaaccugggaagaccacugucaguuuagcagacccucuccuaucggauaucucggccugcuuucccaacggacgcgcgauauuuacaucagcagacggcgcagaggcacauucaccuggacacuguccgacucugaggggaacgagacccccggaggcuauugccucacccgguggaugcugaucgaagcugagcugaaguguuuugggaauacagccgucgcuaaaugcaacgaaaagcaugaugaggaguucugcgacaugcuccgccuguuugauuucuguaaacaggccauuagacggcuuaaggcgccugcccagaugagcauccagcugauuaauaaggcugugaacgcccucaucaaugaccaacugauuaugaaaaaccaccuucgcgauaucaugggaauccccuacugcaauuauuccaaguacugguaucugaaccacacgagcucuggcagaaccucccucccuaaauguuggcugauuagcaaugggucuuaccugaacgaaacacaguucagcgacgacaucgagcagcaagcugauaauaugauuaccgaaaugcuccagaaggaguacaucgaacggcagggaaaaacaccgcugggccuuguugacauuuuuaucuucuccaccucuuuuuaucugauuagcaucuuccuccaucugaucaagauucccacgcaccgccauaucgugggcaaaccuugccccaagccucacagacugaaccauaugggggucuguuccugcggacuuuacaagcaccccggcgugccgacaaaauggaagcggugaggacuaguaauaaggaaacuguaugaaugucugugggcaggaagugaagagauccuucuguaaagguuuuuggaauuaugucugcugaauaauaaacuuuuuugaaauaauaaaucugguagaaaaaugagaucuaaaaaaaaaaaaaaaaaaaaaaaaaaaaaaaaaaaaaaaaaaaaaaaaaaaaaaaaaaaaaaaaaaaaaaaaaaaaaaaaaaaaaaaaaaaaaaaaaaaa

SEQ ID NO: 24231 - RNA, 1785 nt, Artificial Sequence
  mRNA product Design b-4 (A100) comprising derived and/or modified sequence from LASV(803213;Clade II)__AAF86703__GPCmut2 (opt5)
aggagagucccgcagucggcguccagcggcucugcuuguucgugugugugucguugcaggccuuauucaagcuuaccaugggccagaucauuaccuucuuucaagaggugccccacgucaucgaagagguuaugaacauugugcugaucgcccucagccugcuugcuauucugaaggggaucuacaauguggccacaugcggacucuucggccugaucuccuuucuucugcucugugggagaucuugcagcgucacguauaaaggaguguacgaacugcagacccuggagcucaacauggcgaaucugaacauguguaugccucuuuccugcacaaagaauaacucucaucacuauauuaugguuggcaaugaaaccgggcuggagcucacacugaccaacacaagcaucauuaaucauaaauucuguaaccuuuccgacgcucacaagaaaaaucuguacgaucaugcccucaugucuaucauuagcaccuuucaccuguccaucccgaacuucaaucaguaugaggccaugagcugcgacuuuaacggaggcaagauuucugugcaguacaaucugucccacagcuucgcugucgaugccgcuaaccauuguggcacgaucgccaacggggugcuccaaaccuuuaugcggauggcguggggaggcucuuauaucgcccuggacuccgggaagggaaauugggauugcauuaugacaagcuaccaguaccuuaucauucagaacaccacaugggaagaccacugucaguucucucgccccuccccuaucggcuaucuggggcuccugagccaaagaacccgggauauuuacaucucccgcagacggcgcggaacguuuacauggacccuuucugacagcgagggcaaugaagcucccggcggguauugccugacaagauggaugcucaucgaggccgagcugaaauguuucggaaacaccgcuguugccaagugcaaugaaaaacaugaugaggaauuuugcgacaugcugcgccucuucgauuucuguaagcaggcgauuaaacggcugaagaccccugcccagauguccauccagcuuauuaacaaggcugugaaugcccugaucaacgaccaacucauuaugaaaaaucaccugagagauaucaugggcauccccuacugcaacuauagccgguacugguaucuuaaucacacagucacggggaagaccucucugccucgcuguuggcucguguccaacggaagcuaccugaaugagacacauuuuucugacgacauugaacagcaggcugauaacaugaucaccgagaugcugcaaaaagaguacauggacagacagggcaagacaccgcucgggcugguggaucuuuucgucuuuagcaccuccuucuaucugauuucuaucuuucuccaccugguuaaaauucccacgcaucggcacaucgugggaaagccuugccccaaaccucaucgccugaaucacaugggcauuuguagcugcggccuuuacaagcaccccggggugccggucaaguggaaaagaugaggacuaguaauaaggaaacuguaugaaugucugugggcaggaagugaagagauccuucuguaaagguuuuuggaauuaugucugcugaauaauaaacuuuuuugaaauaauaaaucugguagaaaaaugagaucuaaaaaaaaaaaaaaaaaaaaaaaaaaaaaaaaaaaaaaaaaaaaaaaaaaaaaaaaaaaaaaaaaaaaaaaaaaaaaaaaaaaaaaaaaaaaaaaaaaaa

SEQ ID NO: 24232 - RNA, 1785 nt, Artificial Sequence
  mRNA product Design b-4 (A100) comprising derived and/or modified sequence from LASV(GA391;Clade III)__CAA36645__GPCmut2 (opt5)
aggagagucccgcagucggcguccagcggcucugcuuguucgugugugugucguugcaggccuuauucaagcuuaccaugggccagaucgugaccuucuuucaagaggucccccacguuauugaagaggugaugaacaucgugcugauugcccucagcauccuggcuauucuuaaggggcuguacaaugucgccacaugcggacucaucggccuggugacguuccuucugcucuccgggagaucuuguagccugaucuauaaaggaaccuacgaacugcagacacucgagcugaacauggaaacccuuaauaugugcaugccucuguccuguacaaagaacaauucucaucacuauauucggguuggcaacgagaccgggcucgagcugacacuuaccaauacgagcauccugaaccauaaauuuugcaaucucuccgacgcgcacaagcgcaaccuguacgaucauucucugaugagcauuaucuccaccuuccaccucagcauuccgaauuuuaaccaguaugaagcuaugucuugugacuucaauggaggcaaaaucacagugcaguacaaccugucccacagcuuugccgucgaugccgcuggccauugcgggacccuugccaauggagugcugcaaacauucaugagaauggcuuggggcgggucuuauauugcccucgacuccggacggggcaacugggauuguaucaugaccagcuaccaguaccugaucauucagaacacgacaugggacgaucacugccaguuuucucgccccuccccuaucggguaucuuggacugcucagccaaagaacccgggacauuuacaucucccgcagacggcgcggcacauucaccuggacccugucugauagcgagggcaaugaaacacccgggggauauugucugacgagauggaugcucauugaggcggagcugaagugcuuuggcaacaccgccguugcuaaguguaaugaaaaacaugacgaggaguucugcgauaugcuucggcuguuugacuucugcaagcaggccauccgcagacucaaaaccccugcucagauguccauccagcugauuaacaaggccgugaaugcgcuuaucaacgaucaacugauuaugaaaaaucaccuccgggacaucauggggauucccuacuguaacuauagccgcuacugguaucugaaucacacaucuacaggaaagaccucccugccuagaugcuggcucaucagcaacggcucuuaccugaaugaaacgaaguucagcgacgauaucgaacagcaggccgacaacaugauuacagagaugcuucaaaaagaguacaucgaucggcaggggaagaccccgcugggacucgucgaccuguuuguguucuccaccucuuuuuaucugauuagcaucuuccuucaucucgugaaaauucccacacacagacauaucgucggcaagccuugucccaaaccucaccgccugaaucauaugggcauuugcuccugugggcuguacaagcagcccggaguuccggugcgguggaaaagaugaggacuaguaauaaggaaacuguaugaaugucugugggcaggaagugaagagauccuucuguaaagguuuuuggaauuaugucugcugaauaauaaacuuuuuugaaauaauaaaucugguagaaaaaugagaucuaaaaaaaaaaaaaaaaaaaaaaaaaaaaaaaaaaaaaaaaaaaaaaaaaaaaaaaaaaaaaaaaaaaaaaaaaaaaaaaaaaaaaaaaaaaaaaaaaaaa

SEQ ID NO: 24233 - RNA, 1788 nt, Artificial Sequence
  mRNA product Design b-4 (A100) comprising derived and/or modified sequence from LASV(AV;Clade V)__CCA30314__GPCmut2 (opt5)
aggagagucccgcagucggcguccagcggcucugcuuguucgugugugugucguugcaggccuuauucaagcuuaccaugggccagaucgugaccuucuuucaagaggucccccacguuauugaagaggugaugaacaucgugcugauugcccucagcauccuggcuguccuuaaggggcuguacaauauugccacaugcggacucaucggccugaucacguuccuucugcucugugggagauccugcucuagcaaccuguauaaaggaguguacgaacugcagucccucgaccugaauauggagacccuuaacauguguaugccucugucuugcacaaagaauaacagccaucacuauauucggguuggcaaugauaccgggcucgaacugacacuuaccaacacauccauccugaaucauaaauuuuguaaccucucugacgcgcacaagaaagaucuguacgaccaugcucugaugagcauuaucuccaccuuccaccucagcauuccgaauuuuaaccaguaugaggccaugucuugcgauuucaauggaggcaagaucuccgugcaguacaaccugagccacucuuaugccauugacgcugccaaucauuguggcacggucgcuaacgggauccuucaaaccuuuaugcgcauggccuggggaggcuccuacaucgcgcuggauagcgggagaggaaacugggacugcauuaugacaucuuaccaguaucucaucauucagaauaccacaugggagaaccacugucaguucucccggcccagcccuaucggcuaccuggggcuucugucccaacgcaccagagauauuuauaucucucggcgcagacggggaacguuuacauggacccucagcgacuccgaaggcaaugccacacccggcggguacugccugacccgcuggaugcugaucgaggcugaacucaaguguuucggaaacaccgccguggcuaaaugcaaugagaagcaugaugaggaauuuugcgacaugcugagacuuuucgauuuuuguaaacaggccauuagccggcugaagucuccugcgcagauguccauccagcucauuaacaaagccguuaaugcucugaucaacgaccaacuuauuaugaagaaucaucugcgcgacaucaugggcauccccuauugcaacuacagcaaguauugguaccucaaucacacaauuacggggaaaaccucucugccuaaguguuggcuggugagcaacggauccuaccucaaugagacacacuucucugaugacaucgaacagcaggccgauaacaugauuaccgagaugcugcaaaaagaauauauggagagacagggcaagacaccgcuugggcuggucgaccucuucguguuuagcaccuccuucuaccugaucagcauuuuucugcggcuugugaaaauccccacgcaccgccauauugucggaaagccuugccccaaaccucacagacucaaucauaugggcaucuguucuugcggccuguauaagcagcccgggguuccggugcgguggaagagaugaggacuaguaauaaggaaacuguaugaaugucugugggcaggaagugaagagauccuucuguaaagguuuuuggaauuaugucugcugaauaauaaacuuuuuugaaauaauaaaucugguagaaaaaugagaucuaaaaaaaaaaaaaaaaaaaaaaaaaaaaaaaaaaaaaaaaaaaaaaaaaaaaaaaaaaaaaaaaaaaaaaaaaaaaaaaaaaaaaaaaaaaaaaaaaaaa

SEQ ID NO: 24234 - RNA, 1785 nt, Artificial Sequence
  mRNA product Design b-4 (A100) comprising derived and/or modified sequence from LASV(Togo/2016/7082;Clade VI)__AMR44577__GPCmut2 (opt5)
aggagagucccgcagucggcguccagcggcucugcuuguucgugugugugucguugcaggccuuauucaagcuuaccaugggccagaucauuaccuucuuucaagaggugccccacgucaucgaagagguuaugaacauugugcugaucgcccucagccugcuugcuauucugaaggggguguacaaugucgccacaugcggaaucaucggccucgugacguuccuguuucuuugugggagauccugcucucugauuuauaaaggaagcuacgaacuccagacccuggagcugaacauggaaacacucaauauguguaugccucuguccugcaccaagaacucuagccaucacuauauccggguuggcaaugagacagggcuugagcugacccucacaaacaccuccauuaucaaucauaaauucuguaaccugucugacgcgcacaagcgcaaucuuuacgaucaugcucugaugagcauucucuccacguuucaccugagcaucccgaacuucaaucaguaugaagccaugucuugcgacuuuaacggaggcaaaauuuccgugcaguacaaucugagccacgccuaugcugucgaugccgcugagcauuguggcaccguggccaacgggguucuccaaacauucaugagaauggcguggggaggcucuuacaucgcccuggacuccgggcggggaaauugggauugcaucaugaccagcuaccaguaucuuauuauccagaacacaaccugggaagaccacugucaguuuucucgccccuccccuauuggcuaccuggggcuccugagccaaagaacgcgggauaucuauauuucccgcagacggcgcggaacauucaccuggacacuuucugacagcgagggcaacgagacccccggcggguacugccugaccagauggaugcucaucgaagcugagcugaaguguuuuggaaauacagccguggcuaagugcaacgaaaaacaugaugaggaguucugcgacaugcugcggcucuuugauuucuguaagcaggccauccagcgccugaaauccccugcgcagaugagcauucaacuuaucaauaaggccgucaacgcucugauuaaugaccagcucaucaugaaaaaccaccugagagauaugaugggcauucccuauugcaauuacucuaaguauugguaccuuaaccacacguccagcgggcggaccucucugccuaaguguuggcucgugagcaauggauccuaccugaacgaaacacauuucucugacgacaucgagcagcaagccgauaauaugaucaccgaaaugcugcagaaagaguauauugaccgccagggcaagacaccgcucgggcugguggaucuuuuugucuucagcaccuccuuuuaccugaucagcauuuuccuccaccugaucaaaauucccacgcauagacacaucguuggaaagccuugccccaaaccucaucggcugaaccacaugggcauuuguucuugcggccuuuauaagcagcccggggugccgacaagauggaaacgcugaggacuaguaauaaggaaacuguaugaaugucugugggcaggaagugaagagauccuucuguaaagguuuuuggaauuaugucugcugaauaauaaacuuuuuugaaauaauaaaucugguagaaaaaugagaucuaaaaaaaaaaaaaaaaaaaaaaaaaaaaaaaaaaaaaaaaaaaaaaaaaaaaaaaaaaaaaaaaaaaaaaaaaaaaaaaaaaaaaaaaaaaaaaaaaaaa

SEQ ID NO: 24235 - RNA, 1785 nt, Artificial Sequence
  mRNA product Design b-4 (A100) comprising derived and/or modified sequence from LASV(KAK-428;Clade n.d. (VII))__ANH09740__GPCmut2 (opt5)
aggagagucccgcagucggcguccagcggcucugcuuguucgugugugugucguugcaggccuuauucaagcuuaccaugggccagaucgugaccuucuuucaagaggucccccacguuauugaagaggugaugaacaucgugcugauugcccucagccugcuugcuauccugaaggggcucuacaauuucgccacaugcggagucauuggccugaucacguuucuucugcucugugggagauccugcucugcgaccuauaaaggacaguacgaacugcagacacuggagcucaacauggaaagccugaauauguguaugccucuuuccugcaccaagaacaauucucaucacuauauccgggcuggcaacaauacagggcuggagcucacccugacaaacaccagcauuaucucccauaaauucuguaaucuuucugacgcccacaagaaaaaccuguacgaucauacgcucaugagcauuaucaccacauuucaccuguccauuccgaauuucaaccaguaugaggccaugagcugcgacuuuaauggaggcaagaucucuauucaauacaaccugucccacagcuaugcuggcgaugccgcucagcauugugggaccguggccaauggaguucuccagacauucaugcgcauggcguggggcgggucuuaccuggcccuugacuccggaagacggggcugggauugcaucaucagcucuuaccaguaucugauuauccaaaacaccacgugggacgaucacugucaguuuucccgccccagcccuauuggguaccucggauucgugucccagaagacaagagacaucuauauuucucggcgcagacggggcaccuuuacauggacccugagcgauuccgaaggccaugacaugcccgggggauacugccuuacccgcuggaugcugaucgaggcugaucucaaauguuucggcaacacagccgucgcuaagugcaaugaaaaacacgacgaggaguuuugcgauauguggagacuguucgacuucuguaagcaggccauccaacggcugaaagcgccugcccagaugaacauucagcucaucaauaaggcugugaacgcccugauuaaugaccaacuuaugaugaagaaccaucugcgcgauaucauggggauucccuauugcaauuacagcaaauuuugguaucucaacaauacgaccacaggaagaaccucucugccucgguguuggcuuaucuccaacggcagcuaccugaaugaaacacacuucucugacgauaucgagcagcaggcugacaacaugauuaccgaaaugcuccagaaggaguacauggaucgccaagggaaaacgccgcugggacugguugaccucuuuguguucagcacauccuuuuaucugaucaccauuuuccuucaccuggucaagauccccacccauagacacauugugggcaaaccuugccccaagccucaucggcucaaucacaugggcaucuguucuugcgggcuguacaaacagcccggagugccggucagauggaagcgcugaggacuaguaauaaggaaacuguaugaaugucugugggcaggaagugaagagauccuucuguaaagguuuuuggaauuaugucugcugaauaauaaacuuuuuugaaauaauaaaucugguagaaaaaugagaucuaaaaaaaaaaaaaaaaaaaaaaaaaaaaaaaaaaaaaaaaaaaaaaaaaaaaaaaaaaaaaaaaaaaaaaaaaaaaaaaaaaaaaaaaaaaaaaaaaaaa

SEQ ID NO: 24236 - RNA, 1785 nt, Artificial Sequence; identical to SEQ ID NO: 24230
  mRNA product Design b-4 (A100) comprising derived and/or modified sequence from LASV(Pinneo-NIG-1969;Clade I)__AIT17836__GPCmut2 (opt5)

SEQ ID NO: 24237 - RNA, 1785 nt, Artificial Sequence
  mRNA product Design b-4 (A100) comprising derived and/or modified sequence from LASV(ISTH0009-NIG-2011;Clade II)__AIT17404__GPCmut2 (opt5)
aggagagucccgcagucggcguccagcggcucugcuuguucgugugugugucguugcaggccuuauucaagcuuaccaugggccagaucauuaccuucuuucaagaggugccccacgucaucgaagagguuaugaacauugugcugaucgcccucagccugcuugcuauucugaaggggaucuacaauguggccacaugcggacucuucggccuggucuccuuucuucugcucugugggagaucuugcagcacgaccuauaaaggaguguacgaacugcagacacuggagcucgacauggcgucccugaacauguguaugccucuuucuugcaccaagaauaacagccaucacuauaucaugguuggcaaugaaacagggcuggagcucacccugacaaacaccuccauuaucaaucauaaauucuguaaccuuucugaugcucacaagaaaaaucuguacgaccaugcccucaugagcauuaucuccacguuucaccugagcauuccgaacuucaaucaguaugaggccaugucuugcgauuuuaacggaggcaagaucuccgugcaguacaaucugagccacgcuuaugccgucgacgcugccaaccauuguggcaccauugcgaauggggugcuccaaacauucaugcggauggccuggggaggcucuuacaucgcucuggauuccgggaagggaagcugggacugcaucaugaccucuuaccaguaucuuauuauccagaacacaaccugggaagaucacugucaguuuucccgccccagcccuauuggcuaccuggggcuccugucccaaagaacgcgggacaucuauauuucucgcagacggcgcggaacauucaccuggacacuuagcgauuccgagggcaacgaaacccccggcggguacugccugaccagauggaugcucaucgaggccgagcugaaauguuuuggaaauacagcuguugccaagugcaacgaaaaacaugacgaggaguucugcgauaugcugcggcucuuugacuucuguaagcaggcgauccgcagacugaaaacgccugcccagaugagcauucagcuuaucaauaaggcugugaacgcccugauuaaugaucaacucaucaugaagaaccaucugcgggacauuaugggcauccccuauugcaauuacucuaaauauugguaccuuaaccacaccgucacagggaagaccucccugccucgcuguuggcucgugagcaauggaucuuaccugaacgaaacacacuucagcgacgauaucgaacagcaggcugacaauaugauuaccgagcugcuccaaaaagaguauauggauagacagggcaagacgccgcuggggcuuguggaccuguuugucuucuccacaucuuuuuaccucaucagcauuuuccugcaccugaucaaaauucccacccaucggcacaucaccggaaagccuugccccaaaccucaucgccuuaaccacaugggcauuuguuccugcggccucuauaagcaccccgggguuccggugaaguggaaaagaugaggacuaguaauaaggaaacuguaugaaugucugugggcaggaagugaagagauccuucuguaaagguuuuuggaauuaugucugcugaauaauaaacuuuuuugaaauaauaaaucugguagaaaaaugagaucuaaaaaaaaaaaaaaaaaaaaaaaaaaaaaaaaaaaaaaaaaaaaaaaaaaaaaaaaaaaaaaaaaaaaaaaaaaaaaaaaaaaaaaaaaaaaaaaaaaaa

SEQ ID NO: 24238 - RNA, 1785 nt, Artificial Sequence
  mRNA product Design b-4 (A100) comprising derived and/or modified sequence from LASV(ISTH2010-NIG-2012;Clade II)__AIT17482__GPCmut2 (opt5)
aggagagucccgcagucggcguccagcggcucugcuuguucgugugugugucguugcaggccuuauucaagcuuaccaugggccagaucauuaccuucuuucaagaggugccccacgucaucgaagagguuaugaacauugugcugaucgcccucagccugcuugcuauucugaaggggaucuacaauguggccacaugcggacucuucggccuggucuccuuucuucugcucugugggagaucuugcagcacgaccuauaaaggaguguacgaacugcagacacuggagcucgacauggcgucccugaacauguguaugccucuuucuugcaccaagaauaacagccaucacuauaucaugguuggcaaugaaacagggcuggagcucacccugacaaacaccuccauuaucaaucauaaauucuguaaccuuucugaugcucacaagaaaaaucuguacgaccaugcccucaugagcauuaucuccacguuucaccugagcauuccgaacuucaaucaguaugaggccaugucuugcgauuuuaacggaggcaagaucuccgugcaguacaaucugagccacgcuuaugccgucgacgcugccaaccauuguggcaccauugcgaauggggugcuccaaacauucaugcggauggccuggggaggcucuuacaucgcucuggauuccgggaagggaagcugggacugcaucaugaccucuuaccaguaucuuauuauccagaacauuacaugggaagaucacugucaguuuucccgccccagcccuaucggcuaccuggggcuccugucccaaagaacccgggacauuuauaucucucgcagacggcgcggaacguucacauggacccuuagcgauuccgagggcaacgaaacacccggcggguacugccugaccagauggaugcucaucgaggccgagcugaaauguuuuggaaauaccgcuguugccaagugcaacgaaaaacaugacgaggaguucugcgauaugcugcggcucuuugacuucuguaagcaggcgauucgcagacugaaaacgccugcccagaugagcauccagcuuauuaauaaggcugugaacgcccugaucaaugaucaacucauuaugaagaaccaucugcgggacaucaugggcauccccuauugcaauuacucuaaauauugguaccuuaaccacacagucaccgggaagacaucccugccucgcuguuggcucgugagcaauggaucuuaccugaacgaaacccacuucagcgacgauauugaacagcaggcugacaauaugaucacagagcugcuccaaaaagaguauauugauagacagggcaagaccccgcuggggcuuguggaccuguuugucuucuccacgucuuuuuaccucaucagcauuuuccugcaccugguuaaaauccccacacaucggcacguggugggaaagccuugccccaaaccucaucgccuuaaccacaugggcauuuguuccugcggccucuauaagcaccccggggucccggugaaguggaaaagaugaggacuaguaauaaggaaacuguaugaaugucugugggcaggaagugaagagauccuucuguaaagguuuuuggaauuaugucugcugaauaauaaacuuuuuugaaauaauaaaucugguagaaaaaugagaucuaaaaaaaaaaaaaaaaaaaaaaaaaaaaaaaaaaaaaaaaaaaaaaaaaaaaaaaaaaaaaaaaaaaaaaaaaaaaaaaaaaaaaaaaaaaaaaaaaaaa

SEQ ID NO: 24239 - RNA, 1785 nt, Artificial Sequence
  mRNA product Design b-4 (A100) comprising derived and/or modified sequence from LASV(Lassa virus/H.sapiens-wt/NGA/2015/ISTH_0543;Clade II)__AVO03639__GPCmut2 (opt5)
aggagagucccgcagucggcguccagcggcucugcuuguucgugugugugucguugcaggccuuauucaagcuuaccaugggccagaucauuaccuucuuucaagaggugccccacgucaucgaagagguuaugaacauugugcugaucgcccucagccugcuugcuauucugaaggggaucuacaauguggccacaugcggacucuucggccuggucuccuuucuucugcucugugggagaucuugcagcacgaccuauaaaggaguguacgaacugcagacacuggagcucgacauggcgaaccugaauauguguaugccucuuuccugcaccaagaacaauucucaucacuauaucaugguuggcaacgaaacagggcuggagcucacccugacaaauaccagcauuaucaaccauaaauucuguaaucuuuccgaugcucacaagaaaaaccuguacgaccaugcccucaugucuauuaucagcacguuucaccuguccauuccgaauuucaaccaguaugaggccaugagcugcgauuuuaauggaggcaagaucucugugcaguacaaccugucccacaccuaugcugucgacgccgcuaaucauuguggcacaauugccaacggggugcuccaaaccuucaugcggauggcguggggaggcagcuacaucgcccuggauucugggaagggauccugggacugcaucaugacaagcuaccaguaucuuguuauucagaacaccacgugggaagaucacugucaguuuucucgccccuccccuaucggcuaccuggggcuccugagccaaagaacacgggacauuuauaucucccgcagacggcgcggaaccuucacauggacccuuucugauagcgagggcaaugaaacccccggcggguacugccugacaagauggaugcucauugaggcugagcugaaauguuuuggaaacacggccguggcuaagugcaaugaaaaacaugacgaggaguucugcgauaugcugcggcucuuugacuucuguaagcaggccauccgcagacugaaaaccccugcgcagauguccauccagcuuauuaacaaggccgucaaugcucugaucaacgaucaacucauuaugaagaaucaucugcgggacaucaugggcauucccuauugcaacuacagcaaauauugguaccuuaaucacacagugaccgggaagacaucucugccucgcuguuggcucguguccaacggaagcuaccugaaugaaacccacuucucugacgauaucgaacagcaggccgacaacaugaucacggagcugcuccaaaaagaguauauugauagacagggcaagacaccgcuggggcuugucgaccuguuuguuuucagcaccuccuuuuaccucaucucuauuuuccugcaccuggugaaaauccccacccaucggcacauuacaggaaagccuugccccaaaccucaucgccuuaaucacaugggcaucuguagcugcggccucuauaagcaccccggggugccggucaaguggaaaagaugaggacuaguaauaaggaaacuguaugaaugucugugggcaggaagugaagagauccuucuguaaagguuuuuggaauuaugucugcugaauaauaaacuuuuuugaaauaauaaaucugguagaaaaaugagaucuaaaaaaaaaaaaaaaaaaaaaaaaaaaaaaaaaaaaaaaaaaaaaaaaaaaaaaaaaaaaaaaaaaaaaaaaaaaaaaaaaaaaaaaaaaaaaaaaaaaa

SEQ ID NO: 24240 - RNA, 1785 nt, Artificial Sequence
  mRNA product Design b-4 (A100) comprising derived and/or modified sequence from LASV(Lassa virus/H.sapiens-wt/NGA/2016/ISTH_0009;Clade II)__AVO03571__GPCmut2 (opt5)
aggagagucccgcagucggcguccagcggcucugcuuguucgugugugugucguugcaggccuuauucaagcuuaccaugggccagaucauuaccuucuuucaagaggugccccacgucaucgaagagguuaugaacauugugcugaucgcccucagccugcuugcuauucugaaggggaucuacaauguggccacaugcggacuccugggccuugucuccuuccugcuccugugugggagaucuugcagcacgaccuauaaaggaguguacgaacugcagacacucgagcuggacauggcgucccuuaacauguguaugccucugucuugcaccaagaauaacagccaucacuauaucaugguuggcaaugaaacagggcucgagcugacccuuacaaacaccuccauuaucaaucauaaauuuuguaaccugucugaugcucacaagaaaaaucucuacgaccaugcccugaugagcauuaucuccacguuccaccugagcauuccgaacuuuaaucaguaugaggccaugucuugcgauuucaacggaggccggaucuccgugcaguacaaucucagccacucuuaugcugucgacgccgcuaaccauuguggcaccauugccaauggggugcugcaaacauuuaugcgcauggcguggggaggcuccuacaucgcccuugauagcgggaagggaucuugggacugcaucaugaccuccuaccaguaucugauuauccagaacacaaccugggaagaucacugucaguucagcagacccuccccuauuggcuaccucgggcugcuuucucaacggacgcgcgacaucuauauuagcagacggcgcagaggaacauuuaccuggacacuguccgauagcgagggcaacgaaacccccggcggguacugccucacccgguggaugcugaucgaggcugagcugaaguguuucggaaauacagccguugcuaaaugcaacgaaaagcaugacgaggaauuuugcgauaugcuccgccuguucgacuuuuguaaacaggccaucagacggcuuaagacgccugcgcagaugucuauucagcugaucaauaaagccgugaacgcucucauuaaugaucaacugaucaugaagaaccaccuucgcgacauuaugggcauccccuauugcaauuacuccaaguauugguaccugaaccacaccgucacagggaaaaccagccucccuagauguuggcuggugucuaauggaagcuaccugaacgagacacauuucuccgacgauaucgaacagcaggccgacaauaugauuaccgagcuccugcaaaaggaguauaucgaucggcagggcaaaacgccgcuugggcugguggaccucuucgucuuuucuaccagcuucuaccugauuuccaucuuucugcaccuuguuaagauucccacacaucgccacaucaccggaaaaccuugccccaagccucauagacucaaccacaugggcauuuguagcugcggccuguauaaucaccccggggugccggugaaauggaagcggugaggacuaguaauaaggaaacuguaugaaugucugugggcaggaagugaagagauccuucuguaaagguuuuuggaauuaugucugcugaauaauaaacuuuuuugaaauaauaaaucugguagaaaaaugagaucuaaaaaaaaaaaaaaaaaaaaaaaaaaaaaaaaaaaaaaaaaaaaaaaaaaaaaaaaaaaaaaaaaaaaaaaaaaaaaaaaaaaaaaaaaaaaaaaaaaaa

SEQ ID NO: 24241 - RNA, 1785 nt, Artificial Sequence
  mRNA product Design b-4 (A100) comprising derived and/or modified sequence from LASV(Lassa virus/H.sapiens-wt/NGA/2016/ISTH_0017;Clade II)__AVO03567__GPCmut2 (opt5)
aggagagucccgcagucggcguccagcggcucugcuuguucgugugugugucguugcaggccuuauucaagcuuaccaugggccagaucauuaccuucuuucaagaggugccccacgucaucgaagagguuaugaacauugugcugaucgcccucagccugcuugcuauucugaaggggaucuacaauguggccacaugcggacucuucggccuggucuccuuucuucugcucugugggagaucuugcagcacgaccuauaaaggaguguacgaacugcagacacuggagcucgacauggcgucccugaacauguguaugccucuuucuugcaccaagaauaacagccaucacuauaucaugguuggcaaugaaacagggcuggagcucacccugacaaacaccuccauuaucaaucauaaauucuguaaccuuucugaugcucacaagaaaaaucuguacgaccaugcccucaugagcauuaucuccacguuucaccugagcauuccgaacuucaaucaguaugaggccaugucuugcgauuuuaacggaggcaagaucuccgugcaguacaaucugagccacaccuaugcuauugacgccgcuaaccauuguggcacaaucgccaaugggguccuccaaaccuucaugcggauggcguggggaggcucuuacaucgcccuggauuccgggaagggaagcugggacugcauuaugacaucuuaccaguaucuuaucauucagaacaccacgugggaagaucacugucaguuuucccgccccagcccuaucggcuaccuggggcuccugucccaaagaacacgggacauuuauaucucucgcagacggcgcggaaccuucacauggacccuuagcgauuccgagggcaacgaaacccccggcggguacugccugacaagauggaugcucaucgaggcugagcugaaauguuuuggaaauacggccguggcuaagugcaacgaaaaacaugacgaggaguucugcgauaugcugcggcucuuugacuucuguaagcaggccauucgcagacugaaaaccccugcgcagaugagcauccagcuuauuaauaaggccguuaacgcucugaucaaugaucaacucauuaugaagaaccaucugcgggacaucaugggcauccccuauugcaauuacucuaaauauugguaccuuaaccacacagugaccgggaagacaucccugccucgcuguuggcucgucagcaauggaucuuaccugaacgaaacccacuucagcgacgauauugaacagcaggccgacaauaugaucacggagcugcuccaaaaagaguauauggauagacagggcaagacaccgcuggggcuuguggaccuguuuguguucuccaccucuuuuuaccucauuagcaucuuccugcaccugguccggauucccacccaucgccacguuaucggaaaaccuugccccaagccucauagacuuaaccacaugggcauuuguuccugcggccucuauaaacaccccggggugccggugaaguggaagcggugaggacuaguaauaaggaaacuguaugaaugucugugggcaggaagugaagagauccuucuguaaagguuuuuggaauuaugucugcugaauaauaaacuuuuuugaaauaauaaaucugguagaaaaaugagaucuaaaaaaaaaaaaaaaaaaaaaaaaaaaaaaaaaaaaaaaaaaaaaaaaaaaaaaaaaaaaaaaaaaaaaaaaaaaaaaaaaaaaaaaaaaaaaaaaaaaa

SEQ ID NO: 24242 - RNA, 1785 nt, Artificial Sequence
  mRNA product Design b-4 (A100) comprising derived and/or modified sequence from LASV(Lassa virus/H.sapiens-wt/NGA/2018/ISTH_0959;Clade II)__AVV65099__GPCmut2 (opt5)
aggagagucccgcagucggcguccagcggcucugcuuguucgugugugugucguugcaggccuuauucaagcuuaccaugggccagaucauuaccuucuuucaagaggugccccacgucaucgaagagguuaugaacauugugcugaucgcccucagccugcuugcuauucugaaggggaucuacaauguggucacaugcggacucuucggccugguguccuuucuucugcucugugggagaucuugcagcacgaccuauaaaggaguuuacgaacugcagacacuggagcucgacauggccucccugaacauguguaugccucuuucuugcaccaagaauaacagccaucacuauaucauggugggcaaugaaacagggcuggagcucacccugacaaacaccuccauuaucaaucauaaauucuguaaccuuucugaugcgcacaagaaaaaucuguacgaccaugcucucaugagcauuaucuccacguuucaccugagcauuccgaacuucaaucaguaugaggccaugucuugcgauuuuaacggaggcaagaucuccguccaguacaaucugagccacgccuaugcuauugacgccgcuaaccauuguggcaccaucgccaauggggugcuccaaacauucaugcggauggcguggggaggcucuuacaucgcccuggauuccgggaagggaagcugggacugcauuaugaccucuuaccaguaucuuaucauucagaacacaaccugggaagaucacugucaguuuucccgccccagcccuaucggcuaccuggggcuccugucccaaagaacgcgggacauuuauaucucucgcagacggcgcggaacauucaccuggacacuuagcgauuccgagggcaacgaaacccccggcggguacugccugaccagauggaugcucaucgaggcugagcugaaauguuuuggaaauacagccguugcuaagugcaacgaaaaacaugacgaggaguucugcgauaugcugcggcucuuugacuucuguaagcaggccauucgcagacugaaaacgccugcgcagaugagcauccagcuuauuaauaaggccgugaacgcucugaucaaugaucaacucauuaugaagaaccaucugcgggacaucaugggcauccccuauugcaauuacucuaaauauugguaccuuaaccacaccgucacagggaagaccucccugccucgcuguuggcucgugagcaauggaucuuaccugaacgaaacacacuucagcgacgauauugaacagcaggccgacaauaugaucaccgagcugcuccaaaaagaguauauugauagacagggcaagacgccgcuggggcuuguggaccuguuugucuucuccacaucuuuuuaccucaucagcauuuuccugcaccugguuaaaauccccacccaucggcacgugauuggaaagccuugccccaaaccucaucgccuuaaccacaugggcaucuguuccugcggccucuauaagcaccccggggugccggucaaguggaaaagaugaggacuaguaauaaggaaacuguaugaaugucugugggcaggaagugaagagauccuucuguaaagguuuuuggaauuaugucugcugaauaauaaacuuuuuugaaauaauaaaucugguagaaaaaugagaucuaaaaaaaaaaaaaaaaaaaaaaaaaaaaaaaaaaaaaaaaaaaaaaaaaaaaaaaaaaaaaaaaaaaaaaaaaaaaaaaaaaaaaaaaaaaaaaaaaaaa

SEQ ID NO: 24243 - RNA, 1785 nt, Artificial Sequence
  mRNA product Design b-4 (A100) comprising derived and/or modified sequence from LASV(LASV003-NIG-2008;Clade II)__AIT17580__GPCmut2 (opt5)
aggagagucccgcagucggcguccagcggcucugcuuguucgugugugugucguugcaggccuuauucaagcuuaccaugggccagaucauuaccuucuuucaagaggugccccacgucaucgaagagguuaugaacauugugcugaucgcccucagccugcuugcuauucugaaggggaucuacaauguggccacaugcggacucuucggccuggucuccuuucuucugcucugugggagaucuugcagcacgaccuauaaaggaguguacgaacugcagacacuggagcucgacauggcgucccugaacauguguaugccucuuucuugcaccaagaauaacagccaucacuauaucaugguuggcaaugaaacagggcuggagcucacccugacaaacaccuccauuaucaaucauaaauucuguaaccuuucugaugcucacaagaaaaaucuguacgaccaugcccucaugagcauuaucuccacguuucaccugagcauuccgaacuucaaucaguaugaggccaugucuugcgauuuuaacggaggcaagaucuccgugcaguacaaucugagccacaccuaugcugucgacgccgcuaaccauuguggcacaauugccaauggggugcuccaaaccuucaugcggauggcguggggaggcucuuacaucgcccuggauuccgggaagggaagcugggacugcaucaugacaucuuaccaguaucuuauuauccagaacaccacgugggaagaucacugucaguuuucccgccccagcccuauuggcuaccuggggcuccugucccaaagaacacgggacaucuauauuucucgcagacggcgcggaaccuucacauggacccuuagcgauuccgagagcaacgaaacccccggcggcuacugccugacaagauggaugcucaucgaggcugagcugaaauguuuugggaauacggccguugcuaagugcaacgaaaaacaugacgaggaguucugcgauaugcugcggcucuuugacuucuguaagcaggccauccgcagacugaaagcgccugcccagaugucuauucagcuuaucaauaaggcugugaacgcccugauuaaugaucaacucaucaugaagaaccaucugcgggacauuaugggaauccccuauugcaauuacuccaaauauugguaccuuaaccacaccgucacaggccgcaccagccugccuagauguuggcucgugucuaaugggagcuaccugaacgaaacacacuucuccgacgauaucgaacagcaggcugacaauaugauuaccgagcugcuccaaaaggaguauauggaucggcagggaaaaacgccgcugggccuuguggaccuguuugucuucucuaccagcuuuuaccucaucuccauuuuccugcaccugguuaagauccccacacaucgccacgugauugggaaaccuugccccaagccucauagacuuaaccacaugggaaucuguagcugcggccucuauaaacaccccggcgugccggucaaguggaagcggugaggacuaguaauaaggaaacuguaugaaugucugugggcaggaagugaagagauccuucuguaaagguuuuuggaauuaugucugcugaauaauaaacuuuuuugaaauaauaaaucugguagaaaaaugagaucuaaaaaaaaaaaaaaaaaaaaaaaaaaaaaaaaaaaaaaaaaaaaaaaaaaaaaaaaaaaaaaaaaaaaaaaaaaaaaaaaaaaaaaaaaaaaaaaaaaaa

SEQ ID NO: 24244 - RNA, 1785 nt, Artificial Sequence
  mRNA product Design b-4 (A100) comprising derived and/or modified sequence from LASV(LASV035-NIG-2009;Clade II)__AIT17588__GPCmut2 (opt5)
aggagagucccgcagucggcguccagcggcucugcuuguucgugugugugucguugcaggccuuauucaagcuuaccaugggccagaucauuaccuucuuucaagaggugccccacgucaucgaagagguuaugaacauugugcugaucgcccucagccugcuugcuauucugaaggggaucuacaauguggccacaugcggacucuucggccuggucuccuuucuucugcucugugggagaucuugcagcacgaccuauaaaggaguguacgaacugcagacacuggagcucgacauggcgucccugaacauguguaugccucuuucuugcaccaagaauaacagccaucacuauaucaugguuggcaaugaaacagggcuggagcucacccugacaaacaccuccauuaucaaucauaaauucuguaaccuuucugaugcucacaagaaaaaucuguacgaccaugcccucaugagcauuaucuccacguuucaccugagcauuccgaacuucaaucaguaugaggccaugucuugcgauuuuaacggaggcaagaucuccgugcaguacaaucugagccacgcuuaugccgucgacgcugccaaccauuguggcaccauugcgaauggggugcuccaaacauucaugcggauggccuggggaggcucuuacaucgcucuggauuccgggaagggaagcugggacugcaucaugaccucuuaccaguaucuuauuauccagaacacaaccugggaagaucacugucaguuuucccgccccagcccuauuggcuaccuggggcuccugucccaaagaacgcgggacaucuauauuucucgcagacggcgcggaacauucaccuggacacuuagcgauuccgagggcaacgaaacccccggcggguacugccugaccagauggaugcucaucgaggccgagcugaaauguuuuggaaauacagcuguugccaagugcaacgaaaaacaugacgaggaguucugcgauaugcugcggcucuuugacuucuguaagcaggcgauccgcagacugaaagccccugcucagaugagcauucagcuuaucaauaaggccgugaacgcucugauuaaugaucaacucaucaugaagaaccaucugcgggacauuaugggcauccccuauugcaauuacucuaaauauugguaccuuaaccacacggucaccgggaagacaucccugccucgcuguuggcucgugagcaauggaucuuaccugaacgaaacccacuucagcgacgauaucgaacagcaggccgacaauaugauuacagagcugcuccaaaaagaguauaucgauagacagggcaagaccccgcuggggcuuguggaccuguuugucuucuccacgucuuuuuaccucauuagcaucuuccugcaccugguuaaaauucccacacaucggcacgugaucggaaagccuugccccaaaccucaucgccuuaaccacaugggcauuuguuccugcggccucuauaagcaccccggggugccggucaaguggaaaagaugaggacuaguaauaaggaaacuguaugaaugucugugggcaggaagugaagagauccuucuguaaagguuuuuggaauuaugucugcugaauaauaaacuuuuuugaaauaauaaaucugguagaaaaaugagaucuaaaaaaaaaaaaaaaaaaaaaaaaaaaaaaaaaaaaaaaaaaaaaaaaaaaaaaaaaaaaaaaaaaaaaaaaaaaaaaaaaaaaaaaaaaaaaaaaaaaa

SEQ ID NO: 24245 - RNA, 1785 nt, Artificial Sequence
  mRNA product Design b-4 (A100) comprising derived and/or modified sequence from LASV(LASV1000-NIG-2009;Clade II)__AIT17782__GPCmut2 (opt5)
aggagagucccgcagucggcguccagcggcucugcuuguucgugugugugucguugcaggccuuauucaagcuuaccaugggccagaucauuaccuucuuucaagaggugccccacgucaucgaagagguuaugaacauugugcugaucgcccucagccugcuugcuauucugaaggggaucuacaauguggccacaugcggacucuucggccuggucuccuuucuucugcucugugggagaucuugcagcacgaccuauaaaggaguguacgaacugcagacacuggagcucgacauggcgucccugaacauguguaugccucuuucuugcaccaagaauaacagccaucacuauaucaugguuggcaaugaaacagggcuggagcucacccugacaaacaccuccauuaucaaucauaaauucuguaaccuuucugaugcucacaagaaaaaucuguacgaccaugcccucaugagcauuaucuccacguuucaccugagcauuccgaacuucaaucaguaugaggccaugucuugcgauuuuaacggaggcaagaucuccgugcaguacaaucugagccacaccuaugcugucgacgccgcuaaccauuguggcacaauugccaauggggugcuccaaaccuucaugcggauggcguggggaggcucuuacaucgcccuggauuccgggaagggaagcugggacugcaucaugacaucuuaccaguaucuuauuauccagaacaccacgugggaagaucacugucaguuuucccgccccagcccuauuggcuaccuggggcuccugucccaaagaacacgggacaucuauauuucucgcagacggcgcggaaccuucacauggacccuuagcgauuccgagggcaacgaaacccccggcggguacugccugacaagauggaugcucaucgaggcugagcugaaauguuuuggaaauacggccguugcuaagugcaacgaaaaacaugacgaggaguucugcgauaugcugcggcucuuugacuucuguaagcaggccaucaaacgccugaagaccccugcgcagaugagcauucagcuuaucaauaaggccgugaacgcucugauuaaugaucaacucaucaugaaaaaccaccugagagacauuaugggcauccccuauugcaauuacucuaaguauugguaccuuaaccacacagucaccgggaaaacaucccugccucgguguuggcucgugagcaauggaucuuaccugaacgaaacccauuucagcgacgauaucgaacagcaggccgacaauaugauuacggagcugcuccaaaaggaguauaucgaucgccagggcaaaacaccgcuggggcuuguggaccuguuugucuucuccaccucuuuuuaccucauuagcaucuuccugcaccugguuaagauucccacccauagacacguggugggaaaaccuugccccaagccucaucggcuuaaccacaugggcaucuguuccugcggccucuauaagcaccccggggucccggugaaauggaagcgcugaggacuaguaauaaggaaacuguaugaaugucugugggcaggaagugaagagauccuucuguaaagguuuuuggaauuaugucugcugaauaauaaacuuuuuugaaauaauaaaucugguagaaaaaugagaucuaaaaaaaaaaaaaaaaaaaaaaaaaaaaaaaaaaaaaaaaaaaaaaaaaaaaaaaaaaaaaaaaaaaaaaaaaaaaaaaaaaaaaaaaaaaaaaaaaaaa

SEQ ID NO: 24246 - RNA, 1785 nt, Artificial Sequence
  mRNA product Design b-4 (A100) comprising derived and/or modified sequence from LASV(LASV221-NIG-2010;Clade II)__AIT17624__GPCmut2 (opt5)
aggagagucccgcagucggcguccagcggcucugcuuguucgugugugugucguugcaggccuuauucaagcuuaccaugggccagaucauuaccuucuuucaagaggugccccacgucaucgaagagguuaugaacauugugcugaucgcccucagccugcuugcuauucugaaggggaucuacaauguggccacaugcggacucuucggccuggucuccuuucuucugcucugugggagaucuugcagcacgaccuauaaaggaguguacgaacugcagacacuggagcucgacauggcgucccugaacauguguaugccucuuucuugcaccaagaauaacagccaucacuauaucaugguuggcaaugaaacagggcuggagcucacccugacaaacaccuccauuaucaaucauaaauucuguaaccuuucugaugcucacaagaaaaaucuguacgaccaugcccucaugagcauuaucuccacguuucaccugagcauuccgaacuucaaucaguaugaggccaugucuugcgauuuuaacggaggcaagaucuccgugcaguacaaucugagccacaccuaugcuauugacgccgcuaaccauuguggcacaaucgccaaugggguccuccaaaccuucaugcggauggcguggggaggcucuuacaucgcccuggauuccgggaagggaagcugggacugcauuaugacaucuuaccaguaucuuaucauucagaacaccacgugggaagaucacugucaguuuucccgccccagcccuaucggcuaccuggggcuccugucccaaagaacacgggacauuuauaucucucgcagacggcgcggaaccuucacauggacccuuagcgauuccgagggcaacgaaacccccggcggguacugccugacaagauggaugcucaucgaggcugagcugaaauguuuuggaaauacggccguggcuaagugcaacgaaaaacaugacgaggaguucugcgauaugcugcggcucuuugacuucuguaagcaggccauucgcagacugaaaaccccugcgcagaugagcauccagcuuauuaauaaggccguuaacgcucugaucaaugaucaacucauuaugaagaaccaucugcgggacaucaugggcauccccuauugcaauuacucuaaauauugguaccuuaaccacacagugaccgggaagacaucccugccucgcuguuggcucgucagcaauggaucuuaccugaacgaaacccacuucagcgacgauauugaacagcaggccgacaauaugaucacggagaugcugcaaaaagaguauauggauagacagggcaagacaccgcucgggcugguggaccuuuuuguguucuccaccucuuuuuaccugauuagcaucuuccuccaccuggucaaaauucccacccaucggcacguuaucggaaagccuugccccaaaccucaucgccugaaccacaugggcauuuguuccugcggccuuuauaagcaccccggggugccggugaaguggaaaagaugaggacuaguaauaaggaaacuguaugaaugucugugggcaggaagugaagagauccuucuguaaagguuuuuggaauuaugucugcugaauaauaaacuuuuuugaaauaauaaaucugguagaaaaaugagaucuaaaaaaaaaaaaaaaaaaaaaaaaaaaaaaaaaaaaaaaaaaaaaaaaaaaaaaaaaaaaaaaaaaaaaaaaaaaaaaaaaaaaaaaaaaaaaaaaaaaa

SEQ ID NO: 24247 - RNA, 1785 nt, Artificial Sequence
  mRNA product Design b-4 (A100) comprising derived and/or modified sequence from LASV(LASV237-NIG-2010;Clade II)__AIT17638__GPCmut2 (opt5)
aggagagucccgcagucggcguccagcggcucugcuuguucgugugugugucguugcaggccuuauucaagcuuaccaugggccagaucauuaccuucuuucaagaggugccccacgucaucgaagagguuaugaacauugugcugaucgcccucagccugcuugcuauucugaaggggaucuacaauguggccacaugcggacucuucggccuggucuccuuucuucugcucugugggagaucuugcagcacgaccuauaaaggaguguacgaacugcagacacuggagcucgacauggcgucccugaacauguguaugccucuuucuugcaccaagaauaacagccaucacuauaucaugguuggcaaugaaacagggcuggagcucacccugacaaacaccuccauuaucaaucauaaauucuguaaccuuucugaugcucacaagaaagaccuguacgaucaugcccucaugagcauuaucuccacguuucaccugagcauuccgaauuucaaccaguaugaggccaugucuugcgacuuuaauggaggcaagaucuccgugcaguacaaccugagccacaccuaugcugucgaugccgcuaaucauuguggcacaauugccaacggggugcuccaaaccuucaugcggauggcguggggaggcucuuacaucgcccuggacuccgggaagggaagcugggauugcaucaugacaucuuaccaguaucuuauuauccagaauaccacgugggaagaccacugucaguuuucccgccccagcccuauuggcuaccuggggcuccugucccaaagaacacgggauaucuauauuucucgcagacggcgcggaaccuucacauggacccuuagcgacuccgagggcaacgaaacccccggcggguacugccugacaagauggaugcucaucgaggcugagcugaaauguuuuggaaacacggccguugcuaagugcaaugaaaaacaugaugaggaguucugcgacaugcugcggcucuuugauuucuguaagcaggccauccgcagacugaaaaccccugcgcagaugagcauucagcuuaucaacaaggccgugaaugcucugauuaacgaccaacucaucaugaagaaucaucugcgggacauuaugggcauccccuauugcaacuacucuaaauauugguaccuuaaucacacagucaccgggaagacaucccugccucgcuguuggcucgugagcaacggaucuuaccugaaugaaacccacuucagcgaugacaucgaacagcaggccgauaacaugauuacggagcugcuccaaaaagaguauauggacagacagggcaagacaccgcuggggcuuguggaucuguuugucuucuccaccucuuuuuaccucaucagcauuuuccugcaccugaucaaaauucccacccaucggcacaucacaggaaagccuugccccaaaccucaucgccuuaaucacaugggcauuuguuccugcggccucuauaagcaccccgggguuccggugaaguggaaaagaugaggacuaguaauaaggaaacuguaugaaugucugugggcaggaagugaagagauccuucuguaaagguuuuuggaauuaugucugcugaauaauaaacuuuuuugaaauaauaaaucugguagaaaaaugagaucuaaaaaaaaaaaaaaaaaaaaaaaaaaaaaaaaaaaaaaaaaaaaaaaaaaaaaaaaaaaaaaaaaaaaaaaaaaaaaaaaaaaaaaaaaaaaaaaaaaaa

SEQ ID NO: 24248 - RNA, 1785 nt, Artificial Sequence
  mRNA product Design b-4 (A100) comprising derived and/or modified sequence from LASV(LASV253-NIG-2011;Clade II)__AIT17670__GPCmut2 (opt5)
aggagagucccgcagucggcguccagcggcucugcuuguucgugugugugucguugcaggccuuauucaagcuuaccaugggccagaucauuaccuucuuucaagaggugccccacgucaucgaagagguuaugaacauugugcugaucgcccucagccugcuugcuauucugaaggggaucuacaauguggccacaugcggacucuucggccuggucuccuuucuucugcucugugggagaucuugcagcacgaccuauaaaggaguguacgaacugcagacacuggagcucgacauggcgucccugaacauguguaugccucuuucuugcaccaagaauaacagccaucacuauaucaugguuggcaaugaaacagggcuggagcucacccugacaaacaccuccauuaucaaucauaaauucuguaaccuuucugaugcucacaagaaaaaucuguacgaccaugcccucaugagcauuaucuccacguuucaccugagcauuccgaacuucaaucaguaugaggccaugucuugcgauuuuaacggaggcaagaucuccgugcaguacaaucugagccacaccuaugcugucgacgccgcuaaccauuguggcacaauugccaauggggugcuccaaaccuucaugcggauggcguggggaggcucuuacaucgcccuggauuccgggaagggaagcugggacugcaucaugacaucuuaccaguaucuuauuauccagaacaccacgugggaagaucacugucaguuuucccgccccagcccuauuggcuaccuggggcuccugucccaaagaacacgggacaucuauauuucucgcagacggcgcggaaccuucacauggacccuuagcgauuccgagggcaacgaaacccccggcggguacugccugacaagauggaugcucaucgaggcugagcugaaauguuuuggaaauacggccguugcuaagugcaacgaaaaacaugacgaggaguucugcgauaugcugcggcucuuugacuucuguaagcaggccauccgcagacugaaagcgccugcccagaugagcauucagcuuaucaauaaggcugugaacgcccugauuaaugaucaacucaucaugaagaaccaucugcgggacauuaugggcauccccuauugcaauuacucuaaauauugguaccuuaaccacaccgucacagggcgcaccucccugccuagauguuggcucgugagcaauggaucuuaccugaacgaaacacacuucagcgacgauaucgaacagcaggcugacaauaugauuaccgagcugcuccaaaaggaguauaucgaucggcagggcaaaacgccgcuggggcuuguggaccuguuugucuucuccacaucuuuuuaccucauuagcaucuuccugcaccugguuaagauucccacccaucgccacaucauuggaaaaccuugccccaagccucauagacuuaaccacaugggcaucuguuccugcggccucuauaaacaccccggggugccggugaaguggaagcggugaggacuaguaauaaggaaacuguaugaaugucugugggcaggaagugaagagauccuucuguaaagguuuuuggaauuaugucugcugaauaauaaacuuuuuugaaauaauaaaucugguagaaaaaugagaucuaaaaaaaaaaaaaaaaaaaaaaaaaaaaaaaaaaaaaaaaaaaaaaaaaaaaaaaaaaaaaaaaaaaaaaaaaaaaaaaaaaaaaaaaaaaaaaaaaaaa

SEQ ID NO: 24249 - RNA, 1785 nt, Artificial Sequence
  mRNA product Design b-4 (A100) comprising derived and/or modified sequence from LASV(LASV254-NIG-2011;Clade II)__AIT17674__GPCmut2 (opt5)
aggagagucccgcagucggcguccagcggcucugcuuguucgugugugugucguugcaggccuuauucaagcuuaccaugggccagaucauuaccuucuuucaagaggugccccacgucaucgaagagguuaugaacauugugcugaucgcccucagccugcuugcuauucugaaggggaucuacaauguggccacaugcggacucuucggccuggucuccuuucuucugcucugugggagaucuugcagcacgaccuauaaaggaguguacgaacugcagacacuggagcucgacaugaccaaccugaauauguguaugccucuuuccugcacaaagaacaauucucaucacuauaucaugguuggcaacgaaaccgggcuggagcucacacugaccaauacgagcauuaucaaccauaaauucuguaaucuuuccgaugcgcacaagaaaaaccuguacaaucaugcucucaugucuauuaucagcaccuuucaccuguccauuccgaacuucaaucaguaugaggccaugagcugcgacuuuaacggaggcaagaucucugugcaguacaaucugucccacagcuaugccgucgaugcugccaaccauuguggcacaauugcuaacggggugcuccaaaccuucaugcggauggccuggggaggcucuuacaucgcgcuggacuccgggaagggaaauugggauugcaucaugacaagcuaccaguaucuuauuauccagaacaccacgugggaagaccacugucaguuuucucgccccuccccuauuggcuaccuggggcuccugagccaaagaacacgggauaucuauauuucccgcagacggcgcggaaccuucacauggacccuuucugacagcgagggcaaugaaacccccggcggguacugccugacaagauggaugcucaucgaggccgagcugaaauguuuuggaaacacggcuguugccaagugcaaugaaaaacaugaugaggaguucugcgacaugcugcggcucuuugauuucuguaagcaggcuauccgcagacugaaaaccccugcccaggcgaacauucagcuuaucaauaaggccgugaacgcucugauuaaugaccaacucaucaugaagaaccaucugcgggauauuaugggcauccccuauugcaauuacuccaaauauugguaccuuaaccacacagucaccgggaagacaagccugccucgcuguuggcucgugucuaauggauccuaccugaacgaaacccacuucagcgacgacaucgaacagcaggccgauaauaugauuacggagcugcuccaaaaagaguauauggacagacagggcaagacaccgcuggggcuuguggaucuguuugucuucucuaccagcuuuuaccucaucuccauuuuccugcaccugguuaaaauccccacccaucggcacgugauuggaaagccuugccccaaaccucaucgccuuaaccacaugggcaucuguucuugcggccucuauaagcaccccggggugccggucaaguggaaaagaugaggacuaguaauaaggaaacuguaugaaugucugugggcaggaagugaagagauccuucuguaaagguuuuuggaauuaugucugcugaauaauaaacuuuuuugaaauaauaaaucugguagaaaaaugagaucuaaaaaaaaaaaaaaaaaaaaaaaaaaaaaaaaaaaaaaaaaaaaaaaaaaaaaaaaaaaaaaaaaaaaaaaaaaaaaaaaaaaaaaaaaaaaaaaaaaaa

SEQ ID NO: 24250 - RNA, 1785 nt, Artificial Sequence
  mRNA product Design b-4 (A100) comprising derived and/or modified sequence from LASV(Nig08-A19;Clade III)__ADU56618__GPCmut2 (opt5)
aggagagucccgcagucggcguccagcggcucugcuuguucgugugugugucguugcaggccuuauucaagcuuaccaugggccagaucgugaccuucuuucaagaggucccccacguuauugaagaggugaugaacaucgugcugauugcccucagcauccuggcuauucuuaaggggcuguacaauaucgccacaugcggacucaucggccuggucacguuccuucugcucuccgggagaucuuguagcaugaccuauaaaggaguguacgaacugcagacacuggagcucaacaugaauacccugaacaugugcaugccucuuuccuguacaaagaauaacucucaucacuauauuaugguuggcaaugaaaccgggcuggagcucacacugaccaacacgagccuucugcaucacaaauuuugcaaucucuccgacgcgcauaagaaaaaccuguacgaucacacccugaugucuaucauuagcacauuccaccucuccaucccgaauuuuaaccaguaugaggcuaugagcugugacuucaauggaggcaagauuaccgugcaguacaaccugucucauuccuaugccaucgaugccgcuaaucacugcggcacagucgccaacggggugcuucaaaccuuuaugcggauggcuuggggaggcagcuacauugcccuggacucugggcgcggaaagugggauuguaucaugacguccuaccaguaucucaucauucagaacacaaccugggaagaccauugccaguucagcagacccucuccuaucggcuaccuggggcuucugucccaacggacacgcgauauuuauaucagcagacggcgcagaggaaccuuuaccuggacacucuccgacucugagggcaaugaaacgcccggcggguacugucugacccgguggaugcugauugaggcggagcucaaaugcuucggaaacacagccguugcuaaguguaaugaaaaacacgaugaggaauuuugcgacaugcugcgccuuuucgauuuuugcaagcaggccaucagacggcugaaagcuccugcccagaugagcauccagcucauuaacaaggcggugaaugcccugaucaacgaccaacuuauuaugaagaaucaucugcgcgauaucaugggcauucccuauuguaacuacuccaaauauugguaccucaaucacaccagcacagggagaaccucucugccucggugcuggcuggucuccaacggaagcuaccucaaugagacgcacuucucugacgacaucgaacagcaggcugauaacaugaucacagagaugcugcaaaaggaguaucuugaccgccagggcaaaaccccgcuggggcucguggaucuguucguguuuagcaccuccuucuaccugauuucuaucuuucuucaucucgucaagauucccacacacagacauaucguuggaaaaccuugucccaagccucaccggcugaaucacaugggcauuugcagcuguggccuguauaaacagcccggggugccggugagauggaagcgcugaggacuaguaauaaggaaacuguaugaaugucugugggcaggaagugaagagauccuucuguaaagguuuuuggaauuaugucugcugaauaauaaacuuuuuugaaauaauaaaucugguagaaaaaugagaucuaaaaaaaaaaaaaaaaaaaaaaaaaaaaaaaaaaaaaaaaaaaaaaaaaaaaaaaaaaaaaaaaaaaaaaaaaaaaaaaaaaaaaaaaaaaaaaaaaaaa

SEQ ID NO: 24251 - RNA, 1788 nt, Artificial Sequence
  mRNA product Design b-4 (A100) comprising derived and/or modified sequence from LASV(G1180-SLE-2010;Clade IV)__AIT17168__GPCmut2 (opt5)
aggagagucccgcagucggcguccagcggcucugcuuguucgugugugugucguugcaggccuuauucaagcuuaccaugggccagaucgugaccuucuuucaagaggucccccacguuauugaagaggugaugaacaucgugcugauugcccucagcauccuggcuguccuuaaggggcuguacaauuucgccacaugcggacucgugggccugcuuacguuucugcuccugugugggagauccugcaccgcgucucgguauaaaggaguuuacgaacugcagacacucgagcugaacauggaaacccuuaauauguguaugccucugagcugcacaaagaacaauucccaucacuauauuauggugggcaacgagaccgggcucgagcugacacuuaccaauacgucuaucaucaaccauaaauucuguaaucugagcgacgcucacaagaaaaaccucuacgaucaugcccugauguccauuaucucuaccuuucaccugagcauuccgaauuucaaccaguaugaagccauguccugcgacuuuaauggaggcaagaucagcguccaguacaaccucucucacuccuaugcuggcgaugccgcuaaucauugugggacaguggccaacggaguucugcaaaccuucaugcgcauggcguggggcgggagcuacauugcccuugacucuggacacggcuccugggauugcaucaugacaagcuaccaguaucugauuauccagaacaccacgugggaggaccauugucaguuuucuagacccuccccuaucggguaccucggacugcuuagccaacggacacgcgauauuuauaucuccagacggcgcagaggcaccuucacauggacccugucugacagcgaaggcaaggauacccccgggggauacugccucacacgguggaugcugauugaggcugagcugaaauguuuuggcaauacggccguggcuaagugcaacgaaaaacacgacgaggaguucugcgauaugcuccgccuguuugacuucuguaagcaggccauccagagacuuaaagcgccugcccagauguccauucaacugaucaauaaggcugucaacgcccucaucaaugaucagcugauuaugaagaaccaccuucgggacaucauggggauucccuauugcaauuacagcaaauauugguaccugaaccauaccacaaccggaaagacaucucucccuaaauguuggcugguguccaauggcagcuaccugaacgaaacccacuucucugacgauaucgaacagcaagcugacaauaugauuacggagaugcuccagaaggaguauauggaacgccaggggaaaacaccgcugggacuuguggaucuguuugucuucagcaccuccuuuuaccucaucucuaucuuccugcaucugguuaagauucccacccacagacauaucgugggcaaaagcugcccuaagccccaccggcuuaaccacaugggcauuuguuccugcgggcucuauaagcagccuggagugcccgucaaauggaagcgcugaggacuaguaauaaggaaacuguaugaaugucugugggcaggaagugaagagauccuucuguaaagguuuuuggaauuaugucugcugaauaauaaacuuuuuugaaauaauaaaucugguagaaaaaugagaucuaaaaaaaaaaaaaaaaaaaaaaaaaaaaaaaaaaaaaaaaaaaaaaaaaaaaaaaaaaaaaaaaaaaaaaaaaaaaaaaaaaaaaaaaaaaaaaaaaaaa

SEQ ID NO: 24252 - RNA, 1788 nt, Artificial Sequence
  mRNA product Design b-4 (A100) comprising derived and/or modified sequence from LASV(G1442-SLE-2011;Clade IV)__AIT17180__GPCmut2 (opt5)
aggagagucccgcagucggcguccagcggcucugcuuguucgugugugugucguugcaggccuuauucaagcuuaccaugggccagaucgugaccuucuuucaagaggucccccacguuauugaagaggugaugaacaucgugcugauugcccucagcauccuggcuguccuuaaggggcuguacaauguggccacaugcggacucauuggccugguuacguuccuucugcucugugggagauccugcaccacaacccuguauaaaggaguguacgaacugcagacacucgagcugaacauggaaacccuuaauauguguaugccucugucuugcacaaagaacaauagccaucacuauauccgggucggcaacgagaccgggcucgagcugacgcuuaccaauacauccaucauuaaccauaaauuuuguaaucugucugacgcgcacaagaaaaaccucuacgaucaugcucugaugagcaucauuuccaccuuccaccugucuaucccgaauuuuaaccaguaugaagccaugagcugcgacuucaauggaggcaagauuuccgugcaguacaaccucagccacucuuaugccggcgaugcugccaaucauugugggacaguugcuaacggagugcugcaaaccuuuaugcgcauggccuggggcggguccuacaucgcgcuugacagcggaagaggcaacugggauugcauuaugacgucuuaccaguaucugaucauccagaauacaaccugggacgaucacugucaguucucccggcccagcccuauuggguaccucggacugcuuucucaacgcacaagagacgucuauaucucccggcgcagacggggcaccuuuaccuggacacugagcgauuccgagggcaaggacacgcccgggggauacugccucacccgcuggaugcugauugaagccgagcugaaauguuucggcaacacagcuguggccaagugcaaugagaaacaugaugaagaguuuugcgacaugcucagacuguucgauuuuuguaagcaggcuauccagcggcuuaaagccccugcgcagaugucuauucaacugaucaacaaggccgugaaugcucucaucaacgaccagcugauuaugaagaaucaccuucgcgacaucauggggauucccuauugcaacuacagcaaauauugguaccugaauaacaccgccacaggaaagaccucccucccuaaauguuggcugaucagcaauggcucuuaccugaacgaaacgcacuucuccgaugacauugagcaggaagcugauaauaugaucacagagaugcuccaaaaggaguauauggaaagacaggggaaaaccccgcugggacuugucgaccuguucguuuuuagcaccucuuucuaccucaucagcauuuuucugcaucuggugaagauccccacacaccggcauauugugggcaaauccugcccuaagccccaccgccuuaaccauaugggcaucuguucuugcgggcucuauaagcagccuggaguccccgugagauggaaacggugaggacuaguaauaaggaaacuguaugaaugucugugggcaggaagugaagagauccuucuguaaagguuuuuggaauuaugucugcugaauaauaaacuuuuuugaaauaauaaaucugguagaaaaaugagaucuaaaaaaaaaaaaaaaaaaaaaaaaaaaaaaaaaaaaaaaaaaaaaaaaaaaaaaaaaaaaaaaaaaaaaaaaaaaaaaaaaaaaaaaaaaaaaaaaaaaa

SEQ ID NO: 24253 - RNA, 1788 nt, Artificial Sequence
  mRNA product Design b-4 (A100) comprising derived and/or modified sequence from LASV(G3010-SLE-2013;Clade IV)__AIT17344__GPCmut2 (opt5)
aggagagucccgcagucggcguccagcggcucugcuuguucgugugugugucguugcaggccuuauucaagcuuaccaugggccagaucgugaccuucuuucaagaggucccccacguuauugaagaggugaugaacaucgugcugauugcccucagcauccuggcuguccuuaaggggcuguacaauuucgccacaugcggacucgugggccugguuacguuucuucugcucugugggagauccugcaccacaucucuguauaaaggaguguacgaacugcagacccucgagcugaacauggaaacacuuaauauguguaugccucugagcugcaccaagaacaauucccaucacuauauuauggucggcaacgagacagggcucgagcugacccuuacgaauaccucuaucaucaaccauaaauucuguaaucugagcgacgcgcacaagaaaaaccucuacaaucaugcucugauguccauuaucucuacauuucaccugagcauuccgaacuucaaucaguaugaagccauguccugcgauuuuaacggaggcaagaucagcgugcaguacaaucucucucacuccuaugccggcgacgcugccagccauugugggaccguugcuaacggagugcugcaaacauucaugcggauggccuggggcgggucuuacauugcgcuugauuccggauacggcaagugggacugcaucaugaccagcuaucaguaccugauuauccagaacacgacaugggaggaucacugucaguuuucucgccccuccccuaucggguaucucggacugcuuagccaaagaacccgggacauuuacaucucccgcagacggcgcggcacauucaccuggacccugucugauagcgaaggcaaagacacacccgggggauauugccucacgagauggaugcugauugaggccgagcugaaguguuuuggcaauaccgcugucgccaaaugcaacgaaaagcaugaugaggaguucugcgacaugcuccggcuguuugauuucuguaaacaggcuauccagcgccuuaagaccccugcccagauguccauucaacugaucaauaaggcggugaacgcccucaucaaugaccagcugauuaugaaaaaccaccuuagagauaucauggggauucccuacugcaauuauagcaaguacugguaccugaaccacacaacaaccggaaaaacgucucucccuaaguguuggcugguguccaauggcagcuaucugaacgaaacacauuucucugacgacaucgaacagcaagcugauaauaugauuaccgagaugcuccagaaagaguacauggaacggcaggggaagaccccgcugggacuugucgaccuguuuguuuucagcacauccuuuuaucucaucucuaucuuccugcaccuggugaaaauucccacccaucgccacaucgugggcaagagcugcccuaagccccauagacuuaaccacaugggcauuuguuccugcgggcucuacaaacagccuggaguccccgugcgguggaagcgcugaggacuaguaauaaggaaacuguaugaaugucugugggcaggaagugaagagauccuucuguaaagguuuuuggaauuaugucugcugaauaauaaacuuuuuugaaauaauaaaucugguagaaaaaugagaucuaaaaaaaaaaaaaaaaaaaaaaaaaaaaaaaaaaaaaaaaaaaaaaaaaaaaaaaaaaaaaaaaaaaaaaaaaaaaaaaaaaaaaaaaaaaaaaaaaaaa

SEQ ID NO: 24254 - RNA, 1788 nt, Artificial Sequence
  mRNA product Design b-4 (A100) comprising derived and/or modified sequence from LASV(G502-SLE-2009;Clade IV)__AIT17126__GPCmut2 (opt5)
aggagagucccgcagucggcguccagcggcucugcuuguucgugugugugucguugcaggccuuauucaagcuuaccaugggccagaucgugaccuucuuucaagaggucccccacguuauugaagaggugaugaacaucgugcugauugcccucagcauccuggcuguccuuaaggggcuguacaauuucgccacaugcggacucgugggccugcuuacguuucugcuccugugugggagauccugcaccacaggacuguauaaaggcguuuacgaacuccagacccuggagcuuaacauggaaacacugaauauguguaugccucucucuugcaccaagaacaauagccaucacuauauuaugguggggaacgagacaggacuggagcuuacccugacgaauaccuccaucaucaaccauaaauucuguaaucucucugacgcgcacaagaaaaaccuguacgaucaugcucugaugagcauuaucuccacauuucaccucucuauuccgaauuucaaccaguaugaagccaugagcugcgacuuuaauggcggcaagaucuccguccaguacaaccugagccacucuuaugccggggaugcugccgaccauuguggaaccguggcuaauggcguucuucaaacauucaugcggauggccuggggaggguccuacauugcgcuggauagcggccgcgggagaugggacugcaucaugaccucuuaccaguaucucauuauccagaacacgacaugggaggaucacugucaguuuucccggcccagcccuaucggauaccugggccuucugucucaacgcaccagagacauuuauaucucccggcgcagacggggcacauucaccuggacccucagcgauuccgaagggaaggacacacccggaggcuacugccugacgcgcuggaugcugauugaggccgagcucaaauguuuugggaacaccgcuguggccaagugcaaugaaaaacaugaugaggaguucugcgacaugcugagacuuuuugauuucuguaagcaggcuauccagcggcugaaagccccugcgcagaugucuauucaacucaucaacaaggccgucaaugcucugaucaacgaccagcuugugaugaagaaucaucugcgcgacauuaugggaauccccuauugcaacuacagcagauauugguaccucaaucacacaaccacaggccggaccucccugccuaaauguuggcuggugagcaacgggucuuaccucaaugaaacgcacuucuccgaugacauugaacagcaagccgauaacaugaucacagagaugcugcagaaggaguauauggaacgccagggaaaaaccccgcuuggccuggucgaccucuuuguuuucagcaccucuuuuuaccugauuagcaucuuccugcaccuugugaagauccccacacauagacacauugugggcaaauccugcccuaagccccaucggcucaaucacauggggaucuguucuugcggacuguauaaacagccuggcguccccgugaaguggaagagaugaggacuaguaauaaggaaacuguaugaaugucugugggcaggaagugaagagauccuucuguaaagguuuuuggaauuaugucugcugaauaauaaacuuuuuugaaauaauaaaucugguagaaaaaugagaucuaaaaaaaaaaaaaaaaaaaaaaaaaaaaaaaaaaaaaaaaaaaaaaaaaaaaaaaaaaaaaaaaaaaaaaaaaaaaaaaaaaaaaaaaaaaaaaaaaaaa

SEQ ID NO: 24255 - RNA, 1788 nt, Artificial Sequence
  mRNA product Design b-4 (A100) comprising derived and/or modified sequence from LASV(G733-SLE-2010;Clade IV)__AIT17154__GPCmut2 (opt5)
aggagagucccgcagucggcguccagcggcucugcuuguucgugugugugucguugcaggccuuauucaagcuuaccaugggccagaucgugaccuucuuucaagaggucccccacguuauugaagaggugaugaacaucgugcugauugcccucagcauccuggcuguccuuaaggggcuguacaauuucgccacaugcggaauugugggccucguuuccuuucugcuucugugugggagaucuugcacgaccagccucuauaaaggaguguacgaacugcagacacuggagcucaacauggaaacccugaauauguguaugccucuuuccugcacaaagaacaauucucaucacuauaucauggucggcaacgagaccgggcuggagcucacacugaccaauacgagcaucauuaaccauaaauucuguaaucuuuccgacgcgcacaagaaaaaccuguacgaucaugcucucaugucuaucauuagcaccuuucaccuguccaucccgaauuucaaccaguaugaagccaugagcugcgacuuuaauggaggcaagauuucugugcaguacaaccugucccacagcuaugccggcgaugcugccaaucauugugggacaaucgcuaacggaguucuccaaaccuucaugcggauggccuggggcgggucuuacauugcgcuggacuccggacgcgauagaugggacugcaucaugacaagcuaccaguaucuuaucauucagaacaccacgugggaggaucacugucaguuuucucggcccuccccuaucggcuaccuggggcuccugagccaacgcacaagagacauuuauaucucccggcgcagacggggaaccuucacauggacccuuucugauagcgaaggcaaggacacccccggcggguacugccugacacgcuggaugcucauugaggccgagcugaaauguuuuggaaauacggcuguggccaagugcaacgaaaaacaugaugaggaguucugcgacaugcugagacucuuugauuucuguaagcaggcuauccagcggcugaaagccccugcgcagauguccauccaacuuauuaauaaggccgucaacgcucugaucaaugaccagcucauuaugaagaaccaucugcgcgacaucaugggcauucccuauugcaauuacagcaaauauugguaccuuaaccacaccacaaccgggaagacaucucugccuaaauguuggcucguguccaauggaagcuaccugaacgaaacccacuucucugaugacaucgaacagcaagccgauaauaugaucacggagaugcugcagaaggaguauauggaaagacagggcaaaacaccgcucgggcugguggaccuuuuugucuucagcaccuccuuuuaccugauuucuaucuuccuccaccugguuaagauucccacccaucggcacguggugggaaaaagcugcccuaagccccaucgccugaaccacaugggcaucuguuccugcggccuuuaugggcagccuggaguccccgugaaguggaaaagaugaggacuaguaauaaggaaacuguaugaaugucugugggcaggaagugaagagauccuucuguaaagguuuuuggaauuaugucugcugaauaauaaacuuuuuugaaauaauaaaucugguagaaaaaugagaucuaaaaaaaaaaaaaaaaaaaaaaaaaaaaaaaaaaaaaaaaaaaaaaaaaaaaaaaaaaaaaaaaaaaaaaaaaaaaaaaaaaaaaaaaaaaaaaaaaaaa

SEQ ID NO: 24256 - RNA, 1788 nt, Artificial Sequence
  mRNA product Design b-4 (A100) comprising derived and/or modified sequence from MOPV/LASV reassortant(IGS-1;Clade IV)__AFY05576__GPCmut2 (opt5)
aggagagucccgcagucggcguccagcggcucugcuuguucgugugugugucguugcaggccuuauucaagcuuaccaugggccagaucgugaccuucuuucaagaggucccccacguuauugaagaggugaugaacaucgugcugauugcccucagcguccuggcugugcuuaaggggcuguacaauuucgccacaugcggacucguuggccuggugacguuucuucugcucugugggagauccugcaccacaucucuguauaaaggagucuacgaacugcagacccucgagcugaacauggaaacacuuaauauguguaugccucugagcugcaccaagaacaauucccaucacuauaucauggugggcaacgagacagggcucgagcugacccuuacgaauaccucuauuaucaaccauaaauucuguaaucugagcgacgcgcacaagaaaaaccucuacgaucaugcucugauguccaucauuucuacauuucaccugagcaucccgaauuucaaccaguaugaagccauguccugcgacuuuaauggaggcaagauuagcguucaguacaaccucucucacuccuaugccggcgaugcugccaaucauugugggaccguggcuaacggaguccugcaaacauucaugcggauggccuggggcgggagcuacaucgcgcuugacucuggacgcggcaacugggauugcauuaugaccuccuaccaguaucugaucauucagaauacgacaugggaggaccacugucaguuuagcagacccucuccuaucggguaccucggacugcuuucccaacggacccgcgauaucuauauuagcagacggcgcagaggcacauucaccuggacccuguccgacucugaaggcgaggauacacccgggggauacugccucacgcgguggaugcugaucgaggccgaacugaaguguuuuggcaacaccgcuguggccaaaugcaaugagaagcaugacgaagaguucugcgauaugcuccgccuguuugacuucuguaaacaggcuauucagagacuuaaggccccugcgcagaugagcauccaacugauuaacaaagccgugaaugcucucaucaacgaucagcugaucaugaagaaucaccuucgggacauuauggggauccccuauugcaacuacuccaaguauugguaccugaaucacacaaccacaggacgcaccagccucccuaaauguuggcuggucucuaacggcuccuaccugaaugaaacgcauuucagcgacgauauugagcagcaagccgacaacaugaucacagagaugcuccagaaggaauauauggagagacaggggaaaaccccgcugggacuuguugaucuguuuguguucucuaccagcuuuuaccucauuuccaucuuccugcaccuggugaagauccccacacaucggcacauugucggcaaaucuugcccuaagccccaucgccuuaaucacaugggcaucuguagcugcgggcucuauaaacagccuggagugcccguuaaguggaagagaugaggacuaguaauaaggaaacuguaugaaugucugugggcaggaagugaagagauccuucuguaaagguuuuuggaauuaugucugcugaauaauaaacuuuuuugaaauaauaaaucugguagaaaaaugagaucuaaaaaaaaaaaaaaaaaaaaaaaaaaaaaaaaaaaaaaaaaaaaaaaaaaaaaaaaaaaaaaaaaaaaaaaaaaaaaaaaaaaaaaaaaaaaaaaaaaaa

SEQ ID NO: 24257 - RNA, 1788 nt, Artificial Sequence
  mRNA product Design b-4 (A100) comprising derived and/or modified sequence from LASV(LM765-SLE-2012;Clade IV)__AIT17814__GPCmut2 (opt5)
aggagagucccgcagucggcguccagcggcucugcuuguucgugugugugucguugcaggccuuauucaagcuuaccaugggccagaucgugaccuucuuucaagaggucccccacguuauugaagaggugaugaacaucgugcugauugcccucagcauccuggcuguccuuaaggggcuguacaauuucgccacaugcggacucgugggccugguuacguuucuucugcucugugggagauccugcaccacaucucuguauaaaggaguguacgaacugcagacccucgagcugaacauggaaacacuuaauauguguaugccucugagcugcaccaagaacaauucccaucacuauauuauggucggcaacgagacagggcucgagcugacccuuacgaauaccucuaucaucgaccauaaauucuguaaccugagcgaugcgcaccggaagaaucucuacgaccaugcucugauguccauuaucucuacauuucaccugagcauuccgaacuucaaucaguaugaagccauguccugcgauuuuaacggaggcaaaaucagcgugcaguacaaucucucucacuccuaugccaaggacgcugccgaucauuguggcaccguugcuaacggggugcugcaaacauucaugcgcauggccuggggaggcagcuacauugcgcuugacucugggagaggacggugggauugcaucaugaccuccuaccaguaucugauuauccagaauacgacaugggaggaccacugucaguuuagccgccccucuccuaucggcuaccucgggcugcuuucccaaagaacccgggauauuuauaucagccgcagacggcgcggaacauucaccuggacccuguccgacucugaaggcaaggauacacccggcggguacugccucacgagauggaugcugauugaggccgagcugaaauguuuuggaaacaccgcugucgccaagugcaacgaaaaacaugacgaggaguucugcgauaugcuccggcuguuugacuucuguaagcaggcuauccagcgccuuaaagccccugcgcagaugagcauucaacugaucaauaaggccgugaacgcucucaucaaugaccagcugauuaugaagaaccaccuuagagauaucaugggcauucccuauugcaauuacuccaaauauugguaccugaaccacacaaccacagggaagaccagccucccuaaauguuggcuggugucuaauggauccuaccugaacgaaacgcauuucagcgacgauaucgaacagcaagccgacaauaugauuacagagaugcuccagaaggaguauauggaacggcagggcaaaaccccgcuggggcuugucgaucuguuuguuuucucuaccagcuuuuaccucaucuccaucuuccugcaccuggugaagauucccacacaucgccacaucgugggaaaaccuugccccaagccucauagacuuaaccacaugggcauuuguucuugcggccucuauaagcagcccggggucccggugaaauggaagcggugaggacuaguaauaaggaaacuguaugaaugucugugggcaggaagugaagagauccuucuguaaagguuuuuggaauuaugucugcugaauaauaaacuuuuuugaaauaauaaaucugguagaaaaaugagaucuaaaaaaaaaaaaaaaaaaaaaaaaaaaaaaaaaaaaaaaaaaaaaaaaaaaaaaaaaaaaaaaaaaaaaaaaaaaaaaaaaaaaaaaaaaaaaaaaaaaa

SEQ ID NO: 24258 - RNA, 1788 nt, Artificial Sequence
  mRNA product Design b-4 (A100) comprising derived and/or modified sequence from LASV(LM776-SLE-2012;Clade IV)__AIT17824__GPCmut2 (opt5)
aggagagucccgcagucggcguccagcggcucugcuuguucgugugugugucguugcaggccuuauucaagcuuaccaugggccagaucgugaccuucuuucaagaggucccccacguuauugaagaggugaugaacaucgugcugauugcccucagcauccuggcuguccuuaaggggcuguacaauuucgccacaugcggacucgugggccugguuacguuucuucugcucugugggagauccugcaccacaucuguguauaaaggagucuacgaacugcagacccuggagcucaacauggaaacacugaauauguguaugccucuuagcugcaccaagaacaauucccaucacuauauuauggugggcaacgagacagggcuggagcucacccugacgaauaccucuaucaucaaccauaaauucuguaaucuuagcgacgcgcacaagaaaaaccuguacgaucaugcucucauguccauuaucucuacauuucaccugagcauuccgaauuucaaccaguaugaagccauguccugcgacuuuaauggaggcaagaucagcguucaguacaaccugucucacuccuaugccggcgaugcugccaaucauugugggaccguggcuaacggaguccuccaaacauucaugcggauggccuggggcgggagcuacauugcgcuggacucuggacacggcaagugggauugcaucaugaccuccuaccaguaucuuauuauccagaacacgacaugggaggaccauugucaguuuagccgccccucuccuaucggguaccugggacuccugucccaaagaacccgggauauuuauaucagccgcagacggcgcggcacauucaccuggacccuuuccgacucugaaggcaaagauacacccgggggauacugccugacgagauggaugcucauugaggccgagcugaaguguuuuggcaauaccgcuguggccaaaugcaacgaaaagcacgacgaggaguucugcgauaugcugcggcucuuugacuucuguaaacaggcuauccagcgccugaaggccccugcgcagaugagcauucaacuuaucaauaaggccgugaacgcucugaucaaugaucagcucauuaugaaaaaccaccugagagacaucauggggauucccuauugcaauuacuccaaguauugguaccuuaaccauacaaccacaggaaaaaccagccugccuaaguguuggcucgucucuaauggcuccuaccugaacgaaacgcacuucagcgacgauaucgaacagcaagccgacaauaugauuacagagaugcugcagaaagaguauauggaacggcaggggaagaccccgcucggacugguugaucuuuuuguguucucuaccagcuuuuaccugaucuccaucuuccuccaucuggugaaaauucccacacaccgccauaucgucggcaagucuugcccuaagccccacagacugaaccacaugggcauuuguagcugcgggcuuuauaaacagccuggagugcccguucgguggaagcgcugaggacuaguaauaaggaaacuguaugaaugucugugggcaggaagugaagagauccuucuguaaagguuuuuggaauuaugucugcugaauaauaaacuuuuuugaaauaauaaaucugguagaaaaaugagaucuaaaaaaaaaaaaaaaaaaaaaaaaaaaaaaaaaaaaaaaaaaaaaaaaaaaaaaaaaaaaaaaaaaaaaaaaaaaaaaaaaaaaaaaaaaaaaaaaaaaa

SEQ ID NO: 24259 - RNA, 1788 nt, Artificial Sequence
  mRNA product Design b-4 (A100) comprising derived and/or modified sequence from LASV(Mad39;Clade IV)__ANH09722__GPCmut2 (opt5)
aggagagucccgcagucggcguccagcggcucugcuuguucgugugugugucguugcaggccuuauucaagcuuaccaugggccagaucgugaccuucuuucaagaggucccccacguuauugaagaggugaugaacaucgugcugauugcccucagcauccuggcuguccuuaaggggcuguacaauguggccacaugcggacucauuggccugguuacguuccuucugcucugugggagauccugcaccacaacccuguauaaaggaguguacgaacugcaggcgcucgagcugaacauggaaacacuuaauauguguaugccucugucuugcaccaagaacaauagccaucacuauauccgggucggcaacgagacagggcucgagcugacccuuacgaauaccucccugaucaaccauaaauuuuguaaucucucugacgcucacaagaaaaaccuguacgaucaugcccugaugagcauuaucuccacauuccaccucucuauuccgaauuuuaaccaguaugaagccaugagcugcgacuucaaugauggaaagaucuccgugcaguacaaccugagccacaccuaugcuggcgacacagccaaucauuguggcaccguugcuaacggggugcuucaaacguuuaugcgcauggccuggggaggcucuuacauugcgcuggauuccgggagaggaggcugggacugcaucaugacaagcuaccaguaucucauuauccagaacaccacaugggaggaucacugucaguucucucggcccuccccuaucggguaccugggacuucugagccaacgcaccagagacauuuauaucucucggcgcagacggggcaccuuuacauggacgcucuccgauagcgaaggcaaggacacccccgggggauacugccugacacgcuggaugcugauugaggccgagcucaaauguuucggcaauaccgcugucgccaagugcaacgaaaaacaugaugaggaauuuugcgacaugcugagacuuuucgauuuuuguaagcaggcuauccagcggcugaaagccccugcgcagauguccauucaacucaucaauaaggccgugaacgcucugaucaaugaccagcuuauuaugaagaaccaucugcgcgacaucauggggauucccuauugcaauuacucuaaauauugguaccucaaccacacagugaccggaaagacgagccugccuaaauguuggcuggucuccaauggcagcuaccucaacgagacacacuucucugaugacaucgaacagcaagccgauaauaugauuaccgagaugcugcagaaggaguauauggaaagacaggggaaaaccccgcuuggacugguugaccucuucguguuuuccaccagcuucuaccugaucucuaucuuucugcaccuugugaagauucccacacaucggcacgucgugggcaaaccuugccccaagccucaucgccucaaccacaugggcaucuguagcugcggguucuauaagcagcccggaguuccggugagauggaaacggugaggacuaguaauaaggaaacuguaugaaugucugugggcaggaagugaagagauccuucuguaaagguuuuuggaauuaugucugcugaauaauaaacuuuuuugaaauaauaaaucugguagaaaaaugagaucuaaaaaaaaaaaaaaaaaaaaaaaaaaaaaaaaaaaaaaaaaaaaaaaaaaaaaaaaaaaaaaaaaaaaaaaaaaaaaaaaaaaaaaaaaaaaaaaaaaaa

SEQ ID NO: 24260 - RNA, 1788 nt, Artificial Sequence
  mRNA product Design b-4 (A100) comprising derived and/or modified sequence from LASV(Z0947-SLE-2011;Clade IV)__AIT17840__GPCmut2 (opt5)
aggagagucccgcagucggcguccagcggcucugcuuguucgugugugugucguugcaggccuuauucaagcuuaccaugggccagaucgugaccuucuuucaagaggucccccacguuauugaagaggugaugaacaucgugcugauugcccucagcauccuggcuguccuuaaggggcuguacaauuucgccacaugcggacucgugggccugguuacguuucuucugcucugugggagauccugcaccauuucucuguauaaaggaguguacgaacugcagacacucgagcugaacauggaaacccuuaauauguguaugccucugagcugcacaaagaacaauucccaucacuauaucauggucggcaacgagaccgggcucgagcugacacuuaccaauacgucuaucauuaaccauaaauucuguaaucugagcgacgcgcacaagaaaaaccucuacgaucaugcucugauguccaucauuucuaccuuucaccugagcaucccgaauuucaaccaguaugaagccauguccugcgacuuuaauggaggcaagauuagcgugcaguacaaccucucucacuccuaugccggcgaugcugccaaucauugugggacaguugcuaacggagugcugcaaaccuucaugcggauggccuggggcgggagcuacaucgcgcuugacucuggacgcgauagaugggacugcauuaugacauccuaccaguaucugaucauccagaacaccacgugggaggaucacugucaguuuagccggcccucuccuauuggcuaccucgggcugcuuucccaacgcacaagagacaucuauauuagccggcgcagacggggaaccuucacauggacccuguccgauucugaaggcaaggacacccccggcggguacugccucacacgcuggaugcugaucgaggccgagcugaaauguuuuggaaauacggcugucgccaagugcaacgaaaaacaugaugaggaguucugcgacaugcucagacuguuugauuucuguaagcaggcuauucagcggcuuaaagccccugcgcagaugagcauccaacugaucaauaaggccgugaacgcucucauuaaugaccagcugaucaugaagaaccaccuucgcgacauuaugggcauccccuauugcaauuacuccaaauauugguaccugaaccacaccacaaccgggaagacaagccucccuaaauguuggcuggugucuaauggauccuaccugaacgaaacccauuucagcgaugacauugaacagcaagccgauaauaugaucacggagaugcuccagaaggaguauauggaaagacagggcaaaacaccgcuggggcuugucgaccuguuuguuuucucuaccagcuuuuaccucaucuccauuuuccugcaccuggugaagauccccacccaucggcacauugugggaaaaccuugccccaagccucaucgccuuaaccacaugggcaucuguucuugcggccucuauaagcagcccggggucccggugaaauggaagagaugaggacuaguaauaaggaaacuguaugaaugucugugggcaggaagugaagagauccuucuguaaagguuuuuggaauuaugucugcugaauaauaaacuuuuuugaaauaauaaaucugguagaaaaaugagaucuaaaaaaaaaaaaaaaaaaaaaaaaaaaaaaaaaaaaaaaaaaaaaaaaaaaaaaaaaaaaaaaaaaaaaaaaaaaaaaaaaaaaaaaaaaaaaaaaaaaa

SEQ ID NO: 24261 - RNA, 1658 nt, Artificial Sequence
  mRNA product Design i-3 (hSL-A64-N5) comprising derived and/or modified sequence from LASV(Josiah;Clade IV)__NP_694870__GPCmut2 (opt1)
aggagaaagcuuaccaugggccagaucgugaccuucuuccaggaggucccccacgugaucgaggaggugaugaacaucguccugaucgcccucagcgugcuggccgugcugaaggggcucuacaacuucgcgaccugcggccuggucgggcuggugacguuccuccugcugugcggccgcuccugcaccaccagccucuacaaggggguguacgagcugcagacccuggagcucaacauggagacgcugaacaugugcaugccgcuguccugcaccaagaacaacagccaccacuacaucauggucggcaacgagaccggccucgagcugacgcugaccaacaccuccaucaucaaccacaaguucugcaaccucagcgacgcccacaagaagaaccuguacgaccacgcccugauguccaucaucagcaccuuccaccucuccauccccaacuucaaccaguacgaggccaugagcugcgacuucaacgggggcaagaucuccgugcaguacaaccugagccacuccuacgccggggacgcggccaaccacugcggcacgguggccaacgggguccugcagaccuucaugcggauggccuggggcggcagcuacaucgcgcucgacuccgggcgcggcaacugggacugcaucaugaccagcuaccaguaccugaucauccagaacaccacgugggaggaccacugccaguucucccggcccagccccaucggguaccugggccuccugucccagcgcacccgggacaucuacaucagccgccggcgccggggcaccuucaccuggacgcugagcgacuccgaggggaaggacaccccgggcggguacugccugacccgcuggaugcucaucgaggccgagcugaagugcuucggcaacaccgccguggccaagugcaacgagaagcacgacgaggaguucugcgacaugcugcggcuguucgacuucugcaagcaggccauccagcgccugaaggcgcccgcccagaugagcauccagcugaucaacaaggccgugaacgcccucaucaacgaccagcugaucaugaagaaccaccuccgggacaucauggggauccccuacugcaacuacuccaaguacugguaccucaaccacacgaccaccggccgcaccagccugcccaagugcuggcuggucuccaacggcagcuaccucaacgagacgcacuucuccgacgacaucgagcagcaggccgacaacaugaucaccgagaugcugcagaaggaguacauggagcggcaggggaagacgccccugggccucguggaccuguucguguucagcaccuccuucuaccugaucagcaucuuccugcaccucgucaagaucccgacccaccgccacaucguggggaaguccugccccaagccccaccggcugaaccacaugggcaucugcagcugcgggcuguacaagcagcccggcgugccggucaaguggaagcgcugaggacuaguuauaagacugacuagcccgaugggccucccaacgggcccuccuccccuccuugcaccgagauuaaucaaaggcucuuuucagagccaccaaaaaaaaaaaaaaaaaaaaaaaaaaaaaaaaaaaaaaaaaaaaaaaaaaaaaaaaaaaaaaaaagaauu

SEQ ID NO: 24262 - RNA, 1655 nt, Artificial Sequence
  mRNA product Design i-3 (hSL-A64-N5) comprising derived and/or modified sequence from LASV(LP;Clade I)__AAF86701__GPCmut2 (opt1)
aggagaaagcuuaccaugggccagaucaucaccuucuuccaggaggugccccacgucaucgaggaggugaugaacaucgugcugaucgcccucagccugcuggccauccucaaggggcuguacaacaucgcgaccugcggcaucaucgggcuggucgccuuccucuuccugugcggcaaguccugcagccugacgcucaagggcggguacgagcugcagacccuggagcucaacauggagacccugaacaugugcaugccgcuguccugcacgaagaacagcucccaccacuacauccgcgugggcaacgagaccgggcucgagcugacccugaccaacacgagcaucaucaaccacaaguucugcaaccucuccgacgcccacaagaagaaccuguacgaccacgcccugaugagcaucaucuccaccuuccaccucagcauccccaacuucaaccaguacgaggccauguccugcgacuucaacggcgggaagaucagcgugcaguacaaccugucccacagcuacgcgggcgacgccgccgagcacugcgggaccgucgccaacggcgugcugcagaccuucaugcggauggcguggggcgggcgcuacaucgcccucgacuccggcaaggggaacugggacugcaucaugacgagcuaccaguaccugaucauccagaacaccaccugggaggaccacugccaguucucccggcccagccccaucggcuaccugggccuccugucccagcgcacccgggacaucuacaucagccgccggcgccgggggacguucaccuggacccugagcgacuccgagggcaacgagacccccgggggcuacugccugacgcgcuggaugcucaucgaggccgagcugaagugcuucgggaacaccgccguggccaagugcaacgagaagcacgacgaggaguucugcgacaugcugcggcuguucgacuucugcaagcaggcgauccgccggcugaaggcccccgcccagaugagcauccagcugaucaacaaggccgucaacgcccucaucaacgaccagcugaucaugaagaaccaccuccgcgacaucaugggcauccccuacugcaacuacuccaaguacugguaccucaaccacaccagcuccggccggaccagccugcccaagugcuggcugaucuccaacgggagcuaccucaacgagacgcaguucuccgacgacaucgagcagcaggcggacaacaugaucaccgagaugcugcagaaggaguacaucgagcgccagggcaagaccccgcuggggcucguggacaucuucaucuucagcaccuccuucuaccugaucagcaucuuccugcaccugaucaagaucccgacgcaccggcacaucgugggcaagcccugccccaagccccaccgccucaaccacaugggggucugcuccugcggccuguacaagcacccgggcgugcccaccaaguggaagcggugaggacuaguuauaagacugacuagcccgaugggccucccaacgggcccuccuccccuccuugcaccgagauuaaucaaaggcucuuuucagagccaccaaaaaaaaaaaaaaaaaaaaaaaaaaaaaaaaaaaaaaaaaaaaaaaaaaaaaaaaaaaaaaaaagaauu

SEQ ID NO: 24263 - RNA, 1655 nt, Artificial Sequence
  mRNA product Design i-3 (hSL-A64-N5) comprising derived and/or modified sequence from LASV(803213;Clade II)__AAF86703__GPCmut2 (opt1)
aggagaaagcuuaccaugggccagaucaucaccuucuuccaggaggugccccacgucaucgaggaggugaugaacaucgugcugaucgcccucagccugcuggccauccucaaggggaucuacaacgucgcgaccugcggccuguucgggcugaucuccuuccuccugcugugcggccgcagcugcuccgugacguacaaggggguguacgagcuccagacccuggagcugaacauggccaaccucaacaugugcaugccgcugagcugcaccaagaacaacucccaccacuacaucauggucggcaacgagacgggccuggagcucacccugaccaacaccagcaucaucaaccacaaguucugcaaccuguccgacgcccacaagaagaaccucuacgaccacgcccugaugagcaucaucuccacguuccaccugagcauccccaacuucaaccaguacgaggccauguccugcgacuucaacgggggcaagaucagcgugcaguacaaccucucccacagcuucgcgguggacgccgccaaccacugcgggaccaucgccaacggcguccugcagaccuucaugcggauggcguggggcggguccuacaucgcccuggacagcggcaaggggaacugggacugcaucaugaccuccuaccaguaccucaucauccagaacacgaccugggaggaccacugccaguucagccgccccucccccaucggcuaccuggggcugcucagccagcggacccgcgacaucuacaucagccggcgccgccggggcaccuucacguggacccucuccgacagcgagggcaacgaggcccccgggggcuacugccugacccgguggaugcugaucgaggccgagcucaagugcuucgggaacaccgccguggcgaagugcaacgagaagcacgacgaggaguucugcgacaugcugcgccuguucgacuucugcaagcaggccaucaagcggcucaagacgcccgcccagauguccauccagcugaucaacaaggccgugaacgcccugaucaacgaccagcucaucaugaagaaccaccuccgcgacaucaugggcauccccuacugcaacuacagccgguacugguaccugaaccacaccgucaccgggaagaccucccugccccgcugcuggcuggugagcaacggcuccuaccugaacgagacgcacuucagcgacgacaucgagcagcaggcggacaacaugaucaccgagaugcuccagaaggaguacauggaccggcagggcaagaccccgcuggggcugguggaccucuucgucuucuccaccagcuucuaccugaucuccaucuuccugcaccuggugaagaucccgacgcaccgccacaucgugggcaagcccugccccaagccccaccggcucaaccacauggggaucugcagcugcggccuguacaagcacccggggguccccgugaaguggaagcgcugaggacuaguuauaagacugacuagcccgaugggccucccaacgggcccuccuccccuccuugcaccgagauuaaucaaaggcucuuuucagagccaccaaaaaaaaaaaaaaaaaaaaaaaaaaaaaaaaaaaaaaaaaaaaaaaaaaaaaaaaaaaaaaaaagaauu

SEQ ID NO: 24264 - RNA, 1655 nt, Artificial Sequence
  mRNA product Design i-3 (hSL-A64-N5) comprising derived and/or modified sequence from LASV(GA391;Clade III)__CAA36645__GPCmut2 (opt1)
aggagaaagcuuaccaugggccagaucgugaccuucuuccaggaggucccccacgugaucgaggaggugaugaacaucguccugaucgcccucagcauccuggccauccugaaggggcucuacaacguggcgaccugcggccugaucgggcuggugacguuccuccugcuguccggccgcagcugcucccucaucuacaaggggaccuacgagcugcagacccuggagcucaacauggagacccugaacaugugcaugccgcugagcugcaccaagaacaacucccaccacuacauccgggucggcaacgagaccggccucgagcugacccugacgaacaccagcauccucaaccacaaguucugcaaccuguccgacgcccacaagcgcaaccuguacgaccacagccucauguccaucaucagcaccuuccaccuguccauccccaacuucaaccaguacgaggccaugagcugcgacuucaacgggggcaagaucaccgugcaguacaaccugucccacagcuucgccguggacgccgcggggcacugcggcacgcucgccaacgggguccugcagaccuucaugcggauggccuggggcggcuccuacaucgcccuggacagcgggcgcggcaacugggacugcaucaugaccuccuaccaguaccucaucauccagaacaccacgugggacgaccacugccaguucagccggcccucccccaucggguaccugggccugcucagccagcgcacccgggacaucuacaucagccgccggcgccggggcaccuucaccuggacgcucuccgacagcgaggggaacgagaccccgggcggguacugccugacccgcuggaugcugaucgaggcggagcucaagugcuucggcaacaccgccguggccaagugcaacgagaagcacgacgaggaguucugcgacaugcugcggcuguucgacuucugcaagcaggccauccgccggcucaagacgcccgcccagauguccauccagcugaucaacaaggcggugaacgcccugaucaacgaccagcucaucaugaagaaccaccuccgcgacaucauggggauccccuacugcaacuacagccgguacugguaccugaaccacaccuccaccggcaagaccagccugccccgcugcuggcugaucuccaacggcagcuaccugaacgagacgaaguucuccgacgacaucgagcagcaggccgacaacaugaucaccgagaugcuccagaaggaguacaucgaccggcaggggaagacgccccugggccuggucgaccuguucguguucagcaccuccuucuaccucaucagcaucuuccugcaccuggugaagaucccgacccaccgccacaucgucgggaagcccugccccaagccccaccggcucaaccacaugggcaucugcuccugcgggcuguacaagcagccgggcgugcccgugcgcuggaagcggugaggacuaguuauaagacugacuagcccgaugggccucccaacgggcccuccuccccuccuugcaccgagauuaaucaaaggcucuuuucagagccaccaaaaaaaaaaaaaaaaaaaaaaaaaaaaaaaaaaaaaaaaaaaaaaaaaaaaaaaaaaaaaaaaagaauu

SEQ ID NO: 24265 - RNA, 1658 nt, Artificial Sequence
  mRNA product Design i-3 (hSL-A64-N5) comprising derived and/or modified sequence from LASV(AV;Clade V)__CCA30314__GPCmut2 (opt1)
aggagaaagcuuaccaugggccagaucgugaccuucuuccaggaggucccccacgugaucgaggaggugaugaacaucguccugaucgcccucagcauccuggccgugcugaaggggcucuacaacaucgcgaccugcggccugaucgggcugaucacguuccuccugcugugcggccgcuccugcagcuccaaccucuacaaggggguguacgagcugcagagccuggaccucaacauggagacccugaacaugugcaugccgcuguccugcaccaagaacaacagccaccacuacauccgggucggcaacgacacgggccucgagcugacccugaccaacaccuccauccucaaccacaaguucugcaaccugagcgacgcccacaagaaggaccuguacgaccacgcccucauguccaucaucagcacguuccaccuguccauccccaacuucaaccaguacgaggccaugagcugcgacuucaacgggggcaagaucuccgugcaguacaaccugagccacuccuacgccaucgacgcggccaaccacugcgggaccguggccaacggcauccuccagaccuucaugcgcauggccuggggcgggagcuacaucgcgcuggacuccggccgggggaacugggacugcaucaugaccagcuaccaguaccugaucauccagaacacgaccugggagaaccacugccaguucucccgccccagccccaucggcuaccucgggcugcugagccagcggacccgcgacaucuacaucucccggcgccgccggggcaccuucacguggacccugagcgacuccgagggcaacgccacccccgggggcuacugccucacccgguggaugcugaucgaggccgagcugaagugcuucgggaacacggccgucgccaagugcaacgagaagcacgacgaggaguucugcgacaugcuccgccuguucgacuucugcaagcaggcgaucagccggcugaagucccccgcccagaugagcauccagcucaucaacaaggccgugaacgcccugaucaacgaccagcugaucaugaagaaccaccuccgcgacaucaugggcauccccuacugcaacuacuccaaguacugguaccugaaccacaccaucaccgggaagaccagccugcccaagugcuggcucguguccaacggcagcuaccugaacgagacgcacuucuccgacgacaucgagcagcaggccgacaacaugaucaccgagaugcugcagaaggaguacauggagcggcagggcaagaccccgcucgggcuggucgaccuguucguguucagcaccuccuucuaccugaucagcaucuuccuccgccuggugaagaucccgacgcaccggcacaucgucggcaagcccugccccaagccccaccgccugaaccacauggggaucugcuccugcggccucuacaagcagccgggggugcccgugcgguggaagcgcugaggacuaguuauaagacugacuagcccgaugggccucccaacgggcccuccuccccuccuugcaccgagauuaaucaaaggcucuuuucagagccaccaaaaaaaaaaaaaaaaaaaaaaaaaaaaaaaaaaaaaaaaaaaaaaaaaaaaaaaaaaaaaaaaagaauu

SEQ ID NO: 24266 - RNA, 1655 nt, Artificial Sequence
  mRNA product Design i-3 (hSL-A64-N5) comprising derived and/or modified sequence from LASV(Togo/2016/7082;Clade VI)__AMR44577__GPCmut2 (opt1)
aggagaaagcuuaccaugggccagaucaucaccuucuuccaggaggugccccacgucaucgaggaggugaugaacaucgugcugaucgcccucagccugcuggccauccucaagggggucuacaacguggcgaccugcggcaucaucgggcuggugacguuccuguuccucugcggccgcuccugcagccugaucuacaagggguccuacgagcugcagacccucgagcugaacauggagacccugaacaugugcaugccgcucagcugcacgaagaacuccagccaccacuacauccgggucggcaacgagaccggccuggagcugacccucaccaacacguccaucaucaaccacaaguucugcaaccugagcgacgcccacaagcgcaaccuguacgaccacgcccucauguccauccugagcaccuuccaccuguccauccccaacuucaaccaguacgaggccaugagcugcgacuucaacgggggcaagaucuccgugcaguacaaccucagccacgccuacgcgguggacgccgccgagcacugcgggaccgucgccaacggcgugcugcagaccuucaugcggauggcguggggcggguccuacaucgcccuggacagcggccgcgggaacugggacugcaucaugacguccuaccaguaccucaucauccagaacaccaccugggaggaccacugccaguucagccggcccucccccaucggcuaccuggggcugcucagccagcgcacccgggacaucuacaucagccgccggcgccggggcacguucaccuggacccucuccgacagcgagggcaacgagacccccgggggcuacugccugacgcgcuggaugcugaucgaggccgagcucaagugcuucgggaacaccgccguggccaagugcaacgagaagcacgacgaggaguucugcgacaugcugcggcuguucgacuucugcaagcaggcgauccagcgccucaagucccccgcccagaugagcauccagcugaucaacaaggccgucaacgcccugaucaacgaccagcucaucaugaagaaccaccuccgggacaugaugggcauccccuacugcaacuacuccaaguacugguaccugaaccacaccagcuccgggcgcaccagccugcccaagugcuggcugguguccaacggcagcuaccugaacgagacgcacuucuccgacgacaucgagcagcaggccgacaacaugaucaccgagaugcuccagaaggaguacaucgaccggcagggcaagaccccgcuggggcugguggaccucuucgucuucagcaccuccuucuaccugaucagcaucuuccugcaccugaucaagaucccgacgcaccgccacaucgugggcaagcccugccccaagccccaccggcucaaccacauggggaucugcuccugcggccuguacaagcagccgggggugcccacccgcuggaagcggugaggacuaguuauaagacugacuagcccgaugggccucccaacgggcccuccuccccuccuugcaccgagauuaaucaaaggcucuuuucagagccaccaaaaaaaaaaaaaaaaaaaaaaaaaaaaaaaaaaaaaaaaaaaaaaaaaaaaaaaaaaaaaaaaagaauu

SEQ ID NO: 24267 - RNA, 1655 nt, Artificial Sequence
  mRNA product Design i-3 (hSL-A64-N5) comprising derived and/or modified sequence from LASV(KAK-428;Clade n.d. (VII))__ANH09740__GPCmut2 (opt1)
aggagaaagcuuaccaugggccagaucgugaccuucuuccaggaggucccccacgugaucgaggaggugaugaacaucguccugaucgcccucagccugcuggccauccucaaggggcuguacaacuucgcgaccugcggcgugaucgggcugaucacguuccuccugcugugcggccgcuccugcagcgccaccuacaaggggcaguacgagcuccagacccuggagcugaacauggagucccucaacaugugcaugccgcugagcugcacgaagaacaacucccaccacuacauccgggccggcaacaacaccggccuggagcucacccugaccaacacgagcaucaucucccacaaguucugcaaccugagcgacgcccacaagaagaaccucuacgaccacacccugauguccaucaucaccaccuuccaccugagcauccccaacuucaaccaguacgaggccauguccugcgacuucaacgggggcaagaucagcauccaguacaaccucucccacagcuacgcgggggacgccgcccagcacugcggcacgguggccaacgggguccugcagaccuucaugcgcauggcguggggcggcuccuaccuggcccucgacagcgggcggcgcggcugggacugcaucaucuccagcuaccaguaccugaucauccagaacaccaccugggacgaccacugccaguucucccggcccagccccaucggguaccugggcuucgugagccagaagacgcgcgacaucuacaucucccggcgccgccggggcaccuucaccuggacccugagcgacuccgaggggcacgacaugccgggcggguacugccucacgcgguggaugcugaucgaggccgaccugaagugcuucggcaacaccgccguggccaagugcaacgagaagcacgacgaggaguucugcgacauguggcgccucuucgacuucugcaagcaggcgauccagcggcugaaggcccccgcccagaugaacauccagcugaucaacaaggccgucaacgcccucaucaacgaccagcugaugaugaagaaccaccuccgcgacaucauggggauccccuacugcaacuacagcaaguucugguaccugaacaacaccaccacgggccggaccucccugccccgcugcuggcugaucagcaacggcuccuaccucaacgagacccacuucagcgacgacaucgagcagcaggcggacaacaugaucaccgagaugcugcagaaggaguacauggaccggcaggggaagacgccccugggccucguggaccuguucguguucuccaccagcuucuaccugaucaccaucuuccuccaccuggucaagaucccgacccaccgccacaucguggggaagcccugccccaagccccaccggcugaaccacaugggcaucugcuccugcgggcuguacaagcagccgggcgugcccguccgcuggaagcggugaggacuaguuauaagacugacuagcccgaugggccucccaacgggcccuccuccccuccuugcaccgagauuaaucaaaggcucuuuucagagccaccaaaaaaaaaaaaaaaaaaaaaaaaaaaaaaaaaaaaaaaaaaaaaaaaaaaaaaaaaaaaaaaaagaauu

SEQ ID NO: 24268 - RNA, 1655 nt, Artificial Sequence; identical to SEQ ID NO: 24262
  mRNA product Design i-3 (hSL-A64-N5) comprising derived and/or modified sequence from LASV(Pinneo-NIG-1969;Clade I)__AIT17836__GPCmut2 (opt1)

SEQ ID NO: 24269 - RNA, 1655 nt, Artificial Sequence
  mRNA product Design i-3 (hSL-A64-N5) comprising derived and/or modified sequence from LASV(ISTH0009-NIG-2011;Clade II)__AIT17404__GPCmut2 (opt1)
aggagaaagcuuaccaugggccagaucaucaccuucuuccaggaggugccccacgucaucgaggaggugaugaacaucgugcugaucgcccucagccugcuggccauccucaaggggaucuacaacgucgcgaccugcggccuguucgggcugguguccuuccuccugcugugcggccgcagcugcuccacgaccuacaaggggguguacgagcuccagacccuggagcuggacauggccagccucaacaugugcaugccgcuguccugcacgaagaacaacagccaccacuacaucauggucggcaacgagaccggccuggagcucacccugaccaacacguccaucaucaaccacaaguucugcaaccugagcgacgcccacaagaagaaccucuacgaccacgcccugauguccaucaucagcaccuuccaccuguccauccccaacuucaaccaguacgaggccaugagcugcgacuucaacgggggcaagaucuccgugcaguacaaccucagccacgcguacgccguggacgccgccaaccacugcgggaccaucgcgaacggcguccugcagaccuucaugcggauggccuggggcggguccuacaucgcccuggacagcggcaagggguccugggacugcaucaugacgagcuaccaguaccucaucauccagaacaccaccugggaggaccacugccaguucucccgccccagccccaucggcuaccuggggcugcucagccagcggacccgcgacaucuacaucucccggcgccgccggggcacguucaccuggacccucagcgacuccgagggcaacgagacccccgggggcuacugccugacgcgguggaugcugaucgaggccgagcucaagugcuucgggaacaccgccguggcgaagugcaacgagaagcacgacgaggaguucugcgacaugcugcgccuguucgacuucugcaagcaggccauccggcgccucaagacccccgcccagaugagcauccagcugaucaacaaggccgugaacgcccugaucaacgaccagcucaucaugaagaaccaccuccgggacaucaugggcaucccguacugcaacuacuccaaguacugguaccugaaccacaccgucacggggaagaccagccugccccgcugcuggcugguguccaacggcagcuaccugaacgagacccacuucuccgacgacaucgagcagcaggcggacaacaugaucaccgagcuccugcagaaggaguacauggaccggcagggcaagacgccccuggggcucguggaccuguucgucuucagcaccuccuucuaccugaucagcaucuuccugcaccucaucaagaucccgacccaccgccacaucaccggcaagcccugccccaagccccaccggcugaaccacauggggaucugcuccugcggccuguacaagcacccgggggugcccgugaaguggaagcgcugaggacuaguuauaagacugacuagcccgaugggccucccaacgggcccuccuccccuccuugcaccgagauuaaucaaaggcucuuuucagagccaccaaaaaaaaaaaaaaaaaaaaaaaaaaaaaaaaaaaaaaaaaaaaaaaaaaaaaaaaaaaaaaaaagaauu

SEQ ID NO: 24270 - RNA, 1655 nt, Artificial Sequence
  mRNA product Design i-3 (hSL-A64-N5) comprising derived and/or modified sequence from LASV(ISTH2010-NIG-2012;Clade II)__AIT17482__GPCmut2 (opt1)
aggagaaagcuuaccaugggccagaucaucaccuucuuccaggaggugccccacgucaucgaggaggugaugaacaucgugcugaucgcccucagccugcuggccauccucaaggggaucuacaacgucgcgaccugcggccuguucgggcugguguccuuccuccugcugugcggccgcagcugcuccacgaccuacaaggggguguacgagcuccagacccuggagcuggacauggccagccucaacaugugcaugccgcuguccugcacgaagaacaacagccaccacuacaucauggucggcaacgagaccggccuggagcucacccugaccaacacguccaucaucaaccacaaguucugcaaccugagcgacgcccacaagaagaaccucuacgaccacgcccugauguccaucaucagcaccuuccaccuguccauccccaacuucaaccaguacgaggccaugagcugcgacuucaacgggggcaagaucuccgugcaguacaaccucagccacgcguacgccguggacgccgccaaccacugcgggaccaucgcgaacggcguccugcagaccuucaugcggauggccuggggcggguccuacaucgcccuggacagcggcaagggguccugggacugcaucaugacgagcuaccaguaccucaucauccagaacaucaccugggaggaccacugccaguucucccgccccagccccaucggcuaccuggggcugcucagccagcggacccgcgacaucuacaucucccggcgccgccggggcaccuucacguggacccucagcgacuccgagggcaacgagacccccgggggcuacugccugacccgguggaugcugaucgaggccgagcucaagugcuucgggaacacggccguggcgaagugcaacgagaagcacgacgaggaguucugcgacaugcugcgccuguucgacuucugcaagcaggccauccggcgccucaagacccccgcccagaugagcauccagcugaucaacaaggccgugaacgcccugaucaacgaccagcucaucaugaagaaccaccuccgggacaucaugggcauccccuacugcaacuacuccaaguacugguaccugaaccacaccgucaccgggaagacgagccugccccgcugcuggcugguguccaacggcagcuaccugaacgagacccacuucuccgacgacaucgagcagcaggcggacaacaugaucaccgagcuccugcagaaggaguacaucgaccggcagggcaagaccccgcuggggcucguggaccuguucgucuucagcacguccuucuaccugaucagcaucuuccugcaccucgugaagaucccgacccaccgccacguggucggcaagcccugccccaagccccaccggcugaaccacauggggaucugcuccugcggccuguacaagcacccgggggugcccgugaaguggaagcgcugaggacuaguuauaagacugacuagcccgaugggccucccaacgggcccuccuccccuccuugcaccgagauuaaucaaaggcucuuuucagagccaccaaaaaaaaaaaaaaaaaaaaaaaaaaaaaaaaaaaaaaaaaaaaaaaaaaaaaaaaaaaaaaaaagaauu

SEQ ID NO: 24271 - RNA, 1655 nt, Artificial Sequence
  mRNA product Design i-3 (hSL-A64-N5) comprising derived and/or modified sequence from LASV(Lassa virus/H.sapiens-wt/NGA/2015/ISTH_0543;Clade II)__AVO03639__GPCmut2 (opt1)
aggagaaagcuuaccaugggccagaucaucaccuucuuccaggaggugccccacgucaucgaggaggugaugaacaucgugcugaucgcccucagccugcuggccauccucaaggggaucuacaacgucgcgaccugcggccuguucgggcugguguccuuccuccugcugugcggccgcagcugcuccacgaccuacaaggggguguacgagcuccagacccuggagcuggacauggccaaccucaacaugugcaugccgcugagcugcacgaagaacaacucccaccacuacaucauggucggcaacgagaccggccuggagcucacccugaccaacacgagcaucaucaaccacaaguucugcaaccuguccgacgcccacaagaagaaccucuacgaccacgcccugaugagcaucaucuccaccuuccaccugagcauccccaacuucaaccaguacgaggccauguccugcgacuucaacgggggcaagaucagcgugcaguacaaccucucccacaccuacgcgguggacgccgccaaccacugcgggaccaucgccaacggcguccugcagacguucaugcggauggcguggggcgggagcuacaucgcccuggacuccggcaaggggagcugggacugcaucaugaccuccuaccaguaccucgugauccagaacaccaccugggaggaccacugccaguucagccgccccucccccaucggcuaccuggggcugcucagccagcggacgcgcgacaucuacaucagccggcgccgccggggcaccuucaccuggacccucuccgacagcgagggcaacgagacgcccgggggcuacugccugacccgguggaugcugaucgaggccgagcucaagugcuucgggaacaccgccguggccaagugcaacgagaagcacgacgaggaguucugcgacaugcugcgccuguucgacuucugcaagcaggcgauccggcgccucaagacccccgcccagauguccauccagcugaucaacaaggccgucaacgcccugaucaacgaccagcucaucaugaagaaccaccuccgggacaucaugggcauccccuacugcaacuacagcaaguacugguaccugaaccacacggugaccgggaagaccucccugccccgcugcuggcuggugagcaacggcuccuaccugaacgagacccacuucagcgacgacaucgagcagcaggccgacaacaugaucacggagcuccugcagaaggaguacaucgaccggcagggcaagaccccgcuggggcucgucgaccuguucguguucuccaccagcuucuaccugaucuccaucuuccugcaccucgugaagaucccgacccaccgccacaucacgggcaagcccugccccaagccccaccggcugaaccacauggggaucugcagcugcggccuguacaagcacccggggguccccgugaaguggaagcgcugaggacuaguuauaagacugacuagcccgaugggccucccaacgggcccuccuccccuccuugcaccgagauuaaucaaaggcucuuuucagagccaccaaaaaaaaaaaaaaaaaaaaaaaaaaaaaaaaaaaaaaaaaaaaaaaaaaaaaaaaaaaaaaaaagaauu

SEQ ID NO: 24272 - RNA, 1655 nt, Artificial Sequence
  mRNA product Design i-3 (hSL-A64-N5) comprising derived and/or modified sequence from LASV(Lassa virus/H.sapiens-wt/NGA/2016/ISTH_0009;Clade II)__AVO03571__GPCmut2 (opt1)
aggagaaagcuuaccaugggccagaucaucaccuucuuccaggaggugccccacgucaucgaggaggugaugaacaucgugcugaucgcccucagccugcuggccauccucaaggggaucuacaacgucgcgaccugcggccugcuggggcucguguccuuccugcugcucugcggccgcagcugcuccacgaccuacaaggggguguacgagcugcagacccuggagcucgacauggccagccugaacaugugcaugccgcuguccugcacgaagaacaacagccaccacuacaucauggucggcaacgagaccggccucgagcugacccugaccaacacguccaucaucaaccacaaguucugcaaccucagcgacgcccacaagaagaaccuguacgaccacgcccugauguccaucaucagcaccuuccaccucuccauccccaacuucaaccaguacgaggccaugagcugcgacuucaacgggggccggaucuccgugcaguacaaccugagccacuccuacgcgguggacgccgccaaccacugcgggaccaucgccaacggcguccugcagaccuucaugcgcauggcguggggcgggagcuacaucgcccucgacuccggcaaggggagcugggacugcaucaugacguccuaccaguaccugaucauccagaacaccaccugggaggaccacugccaguucagccggcccagccccaucggcuaccuggggcuccugucccagcgcacccgggacaucuacaucagccgccggcgccggggcacguucaccuggacccuguccgacagcgagggcaacgagacccccgggggcuacugccugacgcgcuggaugcucaucgaggccgagcugaagugcuucgggaacaccgccguggccaagugcaacgagaagcacgacgaggaguucugcgacaugcugcggcuguucgacuucugcaagcaggcgauccgccggcugaagacccccgcccagauguccauccagcugaucaacaaggccgugaacgcccucaucaacgaccagcugaucaugaagaaccaccuccgcgacaucaugggcaucccguacugcaacuacagcaaguacugguaccucaaccacaccgucacggggaagaccucccugccccggugcuggcuggugagcaacggcuccuaccucaacgagacccacuucagcgacgacaucgagcagcaggccgacaacaugaucaccgagcugcugcagaaggaguacaucgaccgccagggcaagacgccccucgggcugguggaccuguucgucuucuccaccagcuucuaccugaucuccaucuuccuccaccuggugaagaucccgacccaccggcacaucaccggcaagcccugccccaagccccaccgccugaaccacauggggaucugcagcugcggccucuacaaccacccgggggugcccgucaaguggaagcggugaggacuaguuauaagacugacuagcccgaugggccucccaacgggcccuccuccccuccuugcaccgagauuaaucaaaggcucuuuucagagccaccaaaaaaaaaaaaaaaaaaaaaaaaaaaaaaaaaaaaaaaaaaaaaaaaaaaaaaaaaaaaaaaaagaauu

SEQ ID NO: 24273 - RNA, 1655 nt, Artificial Sequence
  mRNA product Design i-3 (hSL-A64-N5) comprising derived and/or modified sequence from LASV(Lassa virus/H.sapiens-wt/NGA/2016/ISTH_0017;Clade II)__AVO03567__GPCmut2 (opt1)
aggagaaagcuuaccaugggccagaucaucaccuucuuccaggaggugccccacgucaucgaggaggugaugaacaucgugcugaucgcccucagccugcuggccauccucaaggggaucuacaacgucgcgaccugcggccuguucgggcugguguccuuccuccugcugugcggccgcagcugcuccacgaccuacaaggggguguacgagcuccagacccuggagcuggacauggccagccucaacaugugcaugccgcuguccugcacgaagaacaacagccaccacuacaucauggucggcaacgagaccggccuggagcucacccugaccaacacguccaucaucaaccacaaguucugcaaccugagcgacgcccacaagaagaaccucuacgaccacgcccugauguccaucaucagcaccuuccaccuguccauccccaacuucaaccaguacgaggccaugagcugcgacuucaacgggggcaagaucuccgugcaguacaaccucagccacaccuacgcgaucgacgccgccaaccacugcgggaccaucgccaacggcgugcugcagacguucaugcggauggcguggggcggguccuacaucgcccuggacagcggcaagggguccugggacugcaucaugaccagcuaccaguaccucaucauccagaacaccaccugggaggaccacugccaguucucccgccccagccccaucggcuaccuggggcugcucagccagcggacgcgcgacaucuacaucucccggcgccgccggggcaccuucaccuggacccucagcgacuccgagggcaacgagacgcccgggggcuacugccugacccgguggaugcugaucgaggccgagcucaagugcuucgggaacaccgccgucgccaagugcaacgagaagcacgacgaggaguucugcgacaugcugcgccuguucgacuucugcaagcaggcgauccggcgccucaagacccccgcccagaugagcauccagcugaucaacaaggccgugaacgcccugaucaacgaccagcucaucaugaagaaccaccuccgggacaucaugggcauccccuacugcaacuacuccaaguacugguaccugaaccacacggugaccgggaagaccagccugccccgcugcuggcuggucuccaacggcagcuaccugaacgagacccacuucuccgacgacaucgagcagcaggccgacaacaugaucacggagcuccugcagaaggaguacauggaccggcagggcaagaccccgcuggggcucguggaccuguucguguucagcaccuccuucuaccugaucagcaucuuccugcaccucguccgcaucccgacccaccggcacgugaucggcaagcccugccccaagccccaccgccugaaccacauggggaucugcuccugcggccuguacaagcacccgggggugcccgucaaguggaagcggugaggacuaguuauaagacugacuagcccgaugggccucccaacgggcccuccuccccuccuugcaccgagauuaaucaaaggcucuuuucagagccaccaaaaaaaaaaaaaaaaaaaaaaaaaaaaaaaaaaaaaaaaaaaaaaaaaaaaaaaaaaaaaaaaagaauu

SEQ ID NO: 24274 - RNA, 1655 nt, Artificial Sequence
  mRNA product Design i-3 (hSL-A64-N5) comprising derived and/or modified sequence from LASV(Lassa virus/H.sapiens-wt/NGA/2018/ISTH_0959;Clade II)__AVV65099__GPCmut2 (opt1)
aggagaaagcuuaccaugggccagaucaucaccuucuuccaggaggugccccacgucaucgaggaggugaugaacaucgugcugaucgcccucagccugcuggccauccucaaggggaucuacaacgucgugaccugcggccuguucgggcugguguccuuccuccugcugugcggccgcagcugcuccacgaccuacaagggggucuacgagcuccagacccuggagcuggacauggcgagccucaacaugugcaugccgcuguccugcacgaagaacaacagccaccacuacaucauggugggcaacgagaccggccuggagcucacccugaccaacacguccaucaucaaccacaaguucugcaaccugagcgacgcccacaagaagaaccucuacgaccacgcccugauguccaucaucagcaccuuccaccuguccauccccaacuucaaccaguacgaggccaugagcugcgacuucaacgggggcaagaucuccgugcaguacaaccucagccacgccuacgcgaucgacgccgccaaccacugcgggaccaucgccaacggcguccugcagaccuucaugcggauggcguggggcggguccuacaucgcccuggacagcggcaagggguccugggacugcaucaugacgagcuaccaguaccucaucauccagaacaccaccugggaggaccacugccaguucucccgccccagccccaucggcuaccuggggcugcucagccagcggacccgcgacaucuacaucucccggcgccgccggggcacguucaccuggacccucagcgacuccgagggcaacgagacccccgggggcuacugccugacgcgguggaugcugaucgaggccgagcucaagugcuucgggaacaccgccguggccaagugcaacgagaagcacgacgaggaguucugcgacaugcugcgccuguucgacuucugcaagcaggcgauccggcgccucaagacccccgcccagaugagcauccagcugaucaacaaggccgugaacgcccugaucaacgaccagcucaucaugaagaaccaccuccgggacaucaugggcaucccguacugcaacuacuccaaguacugguaccugaaccacaccgucacggggaagaccagccugccccgcugcuggcugguguccaacggcagcuaccugaacgagacccacuucuccgacgacaucgagcagcaggccgacaacaugaucaccgagcuccugcagaaggaguacaucgaccggcagggcaagacgccccuggggcucguggaccuguucgucuucagcaccuccuucuaccugaucagcaucuuccugcaccucgugaagaucccgacccaccgccacgugaucggcaagcccugccccaagccccaccggcugaaccacauggggaucugcuccugcggccuguacaagcacccggggguccccgugaaguggaagcgcugaggacuaguuauaagacugacuagcccgaugggccucccaacgggcccuccuccccuccuugcaccgagauuaaucaaaggcucuuuucagagccaccaaaaaaaaaaaaaaaaaaaaaaaaaaaaaaaaaaaaaaaaaaaaaaaaaaaaaaaaaaaaaaaaagaauu

SEQ ID NO: 24275 - RNA, 1655 nt, Artificial Sequence
  mRNA product Design i-3 (hSL-A64-N5) comprising derived and/or modified sequence from LASV(LASV003-NIG-2008;Clade II)__AIT17580__GPCmut2 (opt1)
aggagaaagcuuaccaugggccagaucaucaccuucuuccaggaggugccccacgucaucgaggaggugaugaacaucgugcugaucgcccucagccugcuggccauccucaaggggaucuacaacgucgcgaccugcggccuguucgggcugguguccuuccuccugcugugcggccgcagcugcuccacgaccuacaaggggguguacgagcuccagacccuggagcuggacauggccagccucaacaugugcaugccgcuguccugcacgaagaacaacagccaccacuacaucauggucggcaacgagaccggccuggagcucacccugaccaacacguccaucaucaaccacaaguucugcaaccugagcgacgcccacaagaagaaccucuacgaccacgcccugauguccaucaucagcaccuuccaccuguccauccccaacuucaaccaguacgaggccaugagcugcgacuucaacgggggcaagaucuccgugcaguacaaccucagccacaccuacgcgguggacgccgccaaccacugcgggaccaucgccaacggcguccugcagacguucaugcggauggcguggggcggguccuacaucgcccuggacagcggcaagggguccugggacugcaucaugaccagcuaccaguaccucaucauccagaacaccaccugggaggaccacugccaguucucccgccccagccccaucggcuaccuggggcugcucagccagcggacgcgcgacaucuacaucucccggcgccgccggggcaccuucaccuggacccucagcgacuccgagagcaacgagacgccgggcggguacugccugacccgguggaugcugaucgaggccgagcucaagugcuucggcaacaccgccguggccaagugcaacgagaagcacgacgaggaguucugcgacaugcugcgccuguucgacuucugcaagcaggcgauccggcgccucaaggcccccgcccagauguccauccagcugaucaacaaggccgugaacgcccugaucaacgaccagcucaucaugaagaaccaccuccgggacaucauggggauccccuacugcaacuacagcaaguacugguaccugaaccacaccgucacgggccgcaccucccugccccggugcuggcuggugagcaacggguccuaccugaacgagacccacuucagcgacgacaucgagcagcaggcggacaacaugaucaccgagcuccugcagaaggaguacauggaccgccagggcaagacgccccugggccucguggaccuguucgucuucuccaccagcuucuaccugaucuccaucuuccugcaccucgugaagaucccgacccaccggcacgugaucgggaagcccugccccaagccccaccgccugaaccacaugggcaucugcagcugcgggcuguacaagcacccgggcguccccgugaaguggaagcggugaggacuaguuauaagacugacuagcccgaugggccucccaacgggcccuccuccccuccuugcaccgagauuaaucaaaggcucuuuucagagccaccaaaaaaaaaaaaaaaaaaaaaaaaaaaaaaaaaaaaaaaaaaaaaaaaaaaaaaaaaaaaaaaaagaauu

SEQ ID NO: 24276 - RNA, 1655 nt, Artificial Sequence
  mRNA product Design i-3 (hSL-A64-N5) comprising derived and/or modified sequence from LASV(LASV035-NIG-2009;Clade II)__AIT17588__GPCmut2 (opt1)
aggagaaagcuuaccaugggccagaucaucaccuucuuccaggaggugccccacgucaucgaggaggugaugaacaucgugcugaucgcccucagccugcuggccauccucaaggggaucuacaacgucgcgaccugcggccuguucgggcugguguccuuccuccugcugugcggccgcagcugcuccacgaccuacaaggggguguacgagcuccagacccuggagcuggacauggccagccucaacaugugcaugccgcuguccugcacgaagaacaacagccaccacuacaucauggucggcaacgagaccggccuggagcucacccugaccaacacguccaucaucaaccacaaguucugcaaccugagcgacgcccacaagaagaaccucuacgaccacgcccugauguccaucaucagcaccuuccaccuguccauccccaacuucaaccaguacgaggccaugagcugcgacuucaacgggggcaagaucuccgugcaguacaaccucagccacgcguacgccguggacgccgccaaccacugcgggaccaucgcgaacggcguccugcagaccuucaugcggauggccuggggcggguccuacaucgcccuggacagcggcaagggguccugggacugcaucaugacgagcuaccaguaccucaucauccagaacaccaccugggaggaccacugccaguucucccgccccagccccaucggcuaccuggggcugcucagccagcggacccgcgacaucuacaucucccggcgccgccggggcacguucaccuggacccucagcgacuccgagggcaacgagacccccgggggcuacugccugacgcgguggaugcugaucgaggccgagcucaagugcuucgggaacaccgccguggcgaagugcaacgagaagcacgacgaggaguucugcgacaugcugcgccuguucgacuucugcaagcaggccauccggcgccucaaggcccccgcccagaugagcauccagcugaucaacaaggccgugaacgcgcugaucaacgaccagcucaucaugaagaaccaccuccgggacaucaugggcauccccuacugcaacuacuccaaguacugguaccugaaccacaccgucaccgggaagacgagccugccccgcugcuggcugguguccaacggcagcuaccugaacgagacccacuucuccgacgacaucgagcagcaggccgacaacaugaucaccgagcuccugcagaaggaguacaucgaccggcagggcaagaccccgcuggggcucguggaccuguucgucuucagcacguccuucuaccugaucagcaucuuccugcaccucgugaagaucccgacccaccgccacgugaucggcaagcccugccccaagccccaccggcugaaccacauggggaucugcuccugcggccuguacaagcacccggggguccccgugaaguggaagcgcugaggacuaguuauaagacugacuagcccgaugggccucccaacgggcccuccuccccuccuugcaccgagauuaaucaaaggcucuuuucagagccaccaaaaaaaaaaaaaaaaaaaaaaaaaaaaaaaaaaaaaaaaaaaaaaaaaaaaaaaaaaaaaaaaagaauu

SEQ ID NO: 24277 - RNA, 1655 nt, Artificial Sequence
  mRNA product Design i-3 (hSL-A64-N5) comprising derived and/or modified sequence from LASV(LASV1000-NIG-2009;Clade II)__AIT17782__GPCmut2 (opt1)
aggagaaagcuuaccaugggccagaucaucaccuucuuccaggaggugccccacgucaucgaggaggugaugaacaucgugcugaucgcccucagccugcuggccauccucaaggggaucuacaacgucgcgaccugcggccuguucgggcugguguccuuccuccugcugugcggccgcagcugcuccacgaccuacaaggggguguacgagcuccagacccuggagcuggacauggccagccucaacaugugcaugccgcuguccugcacgaagaacaacagccaccacuacaucauggucggcaacgagaccggccuggagcucacccugaccaacacguccaucaucaaccacaaguucugcaaccugagcgacgcccacaagaagaaccucuacgaccacgcccugauguccaucaucagcaccuuccaccuguccauccccaacuucaaccaguacgaggccaugagcugcgacuucaacgggggcaagaucuccgugcaguacaaccucagccacaccuacgcgguggacgccgccaaccacugcgggaccaucgccaacggcguccugcagacguucaugcggauggcguggggcggguccuacaucgcccuggacagcggcaagggguccugggacugcaucaugaccagcuaccaguaccucaucauccagaacaccaccugggaggaccacugccaguucucccgccccagccccaucggcuaccuggggcugcucagccagcggacgcgcgacaucuacaucucccggcgccgccggggcaccuucaccuggacccucagcgacuccgagggcaacgagacgcccgggggcuacugccugacccgguggaugcugaucgaggccgagcucaagugcuucgggaacaccgccguggccaagugcaacgagaagcacgacgaggaguucugcgacaugcugcgccuguucgacuucugcaagcaggcgaucaagcggcucaagacccccgcccagaugagcauccagcugaucaacaaggccgugaacgcccugaucaacgaccagcucaucaugaagaaccaccuccgcgacaucaugggcauccccuacugcaacuacuccaaguacugguaccugaaccacacggucaccgggaagaccagccugccccggugcuggcugguguccaacggcagcuaccugaacgagacccacuucuccgacgacaucgagcagcaggccgacaacaugaucacggagcuccugcagaaggaguacaucgaccgccagggcaagaccccgcuggggcucguggaccuguucgucuucagcaccuccuucuaccugaucagcaucuuccugcaccucgugaagaucccgacccaccggcacguggucggcaagcccugccccaagccccaccgccugaaccacauggggaucugcuccugcggccuguacaagcacccgggggugcccgugaaguggaagcggugaggacuaguuauaagacugacuagcccgaugggccucccaacgggcccuccuccccuccuugcaccgagauuaaucaaaggcucuuuucagagccaccaaaaaaaaaaaaaaaaaaaaaaaaaaaaaaaaaaaaaaaaaaaaaaaaaaaaaaaaaaaaaaaaagaauu

SEQ ID NO: 24278 - RNA, 1655 nt, Artificial Sequence
  mRNA product Design i-3 (hSL-A64-N5) comprising derived and/or modified sequence from LASV(LASV221-NIG-2010;Clade II)__AIT17624__GPCmut2 (opt1)
aggagaaagcuuaccaugggccagaucaucaccuucuuccaggaggugccccacgucaucgaggaggugaugaacaucgugcugaucgcccucagccugcuggccauccucaaggggaucuacaacgucgcgaccugcggccuguucgggcugguguccuuccuccugcugugcggccgcagcugcuccacgaccuacaaggggguguacgagcuccagacccuggagcuggacauggccagccucaacaugugcaugccgcuguccugcacgaagaacaacagccaccacuacaucauggucggcaacgagaccggccuggagcucacccugaccaacacguccaucaucaaccacaaguucugcaaccugagcgacgcccacaagaagaaccucuacgaccacgcccugauguccaucaucagcaccuuccaccuguccauccccaacuucaaccaguacgaggccaugagcugcgacuucaacgggggcaagaucuccgugcaguacaaccucagccacaccuacgcgaucgacgccgccaaccacugcgggaccaucgccaacggcgugcugcagacguucaugcggauggcguggggcggguccuacaucgcccuggacagcggcaagggguccugggacugcaucaugaccagcuaccaguaccucaucauccagaacaccaccugggaggaccacugccaguucucccgccccagccccaucggcuaccuggggcugcucagccagcggacgcgcgacaucuacaucucccggcgccgccggggcaccuucaccuggacccucagcgacuccgagggcaacgagacgcccgggggcuacugccugacccgguggaugcugaucgaggccgagcucaagugcuucgggaacaccgccgucgccaagugcaacgagaagcacgacgaggaguucugcgacaugcugcgccuguucgacuucugcaagcaggcgauccggcgccucaagacccccgcccagaugagcauccagcugaucaacaaggccgugaacgcccugaucaacgaccagcucaucaugaagaaccaccuccgggacaucaugggcauccccuacugcaacuacuccaaguacugguaccugaaccacacggugaccgggaagaccagccugccccgcugcuggcuggucuccaacggcagcuaccugaacgagacccacuucuccgacgacaucgagcagcaggccgacaacaugaucacggagaugcuccagaaggaguacauggaccggcagggcaagaccccgcuggggcugguggaccucuucguguucagcaccuccuucuaccugaucagcaucuuccugcaccuggucaagaucccgacccaccgccacgugaucggcaagcccugccccaagccccaccggcucaaccacauggggaucugcuccugcggccuguacaagcacccgggggugcccgucaaguggaagcgcugaggacuaguuauaagacugacuagcccgaugggccucccaacgggcccuccuccccuccuugcaccgagauuaaucaaaggcucuuuucagagccaccaaaaaaaaaaaaaaaaaaaaaaaaaaaaaaaaaaaaaaaaaaaaaaaaaaaaaaaaaaaaaaaaagaauu

SEQ ID NO: 24279 - RNA, 1655 nt, Artificial Sequence
  mRNA product Design i-3 (hSL-A64-N5) comprising derived and/or modified sequence from LASV(LASV237-NIG-2010;Clade II)__AIT17638__GPCmut2 (opt1)
aggagaaagcuuaccaugggccagaucaucaccuucuuccaggaggugccccacgucaucgaggaggugaugaacaucgugcugaucgcccucagccugcuggccauccucaaggggaucuacaacgucgcgaccugcggccuguucgggcugguguccuuccuccugcugugcggccgcagcugcuccacgaccuacaaggggguguacgagcuccagacccuggagcuggacauggccagccucaacaugugcaugccgcuguccugcacgaagaacaacagccaccacuacaucauggucggcaacgagaccggccuggagcucacccugaccaacacguccaucaucaaccacaaguucugcaaccugagcgacgcccacaagaaggaccucuacgaccacgcccugauguccaucaucagcaccuuccaccuguccauccccaacuucaaccaguacgaggccaugagcugcgacuucaacgggggcaagaucuccgugcaguacaaccucagccacaccuacgcgguggacgccgccaaccacugcgggaccaucgccaacggcguccugcagacguucaugcggauggcguggggcggguccuacaucgcccuggacagcggcaagggguccugggacugcaucaugaccagcuaccaguaccucaucauccagaacaccaccugggaggaccacugccaguucucccgccccagccccaucggcuaccuggggcugcucagccagcggacgcgcgacaucuacaucucccggcgccgccggggcaccuucaccuggacccucagcgacuccgagggcaacgagacgcccgggggcuacugccugacccgguggaugcugaucgaggccgagcucaagugcuucgggaacaccgccguggccaagugcaacgagaagcacgacgaggaguucugcgacaugcugcgccuguucgacuucugcaagcaggcgauccggcgccucaagacccccgcccagaugagcauccagcugaucaacaaggccgugaacgcccugaucaacgaccagcucaucaugaagaaccaccuccgggacaucaugggcauccccuacugcaacuacuccaaguacugguaccugaaccacacggucaccgggaagaccagccugccccgcugcuggcugguguccaacggcagcuaccugaacgagacccacuucuccgacgacaucgagcagcaggccgacaacaugaucacggagcuccugcagaaggaguacauggaccggcagggcaagaccccgcuggggcucguggaccuguucgucuucagcaccuccuucuaccugaucagcaucuuccugcaccucaucaagaucccgacccaccgccacaucacgggcaagcccugccccaagccccaccggcugaaccacauggggaucugcuccugcggccuguacaagcacccgggggugcccgugaaguggaagcgcugaggacuaguuauaagacugacuagcccgaugggccucccaacgggcccuccuccccuccuugcaccgagauuaaucaaaggcucuuuucagagccaccaaaaaaaaaaaaaaaaaaaaaaaaaaaaaaaaaaaaaaaaaaaaaaaaaaaaaaaaaaaaaaaaagaauu

SEQ ID NO: 24280 - RNA, 1655 nt, Artificial Sequence
  mRNA product Design i-3 (hSL-A64-N5) comprising derived and/or modified sequence from LASV(LASV253-NIG-2011;Clade II)__AIT17670__GPCmut2 (opt1)
aggagaaagcuuaccaugggccagaucaucaccuucuuccaggaggugccccacgucaucgaggaggugaugaacaucgugcugaucgcccucagccugcuggccauccucaaggggaucuacaacgucgcgaccugcggccuguucgggcugguguccuuccuccugcugugcggccgcagcugcuccacgaccuacaaggggguguacgagcuccagacccuggagcuggacauggccagccucaacaugugcaugccgcuguccugcacgaagaacaacagccaccacuacaucauggucggcaacgagaccggccuggagcucacccugaccaacacguccaucaucaaccacaaguucugcaaccugagcgacgcccacaagaagaaccucuacgaccacgcccugauguccaucaucagcaccuuccaccuguccauccccaacuucaaccaguacgaggccaugagcugcgacuucaacgggggcaagaucuccgugcaguacaaccucagccacaccuacgcgguggacgccgccaaccacugcgggaccaucgccaacggcguccugcagacguucaugcggauggcguggggcggguccuacaucgcccuggacagcggcaagggguccugggacugcaucaugaccagcuaccaguaccucaucauccagaacaccaccugggaggaccacugccaguucucccgccccagccccaucggcuaccuggggcugcucagccagcggacgcgcgacaucuacaucucccggcgccgccggggcaccuucaccuggacccucagcgacuccgagggcaacgagacgcccgggggcuacugccugacccgguggaugcugaucgaggccgagcucaagugcuucgggaacaccgccguggccaagugcaacgagaagcacgacgaggaguucugcgacaugcugcgccuguucgacuucugcaagcaggcgauccggcgccucaaggcccccgcccagaugagcauccagcugaucaacaaggccgugaacgcccugaucaacgaccagcucaucaugaagaaccaccuccgggacaucaugggcaucccguacugcaacuacuccaaguacugguaccugaaccacaccgucacggggcgcaccagccugccccggugcuggcugguguccaacggcagcuaccugaacgagacccacuucuccgacgacaucgagcagcaggcggacaacaugaucaccgagcuccugcagaaggaguacaucgaccgccagggcaagacgccccuggggcucguggaccuguucgucuucagcaccuccuucuaccugaucagcaucuuccugcaccucgugaagaucccgacccaccggcacaucaucggcaagcccugccccaagccccaccgccugaaccacauggggaucugcuccugcggccuguacaagcacccgggggugcccgucaaguggaagcggugaggacuaguuauaagacugacuagcccgaugggccucccaacgggcccuccuccccuccuugcaccgagauuaaucaaaggcucuuuucagagccaccaaaaaaaaaaaaaaaaaaaaaaaaaaaaaaaaaaaaaaaaaaaaaaaaaaaaaaaaaaaaaaaaagaauu

SEQ ID NO: 24281 - RNA, 1655 nt, Artificial Sequence
  mRNA product Design i-3 (hSL-A64-N5) comprising derived and/or modified sequence from LASV(LASV254-NIG-2011;Clade II)__AIT17674__GPCmut2 (opt1)
aggagaaagcuuaccaugggccagaucaucaccuucuuccaggaggugccccacgucaucgaggaggugaugaacaucgugcugaucgcccucagccugcuggccauccucaaggggaucuacaacgucgcgaccugcggccuguucgggcugguguccuuccuccugcugugcggccgcagcugcuccacgaccuacaaggggguguacgagcuccagacccuggagcuggacaugaccaaccucaacaugugcaugccgcugagcugcaccaagaacaacucccaccacuacaucauggucggcaacgagaccggccuggagcucacccugacgaacaccagcaucaucaaccacaaguucugcaaccuguccgacgcccacaagaagaaccucuacaaccacgcccugaugagcaucaucuccaccuuccaccugagcauccccaacuucaaccaguacgaggccauguccugcgacuucaacgggggcaagaucagcgugcaguacaaccucucccacagcuacgccguggacgcggccaaccacugcgggaccaucgccaacggcguccugcagacguucaugcggauggccuggggcggguccuacaucgcgcuggacagcggcaaggggaacugggacugcaucaugaccuccuaccaguaccucaucauccagaacaccaccugggaggaccacugccaguucagccgccccucccccaucggcuaccuggggcugcucagccagcggacgcgcgacaucuacaucagccggcgccgccggggcaccuucaccuggacccucuccgacagcgagggcaacgagacgcccgggggcuacugccugacccgguggaugcugaucgaggccgagcucaagugcuucgggaacaccgccguggccaagugcaacgagaagcacgacgaggaguucugcgacaugcugcgccuguucgacuucugcaagcaggccauccggcgccucaagacccccgcgcaggccaacauccagcugaucaacaaggccgugaacgcccugaucaacgaccagcucaucaugaagaaccaccuccgggacaucaugggcauccccuacugcaacuacuccaaguacugguaccugaaccacacggucaccgggaagaccagccugccccgcugcuggcugguguccaacggcagcuaccugaacgagacccacuucuccgacgacaucgagcagcaggccgacaacaugaucacggagcuccugcagaaggaguacauggaccggcagggcaagaccccgcuggggcucguggaccuguucgucuucagcaccuccuucuaccugaucagcaucuuccugcaccucgugaagaucccgacccaccgccacgugaucggcaagcccugccccaagccccaccggcugaaccacauggggaucugcuccugcggccuguacaagcacccggggguccccgugaaguggaagcgcugaggacuaguuauaagacugacuagcccgaugggccucccaacgggcccuccuccccuccuugcaccgagauuaaucaaaggcucuuuucagagccaccaaaaaaaaaaaaaaaaaaaaaaaaaaaaaaaaaaaaaaaaaaaaaaaaaaaaaaaaaaaaaaaaagaauu

SEQ ID NO: 24282 - RNA, 1655 nt, Artificial Sequence
  mRNA product Design i-3 (hSL-A64-N5) comprising derived and/or modified sequence from LASV(Nig08-A19;Clade III)__ADU56618__GPCmut2 (opt1)
aggagaaagcuuaccaugggccagaucgugaccuucuuccaggaggucccccacgugaucgaggaggugaugaacaucguccugaucgcccucagcauccuggccauccugaaggggcucuacaacaucgcgaccugcggccugaucgggcuggugacguuccuccugcuguccggccgcagcugcuccaugaccuacaaggggguguacgagcuccagacccuggagcugaacaugaacacccucaacaugugcaugccgcugagcugcaccaagaacaacucccaccacuacaucauggucggcaacgagaccggccuggagcucacccugacgaacaccagccugcuccaccacaaguucugcaaccuguccgacgcccacaagaagaaccuguacgaccacacccucaugagcaucaucuccaccuuccaccugagcauccccaacuucaaccaguacgaggccauguccugcgacuucaacgggggcaagaucacggugcaguacaaccugagccacuccuacgccaucgacgccgcgaaccacugcgggaccguggccaacggcguccuccagaccuucaugcggauggccuggggcgggagcuacaucgcccuggacuccggccgcgggaagugggacugcaucaugaccagcuaccaguaccugaucauccagaacacgaccugggaggaccacugccaguucucccggcccagccccaucggcuaccucgggcugcugucccagcgcacccgggacaucuacaucagccgccggcgccggggcaccuucacguggacccugagcgacuccgagggcaacgagacccccgggggcuacugccucacccgcuggaugcugaucgaggcggagcugaagugcuucgggaacacggccguggccaagugcaacgagaagcacgacgaggaguucugcgacaugcuccggcuguucgacuucugcaagcaggccauccgccggcugaaggcccccgcgcagaugagcauccagcucaucaacaaggccgugaacgcccugaucaacgaccagcugaucaugaagaaccaccuccgcgacaucaugggcauccccuacugcaacuacuccaaguacugguaccugaaccacaccagcaccgggcggaccucccugccccgcugcuggcucgucagcaacggcuccuaccugaacgagacgcacuucagcgacgacaucgagcagcaggccgacaacaugaucaccgagaugcugcagaaggaguaccucgaccggcagggcaagaccccgcuggggcugguggaccuguucguguucuccaccagcuucuaccucaucuccaucuuccugcaccuggucaagaucccgacgcaccgccacaucgugggcaagcccugccccaagccccaccggcucaaccacauggggaucugcagcugcggccuguacaagcagccgggggugcccguccgcuggaagcggugaggacuaguuauaagacugacuagcccgaugggccucccaacgggcccuccuccccuccuugcaccgagauuaaucaaaggcucuuuucagagccaccaaaaaaaaaaaaaaaaaaaaaaaaaaaaaaaaaaaaaaaaaaaaaaaaaaaaaaaaaaaaaaaaagaauu

SEQ ID NO: 24283 - RNA, 1658 nt, Artificial Sequence
  mRNA product Design i-3 (hSL-A64-N5) comprising derived and/or modified sequence from LASV(G1180-SLE-2010;Clade IV)__AIT17168__GPCmut2 (opt1)
aggagaaagcuuaccaugggccagaucgugaccuucuuccaggaggucccccacgugaucgaggaggugaugaacaucguccugaucgcccucagcauccuggccgugcugaaggggcucuacaacuucgcgaccugcggccugguggggcugcucaccuuccugcugcucugcggccgcuccugcaccgccagccgguacaagggggucuacgagcugcagacccuggagcucaacauggagacccugaacaugugcaugccgcuguccugcaccaagaacaacagccaccacuacaucauggugggcaacgagaccggccucgagcugacccugacgaacaccuccaucaucaaccacaaguucugcaaccucagcgacgcccacaagaagaaccuguacgaccacgcccugauguccaucaucagcaccuuccaccucuccauccccaacuucaaccaguacgaggccaugagcugcgacuucaacgggggcaagaucuccgugcaguacaaccugagccacuccuacgcgggggacgccgccaaccacugcggcaccgucgccaacggggugcugcagacguucaugcgcauggcguggggcggcagcuacaucgcccucgacuccgggcacggcagcugggacugcaucaugaccuccuaccaguaccugaucauccagaacaccaccugggaggaccacugccaguucagccggcccucccccaucggguaccugggccuccugagccagcgcacgcgggacaucuacaucagccgccggcgccggggcaccuucaccuggacccuguccgacagcgaggggaaggacacgccgggcggguacugccugacccgcuggaugcucaucgaggccgagcugaagugcuucggcaacaccgccguggccaagugcaacgagaagcacgacgaggaguucugcgacaugcugcggcuguucgacuucugcaagcaggcgauccagcgccugaaggcccccgcccagauguccauccagcugaucaacaaggccgucaacgcccucaucaacgaccagcugaucaugaagaaccaccuccgggacaucauggggauccccuacugcaacuacagcaaguacugguaccucaaccacaccacgaccggcaagaccucccugcccaagugcuggcuggugagcaacggcuccuaccucaacgagacccacuucagcgacgacaucgagcagcaggcggacaacaugaucacggagaugcugcagaaggaguacauggagcgccaggggaagacgccccugggccucguggaccuguucgucuucuccaccagcuucuaccugaucuccaucuuccugcaccucgugaagaucccgacccaccggcacaucgugggcaagagcugccccaagccccaccgccugaaccacauggggaucugcuccugcgggcuguacaagcagcccggcgucccggugaaguggaagcggugaggacuaguuauaagacugacuagcccgaugggccucccaacgggcccuccuccccuccuugcaccgagauuaaucaaaggcucuuuucagagccaccaaaaaaaaaaaaaaaaaaaaaaaaaaaaaaaaaaaaaaaaaaaaaaaaaaaaaaaaaaaaaaaaagaauu

SEQ ID NO: 24284 - RNA, 1658 nt, Artificial Sequence
  mRNA product Design i-3 (hSL-A64-N5) comprising derived and/or modified sequence from LASV(G1442-SLE-2011;Clade IV)__AIT17180__GPCmut2 (opt1)
aggagaaagcuuaccaugggccagaucgugaccuucuuccaggaggucccccacgugaucgaggaggugaugaacaucguccugaucgcccucagcauccuggccgugcugaaggggcucuacaacguggcgaccugcggccugaucgggcuggucacguuccuccugcugugcggccgcuccugcaccaccacccucuacaaggggguguacgagcugcagacgcuggagcucaacauggagacccugaacaugugcaugccgcugagcugcaccaagaacaacucccaccacuacauccgggugggcaacgagacgggccucgagcugacccugaccaacaccagcaucaucaaccacaaguucugcaaccucuccgacgcccacaagaagaaccuguacgaccacgcccugaugagcaucaucuccacguuccaccucagcauccccaacuucaaccaguacgaggccauguccugcgacuucaacgggggcaagaucagcguccaguacaaccugucccacagcuacgccggggacgcggccaaccacugcggcaccguggccaacggggugcugcagaccuucaugcgcauggccuggggcggcuccuacaucgcgcucgacagcgggcggggcaacugggacugcaucaugaccuccuaccaguaccugaucauccagaacacgaccugggacgaccacugccaguucagccgccccucccccaucggguaccugggccuccugagccagcggacccgcgacgucuacaucucccggcgccgccggggcaccuucacguggacccugagcgacagcgaggggaaggacaccccgggcggguacugccugacccgguggaugcucaucgaggccgagcugaagugcuucggcaacacggccguggccaagugcaacgagaagcacgacgaggaguucugcgacaugcugcgccucuucgacuucugcaagcaggccauccagcggcugaaggcgcccgcccagauguccauccagcugaucaacaaggccgugaacgcccucaucaacgaccagcugaucaugaagaaccaccuccgcgacaucauggggauccccuacugcaacuacagcaaguacugguaccugaacaacaccgccaccggcaagaccucccugcccaagugcuggcugaucagcaacggcuccuaccucaacgagacgcacuucagcgacgacaucgagcaggaggcggacaacaugaucaccgagaugcugcagaaggaguacauggagcggcaggggaagacgccccugggccucgucgaccuguucguguucuccaccagcuucuaccugaucuccaucuuccugcaccucgugaagaucccgacccaccgccacaucgucggcaagagcugccccaagccccaccggcugaaccacauggggaucugcuccugcgggcuguacaagcagcccggcgugccggugcgcuggaagcggugaggacuaguuauaagacugacuagcccgaugggccucccaacgggcccuccuccccuccuugcaccgagauuaaucaaaggcucuuuucagagccaccaaaaaaaaaaaaaaaaaaaaaaaaaaaaaaaaaaaaaaaaaaaaaaaaaaaaaaaaaaaaaaaaagaauu

SEQ ID NO: 24285 - RNA, 1658 nt, Artificial Sequence
  mRNA product Design i-3 (hSL-A64-N5) comprising derived and/or modified sequence from LASV(G3010-SLE-2013;Clade IV)__AIT17344__GPCmut2 (opt1)
aggagaaagcuuaccaugggccagaucgugaccuucuuccaggaggucccccacgugaucgaggaggugaugaacaucguccugaucgcccucagcauccuggccgugcugaaggggcucuacaacuucgcgaccugcggccugguggggcuggucacguuccuccugcugugcggccgcuccugcaccaccagccucuacaaggggguguacgagcugcagacccuggagcucaacauggagacgcugaacaugugcaugccgcuguccugcaccaagaacaacagccaccacuacaucauggugggcaacgagaccggccucgagcugacgcugaccaacaccuccaucaucaaccacaaguucugcaaccucagcgacgcccacaagaagaaccuguacaaccacgcccugauguccaucaucagcaccuuccaccucuccauccccaacuucaaccaguacgaggccaugagcugcgacuucaacgggggcaagaucuccguccaguacaaccugagccacuccuacgccggggacgcggccagccacugcggcacgguggccaacggggugcugcagaccuucaugcggauggccuggggcggcuccuacaucgcgcucgacagcggguacggcaagugggacugcaucaugaccuccuaccaguaccugaucauccagaacaccacgugggaggaccacugccaguucagccgccccucccccaucggguaccugggccuccugagccagcggacccgcgacaucuacaucagccggcgccgccggggcaccuucaccuggacgcuguccgacagcgaggggaaggacaccccgggcggguacugccugacccgguggaugcucaucgaggccgagcugaagugcuucggcaacaccgccgucgccaagugcaacgagaagcacgacgaggaguucugcgacaugcugcgccucuucgacuucugcaagcaggccauccagcggcugaagacgcccgcgcagauguccauccagcugaucaacaaggccgugaacgcccucaucaacgaccagcugaucaugaagaaccaccuccgcgacaucauggggauccccuacugcaacuacagcaaguacugguaccugaaccacaccaccaccggcaagacgucccugcccaagugcuggcuggugagcaacggcuccuaccucaacgagacccacuucagcgacgacaucgagcagcaggccgacaacaugaucaccgagaugcugcagaaggaguacauggagcggcaggggaagacgccccugggccucgucgaccuguucguguucuccaccagcuucuaccugaucuccaucuuccugcaccucgugaagaucccgacccaccgccacaucgucggcaagagcugccccaagccccaccggcugaaccacauggggaucugcuccugcgggcuguacaagcagcccggcgugccggugcgcuggaagcggugaggacuaguuauaagacugacuagcccgaugggccucccaacgggcccuccuccccuccuugcaccgagauuaaucaaaggcucuuuucagagccaccaaaaaaaaaaaaaaaaaaaaaaaaaaaaaaaaaaaaaaaaaaaaaaaaaaaaaaaaaaaaaaaaagaauu

SEQ ID NO: 24286 - RNA, 1658 nt, Artificial Sequence
  mRNA product Design i-3 (hSL-A64-N5) comprising derived and/or modified sequence from LASV(G502-SLE-2009;Clade IV)__AIT17126__GPCmut2 (opt1)
aggagaaagcuuaccaugggccagaucgugaccuucuuccaggaggucccccacgugaucgaggaggugaugaacaucguccugaucgcccucagcauccuggccgugcugaaggggcucuacaacuucgcgaccugcggccugguggggcugcucacguuccugcugcucugcggccgcuccugcaccaccgggcuguacaagggcgucuacgagcugcagacccucgagcugaacauggagacgcugaacaugugcaugccgcucagcugcaccaagaacaacucccaccacuacaucauggugggcaacgagaccgggcuggagcugacgcucaccaacaccagcaucaucaaccacaaguucugcaaccuguccgacgcccacaagaagaaccuguacgaccacgcccucaugagcaucaucuccaccuuccaccugagcauccccaacuucaaccaguacgaggccauguccugcgacuucaacggcgggaagaucagcgugcaguacaaccugucccacagcuacgccggcgacgcggccgaccacugcgggacggucgccaacggcgugcuccagaccuucaugcggauggccuggggcggguccuacaucgcgcuggacagcggccgcgggcggugggacugcaucaugaccuccuaccaguaccugaucauccagaacaccacgugggaggaccacugccaguucagccgccccucccccaucggcuaccucggccugcugagccagcggacccgcgacaucuacaucucccggcgccgccgggggaccuucaccuggacgcugagcgacagcgagggcaaggacacccccgggggcuacugccucacccgguggaugcugaucgaggccgagcugaagugcuucgggaacaccgccguggccaagugcaacgagaagcacgacgaggaguucugcgacaugcuccgccuguucgacuucugcaagcaggccauccagcggcugaaggcgcccgcccagauguccauccagcucaucaacaaggccgucaacgcccugaucaacgaccagcuggugaugaagaaccaccuccgcgacaucaugggcauccccuacugcaacuacagccgguacugguaccugaaccacacgaccaccggccgcaccucccugcccaagugcuggcucgugagcaacggguccuaccugaacgagacgcacuucagcgacgacaucgagcagcaggccgacaacaugaucaccgagaugcugcagaaggaguacauggagcggcagggcaagaccccgcucgggcuggucgaccuguucguguucuccaccagcuucuaccugaucuccaucuuccuccaccuggugaagaucccgacgcaccgccacaucgucggcaagagcugccccaagccccaccggcugaaccacauggggaucugcuccugcggccucuacaagcagcccggcgugccggugaaguggaagcgcugaggacuaguuauaagacugacuagcccgaugggccucccaacgggcccuccuccccuccuugcaccgagauuaaucaaaggcucuuuucagagccaccaaaaaaaaaaaaaaaaaaaaaaaaaaaaaaaaaaaaaaaaaaaaaaaaaaaaaaaaaaaaaaaaagaauu

SEQ ID NO: 24287 - RNA, 1658 nt, Artificial Sequence
  mRNA product Design i-3 (hSL-A64-N5) comprising derived and/or modified sequence from LASV(G733-SLE-2010;Clade IV)__AIT17154__GPCmut2 (opt1)
aggagaaagcuuaccaugggccagaucgugaccuucuuccaggaggucccccacgugaucgaggaggugaugaacaucguccugaucgcccucagcauccuggccgugcugaaggggcucuacaacuucgcgaccugcggcaucguggggcuggucuccuuccugcuccugugcggccgcagcugcacgaccucccuguacaaggggguguacgagcuccagacccuggagcugaacauggagacccucaacaugugcaugccgcugagcugcaccaagaacaacucccaccacuacaucauggugggcaacgagaccggccuggagcucacccugacgaacaccagcaucaucaaccacaaguucugcaaccuguccgacgcccacaagaagaaccucuacgaccacgcccugaugagcaucaucuccaccuuccaccugagcauccccaacuucaaccaguacgaggccauguccugcgacuucaacgggggcaagaucagcguccaguacaaccucucccacagcuacgccggggacgcggccaaccacugcggcaccaucgccaacggggugcugcagacguucaugcggauggccuggggcggcuccuacaucgcgcuggacagcgggcgcgaccggugggacugcaucaugaccuccuaccaguaccucaucauccagaacaccaccugggaggaccacugccaguucagccgccccucccccaucggcuaccuggggcugcucagccagcggacgcgcgacaucuacaucagccggcgccgccggggcaccuucaccuggacccucuccgacagcgagggcaaggacacgcccgggggcuacugccugacccgguggaugcugaucgaggccgagcucaagugcuucgggaacaccgccguggccaagugcaacgagaagcacgacgaggaguucugcgacaugcugcgccuguucgacuucugcaagcaggccauccagcggcucaaggcgcccgcccagauguccauccagcugaucaacaaggccgucaacgcccugaucaacgaccagcucaucaugaagaaccaccuccgcgacaucaugggcauccccuacugcaacuacagcaaguacugguaccugaaccacaccacgaccgggaagaccucccugcccaagugcuggcuggugagcaacggcuccuaccugaacgagacccacuucagcgacgacaucgagcagcaggccgacaacaugaucacggagaugcuccagaaggaguacauggagcggcagggcaagaccccgcuggggcugguggaccucuucgucuucuccaccagcuucuaccugaucuccaucuuccugcaccuggugaagaucccgacccaccgccacguggucggcaagagcugccccaagccccaccggcucaaccacauggggaucugcuccugcggccuguacgggcagcccggcgugccggugaaguggaagcgcugaggacuaguuauaagacugacuagcccgaugggccucccaacgggcccuccuccccuccuugcaccgagauuaaucaaaggcucuuuucagagccaccaaaaaaaaaaaaaaaaaaaaaaaaaaaaaaaaaaaaaaaaaaaaaaaaaaaaaaaaaaaaaaaaagaauu

SEQ ID NO: 24288 - RNA, 1658 nt, Artificial Sequence
  mRNA product Design i-3 (hSL-A64-N5) comprising derived and/or modified sequence from MOPV/LASV reassortant(IGS-1;Clade IV)__AFY05576__GPCmut2 (opt1)
aggagaaagcuuaccaugggccagaucgugaccuucuuccaggaggucccccacgugaucgaggaggugaugaacaucguccugaucgcccucagcgugcuggccgugcugaaggggcucuacaacuucgcgaccugcggccuggucgggcuggugacguuccuccugcugugcggccgcuccugcaccaccagccucuacaaggggguguacgagcugcagacccuggagcucaacauggagacgcugaacaugugcaugccgcuguccugcaccaagaacaacagccaccacuacaucauggucggcaacgagaccggccucgagcugacgcugaccaacaccuccaucaucaaccacaaguucugcaaccucagcgacgcccacaagaagaaccuguacgaccacgcccugauguccaucaucagcaccuuccaccucuccauccccaacuucaaccaguacgaggccaugagcugcgacuucaacgggggcaagaucuccgugcaguacaaccugagccacuccuacgccggggacgcggccaaccacugcggcacgguggccaacgggguccugcagaccuucaugcggauggccuggggcggcagcuacaucgcgcucgacuccgggcgcggcaacugggacugcaucaugaccagcuaccaguaccugaucauccagaacaccacgugggaggaccacugccaguucucccggcccagccccaucggguaccugggccuccugucccagcgcacccgggacaucuacaucagccgccggcgccggggcaccuucaccuggacgcugagcgacuccgagggggaggacaccccgggcggguacugccugacccgcuggaugcucaucgaggccgagcugaagugcuucggcaacaccgccguggccaagugcaacgagaagcacgacgaggaguucugcgacaugcugcggcuguucgacuucugcaagcaggccauccagcgccugaaggcgcccgcccagaugagcauccagcugaucaacaaggccgugaacgcccucaucaacgaccagcugaucaugaagaaccaccuccgggacaucauggggauccccuacugcaacuacuccaaguacugguaccucaaccacacgaccaccggccgcaccagccugcccaagugcuggcuggucuccaacggcagcuaccucaacgagacgcacuucuccgacgacaucgagcagcaggccgacaacaugaucaccgagaugcugcagaaggaguacauggagcggcaggggaagacgccccugggccucguggaccuguucguguucagcaccuccuucuaccugaucagcaucuuccugcaccucgucaagaucccgacccaccgccacaucguggggaaguccugccccaagccccaccggcugaaccacaugggcaucugcagcugcgggcuguacaagcagcccggcgugccggucaaguggaagcgcugaggacuaguuauaagacugacuagcccgaugggccucccaacgggcccuccuccccuccuugcaccgagauuaaucaaaggcucuuuucagagccaccaaaaaaaaaaaaaaaaaaaaaaaaaaaaaaaaaaaaaaaaaaaaaaaaaaaaaaaaaaaaaaaaagaauu

SEQ ID NO: 24289 - RNA, 1658 nt, Artificial Sequence
  mRNA product Design i-3 (hSL-A64-N5) comprising derived and/or modified sequence from LASV(LM765-SLE-2012;Clade IV)__AIT17814__GPCmut2 (opt1)
aggagaaagcuuaccaugggccagaucgugaccuucuuccaggaggucccccacgugaucgaggaggugaugaacaucguccugaucgcccucagcauccuggccgugcugaaggggcucuacaacuucgcgaccugcggccugguggggcuggucacguuccuccugcugugcggccgcuccugcaccaccagccucuacaaggggguguacgagcugcagacccuggagcucaacauggagacgcugaacaugugcaugccgcuguccugcaccaagaacaacagccaccacuacaucauggugggcaacgagaccggccucgagcugacgcugaccaacaccuccaucaucgaccacaaguucugcaaccucagcgacgcccaccggaagaaccuguacgaccacgcccugauguccaucaucagcaccuuccaccucuccauccccaacuucaaccaguacgaggccaugagcugcgacuucaacgggggcaagaucuccguccaguacaaccugagccacuccuacgccaaggacgcggccgaccacugcgggacgguggccaacggcgugcugcagaccuucaugcgcauggccuggggcgggagcuacaucgcgcucgacuccggccgggggcgcugggacugcaucaugaccagcuaccaguaccugaucauccagaacaccacgugggaggaccacugccaguucucccggcccagccccaucggcuaccuggggcuccugucccagcgcacccgggacaucuacaucagccgccggcgccggggcaccuucaccuggacgcugagcgacuccgagggcaaggacacccccgggggcuacugccugacccgcuggaugcucaucgaggccgagcugaagugcuucgggaacaccgccgucgccaagugcaacgagaagcacgacgaggaguucugcgacaugcugcggcuguucgacuucugcaagcaggccauccagcgccugaaggcgcccgcccagaugagcauccagcugaucaacaaggccgugaacgcccucaucaacgaccagcugaucaugaagaaccaccuccgggacaucaugggcauccccuacugcaacuacuccaaguacugguaccucaaccacacgaccaccgggaagaccagccugcccaagugcuggcugguguccaacggcagcuaccucaacgagacgcacuucuccgacgacaucgagcagcaggccgacaacaugaucaccgagaugcugcagaaggaguacauggagcgccagggcaagaccccgcuggggcucgucgaccuguucguguucagcaccuccuucuaccugaucagcaucuuccugcaccucgugaagaucccgacgcaccggcacaucgucggcaagcccugccccaagccccaccgccugaaccacauggggaucugcuccugcggccuguacaagcagccgggggugcccgugaaguggaagcggugaggacuaguuauaagacugacuagcccgaugggccucccaacgggcccuccuccccuccuugcaccgagauuaaucaaaggcucuuuucagagccaccaaaaaaaaaaaaaaaaaaaaaaaaaaaaaaaaaaaaaaaaaaaaaaaaaaaaaaaaaaaaaaaaagaauu

SEQ ID NO: 24290 - RNA, 1658 nt, Artificial Sequence
  mRNA product Design i-3 (hSL-A64-N5) comprising derived and/or modified sequence from LASV(LM776-SLE-2012;Clade IV)__AIT17824__GPCmut2 (opt1)
aggagaaagcuuaccaugggccagaucgugaccuucuuccaggaggucccccacgugaucgaggaggugaugaacaucguccugaucgcccucagcauccuggccgugcugaaggggcucuacaacuucgcgaccugcggccugguggggcuggucacguuccuccugcugugcggccgcuccugcaccaccagcguguacaaggggguguacgagcuccagacccuggagcugaacauggagacgcucaacaugugcaugccgcuguccugcaccaagaacaacagccaccacuacaucauggucggcaacgagaccggccuggagcucacgcugaccaacaccuccaucaucaaccacaaguucugcaaccugagcgacgcccacaagaagaaccucuacgaccacgcccugauguccaucaucagcaccuuccaccuguccauccccaacuucaaccaguacgaggccaugagcugcgacuucaacgggggcaagaucuccgugcaguacaaccucagccacuccuacgccggggacgcggccaaccacugcggcacgguggccaacgggguccugcagaccuucaugcggauggccuggggcggcagcuacaucgcgcuggacuccgggcacggcaagugggacugcaucaugaccagcuaccaguaccucaucauccagaacaccacgugggaggaccacugccaguucucccgccccagccccaucggguaccugggccugcucucccagcggacccgcgacaucuacaucagccggcgccgccggggcaccuucaccuggacgcucagcgacuccgaggggaaggacaccccgggcggguacugccugacccgguggaugcugaucgaggccgagcucaagugcuucggcaacaccgccguggccaagugcaacgagaagcacgacgaggaguucugcgacaugcugcgccuguucgacuucugcaagcaggccauccagcggcucaaggcgcccgcccagaugagcauccagcugaucaacaaggccgugaacgcccugaucaacgaccagcucaucaugaagaaccaccuccgcgacaucauggggauccccuacugcaacuacuccaaguacugguaccugaaccacacgaccaccggcaagaccagccugcccaagugcuggcuggucuccaacggcagcuaccugaacgagacgcacuucuccgacgacaucgagcagcaggccgacaacaugaucaccgagaugcuccagaaggaguacauggagcggcaggggaagacgccccugggccugguggaccucuucguguucagcaccuccuucuaccugaucagcaucuuccugcaccuggucaagaucccgacccaccgccacaucguggggaaguccugccccaagccccaccggcucaaccacaugggcaucugcagcugcgggcuguacaagcagcccggcgugccgguccgcuggaagcggugaggacuaguuauaagacugacuagcccgaugggccucccaacgggcccuccuccccuccuugcaccgagauuaaucaaaggcucuuuucagagccaccaaaaaaaaaaaaaaaaaaaaaaaaaaaaaaaaaaaaaaaaaaaaaaaaaaaaaaaaaaaaaaaaagaauu

SEQ ID NO: 24291 - RNA, 1658 nt, Artificial Sequence
  mRNA product Design i-3 (hSL-A64-N5) comprising derived and/or modified sequence from LASV(Mad39;Clade IV)__ANH09722__GPCmut2 (opt1)
aggagaaagcuuaccaugggccagaucgugaccuucuuccaggaggucccccacgugaucgaggaggugaugaacaucguccugaucgcccucagcauccuggccgugcugaaggggcucuacaacguggcgaccugcggccugaucgggcuggucacguuccuccugcugugcggccgcuccugcaccaccacccucuacaaggggguguacgagcugcaggcccuggagcucaacauggagacgcugaacaugugcaugccgcugagcugcaccaagaacaacucccaccacuacauccgggugggcaacgagaccggccucgagcugacgcugaccaacaccagccucaucaaccacaaguucugcaaccuguccgacgcccacaagaagaaccuguacgaccacgcccucaugagcaucaucuccaccuuccaccugagcauccccaacuucaaccaguacgaggccauguccugcgacuucaacgacgggaagaucagcguccaguacaaccugucccacacguacgcgggcgacaccgccaaccacugcgggaccguggccaacggcgugcuccagaccuucaugcgcauggccuggggcgggagcuacaucgcgcuggacuccggccgcgggggcugggacugcaucaugacgagcuaccaguaccugaucauccagaacaccaccugggaggaccacugccaguucucccggcccagccccaucggguaccucggccugcugucccagcggacccgcgacaucuacaucagccggcgccgccggggcacguucaccuggacccuguccgacagcgaggggaaggacaccccgggcggguacugccucacgcgguggaugcugaucgaggccgagcugaagugcuucggcaacaccgccgucgccaagugcaacgagaagcacgacgaggaguucugcgacaugcuccgccuguucgacuucugcaagcaggccauccagcggcugaaggcgcccgcccagaugagcauccagcucaucaacaaggccgugaacgcccugaucaacgaccagcugaucaugaagaaccaccuccgcgacaucauggggauccccuacugcaacuacuccaaguacugguaccugaaccacaccgugaccggcaagacgagccugcccaagugcuggcucgucuccaacggcagcuaccugaacgagacccacuucuccgacgacaucgagcagcaggccgacaacaugaucaccgagaugcugcagaaggaguacauggagcggcaggggaagacgccccucggccugguggaccuguucguguucagcaccuccuucuaccugaucagcaucuuccuccaccuggucaagaucccgacccaccgccacgugguggggaagcccugccccaagccccaccggcugaaccacaugggcaucugcuccugcggguucuacaagcagccgggcguccccgugcgcuggaagcggugaggacuaguuauaagacugacuagcccgaugggccucccaacgggcccuccuccccuccuugcaccgagauuaaucaaaggcucuuuucagagccaccaaaaaaaaaaaaaaaaaaaaaaaaaaaaaaaaaaaaaaaaaaaaaaaaaaaaaaaaaaaaaaaaagaauu

SEQ ID NO: 24292 - RNA, 1658 nt, Artificial Sequence
  mRNA product Design i-3 (hSL-A64-N5) comprising derived and/or modified sequence from LASV(Z0947-SLE-2011;Clade IV)__AIT17840__GPCmut2 (opt1)
aggagaaagcuuaccaugggccagaucgugaccuucuuccaggaggucccccacgugaucgaggaggugaugaacaucguccugaucgcccucagcauccuggccgugcugaaggggcucuacaacuucgcgaccugcggccugguggggcuggucacguuccuccugcugugcggccgcuccugcaccaucagccucuacaaggggguguacgagcugcagacccuggagcucaacauggagacccugaacaugugcaugccgcuguccugcaccaagaacaacagccaccacuacaucauggugggcaacgagaccggccucgagcugacccugacgaacaccuccaucaucaaccacaaguucugcaaccucagcgacgcccacaagaagaaccuguacgaccacgcccugauguccaucaucagcaccuuccaccucuccauccccaacuucaaccaguacgaggccaugagcugcgacuucaacgggggcaagaucuccguccaguacaaccugagccacuccuacgccggggacgcggccaaccacugcggcaccguggccaacggggugcugcagacguucaugcggauggccuggggcggcagcuacaucgcgcucgacuccgggcgcgaccggugggacugcaucaugaccagcuaccaguaccugaucauccagaacaccaccugggaggaccacugccaguucucccgccccagccccaucggcuaccuggggcuccugucccagcggacgcgcgacaucuacaucagccggcgccgccggggcaccuucaccuggacccugagcgacuccgagggcaaggacacgcccgggggcuacugccugacccgguggaugcucaucgaggccgagcugaagugcuucgggaacaccgccgucgccaagugcaacgagaagcacgacgaggaguucugcgacaugcugcgccucuucgacuucugcaagcaggccauccagcggcugaaggcgcccgcccagaugagcauccagcugaucaacaaggccgugaacgcccucaucaacgaccagcugaucaugaagaaccaccuccgcgacaucaugggcauccccuacugcaacuacuccaaguacugguaccugaaccacaccacgaccgggaagaccagccugcccaagugcuggcugguguccaacggcagcuaccucaacgagacccacuucuccgacgacaucgagcagcaggccgacaacaugaucacggagaugcugcagaaggaguacauggagcggcagggcaagaccccgcuggggcucgucgaccuguucguguucagcaccuccuucuaccugaucagcaucuuccugcaccucgugaagaucccgacccaccgccacaucgucggcaagcccugccccaagccccaccggcugaaccacauggggaucugcuccugcggccuguacaagcagccgggggugcccgugaaguggaagcgcugaggacuaguuauaagacugacuagcccgaugggccucccaacgggcccuccuccccuccuugcaccgagauuaaucaaaggcucuuuucagagccaccaaaaaaaaaaaaaaaaaaaaaaaaaaaaaaaaaaaaaaaaaaaaaaaaaaaaaaaaaaaaaaaaagaauu

SEQ ID NO: 24293 - RNA, 1658 nt, Artificial Sequence
  mRNA product Design i-3 (hSL-A64-N5) comprising derived and/or modified sequence from LASV(Josiah;Clade IV)__NP_694870__GPCmut2 (opt1)
aggagaaagcuuaccaugggccagaucgugaccuucuuccaggaggucccccacgugaucgaggaggugaugaacaucguccugaucgcccucagcgugcuggccgugcugaaggggcucuacaacuucgcgaccugcggccuggucgggcuggugacguuccuccugcugugcggccgcuccugcaccaccagccucuacaaggggguguacgagcugcagacccuggagcucaacauggagacgcugaacaugugcaugccgcuguccugcaccaagaacaacagccaccacuacaucauggucggcaacgagaccggccucgagcugacccugacgaacaccuccaucaucaaccacaaguucugcaaccucagcgacgcccacaagaagaaccuguacgaccacgcccugauguccaucaucagcaccuuccaccucuccauccccaacuucaaccaguacgaggccaugagcugcgacuucaacgggggcaagaucuccgugcaguacaaccugagccacuccuacgccggggacgcggccaaccacugcggcaccguggccaacgggguccugcagacguucaugcggauggccuggggcggcagcuacaucgcgcucgacuccgggcgcggcaacugggacugcaucaugaccagcuaccaguaccugaucauccagaacaccaccugggaggaccacugccaguucucccggcccagccccaucggguaccugggccuccugucccagcgcacgcgggacaucuacaucagccgccggcgccggggcaccuucaccuggacccugagcgacuccgaggggaaggacacgccgggcggguacugccucacccgcuggaugcugaucgaggccgagcugaagugcuucggcaacaccgccguggccaagugcaacgagaagcacgacgaggaguucugcgacaugcuccggcuguucgacuucugcaagcaggccauccagcgccugaaggcgcccgcccagaugagcauccagcucaucaacaaggccgugaacgcccugaucaacgaccagcugaucaugaagaaccaccuccgggacaucauggggauccccuacugcaacuacuccaaguacugguaccugaaccacaccacgaccggccgcaccagccugcccaagugcuggcucgucuccaacggcagcuaccugaacgagacccacuucuccgacgacaucgagcagcaggccgacaacaugaucacggagaugcugcagaaggaguacauggagcggcaggggaagaccccgcucggccugguggaccuguucguguucagcaccuccuucuaccugaucagcaucuuccuccaccuggucaagauccccacccaccgccacaucguggggaaguccugccccaagccccaccggcugaaccacaugggcaucugcagcugcgggcucuacaagcagccgggcgugcccgucaaguggaagcgcugaggacuaguuauaagacugacuagcccgaugggccucccaacgggcccuccuccccuccuugcaccgagauuaaucaaaggcucuuuucagagccaccaaaaaaaaaaaaaaaaaaaaaaaaaaaaaaaaaaaaaaaaaaaaaaaaaaaaaaaaaaaaaaaaagaauu

SEQ ID NO: 24294 - RNA, 1655 nt, Artificial Sequence
  mRNA product Design i-3 (hSL-A64-N5) comprising derived and/or modified sequence from LASV(LP;Clade I)__AAF86701__GPCmut2 (opt1)
aggagaaagcuuaccaugggccagaucaucaccuucuuccaggaggugccccacgucaucgaggaggugaugaacaucgugcugaucgcccucagccugcuggccauccucaaggggcuguacaacaucgcgaccugcggcaucaucgggcuggucgccuuccucuuccugugcggcaaguccugcagccugacgcucaagggcggguacgagcugcagacccuggagcucaacauggagacccugaacaugugcaugccgcuguccugcaccaagaacagcucccaccacuacauccgcgugggcaacgagacggggcucgagcugacccugaccaacaccagcaucaucaaccacaaguucugcaaccucuccgacgcccacaagaagaaccuguacgaccacgcccugaugagcaucaucuccacguuccaccucagcauccccaacuucaaccaguacgaggccauguccugcgacuucaacggcgggaagaucagcgugcaguacaaccugucccacagcuacgcgggcgacgccgccgagcacugcgggaccgucgccaacggcgugcugcagaccuucaugcggauggcguggggcgggcgcuacaucgcccucgacuccggcaaggggaacugggacugcaucaugaccagcuaccaguaccugaucauccagaacacgaccugggaggaccacugccaguucucccggcccagccccaucggcuaccugggccuccugucccagcgcacccgggacaucuacaucagccgccggcgccgggggaccuucacguggacccugagcgacuccgagggcaacgagacccccgggggcuacugccucacccgcuggaugcugaucgaggccgagcugaagugcuucgggaacacggccguggccaagugcaacgagaagcacgacgaggaguucugcgacaugcuccggcuguucgacuucugcaagcaggcgauccgccggcugaaggccccggcccagaugagcauccagcucaucaacaaggccgucaacgcccugaucaacgaccagcugaucaugaagaaccaccuccgcgacaucaugggcauccccuacugcaacuacuccaaguacugguaccugaaccacaccagcuccggccggaccagccugcccaagugcuggcucaucuccaacgggagcuaccugaacgagacccaguucuccgacgacaucgagcagcaggcggacaacaugaucacggagaugcugcagaaggaguacaucgagcgccagggcaagaccccgcucgggcugguggacaucuucaucuucagcaccuccuucuaccugaucagcaucuuccugcaccucaucaagauccccacccaccggcacaucgugggcaagcccugccccaagccgcaccgccugaaccacaugggggucugcuccugcggccuguacaagcaccccggcgugcccacgaaguggaagcggugaggacuaguuauaagacugacuagcccgaugggccucccaacgggcccuccuccccuccuugcaccgagauuaaucaaaggcucuuuucagagccaccaaaaaaaaaaaaaaaaaaaaaaaaaaaaaaaaaaaaaaaaaaaaaaaaaaaaaaaaaaaaaaaaagaauu

SEQ ID NO: 24295 - RNA, 1655 nt, Artificial Sequence
  mRNA product Design i-3 (hSL-A64-N5) comprising derived and/or modified sequence from LASV(803213;Clade II)__AAF86703__GPCmut2 (opt1)
aggagaaagcuuaccaugggccagaucaucaccuucuuccaggaggugccccacgucaucgaggaggugaugaacaucgugcugaucgcccucagccugcuggccauccucaaggggaucuacaacgucgcgaccugcggccuguucgggcugaucuccuuccuccugcugugcggccgcagcugcuccgugacguacaaggggguguacgagcuccagacccuggagcugaacauggccaaccucaacaugugcaugccgcugagcugcaccaagaacaacucccaccacuacaucauggucggcaacgagaccggccuggagcucacgcugaccaacaccagcaucaucaaccacaaguucugcaaccuguccgacgcccacaagaagaaccucuacgaccacgcccugaugagcaucaucuccaccuuccaccugagcauccccaacuucaaccaguacgaggccauguccugcgacuucaacgggggcaagaucagcgugcaguacaaccucucccacagcuucgcgguggacgccgccaaccacugcgggacgaucgccaacggcguccugcagaccuucaugcggauggcguggggcggguccuacaucgcccuggacagcggcaaggggaacugggacugcaucaugaccuccuaccaguaccucaucauccagaacaccacgugggaggaccacugccaguucagccgccccucccccaucggcuaccuggggcugcucagccagcggacccgcgacaucuacaucagccggcgccggcgcggcaccuucaccuggacgcuguccgacagcgagggcaacgaggcccccgggggcuacugccugacccgguggaugcucaucgaggccgagcugaagugcuucgggaacaccgccguggcgaagugcaacgagaagcacgacgaggaguucugcgacaugcugcgccucuucgacuucugcaagcaggccaucaagcggcugaagaccccggcccagauguccauccagcugaucaacaaggccgugaacgcccucaucaacgaccagcugaucaugaagaaccaccuccgcgacaucaugggcauccccuacugcaacuacagccgguacugguaccugaaccacacggucaccgggaagaccucccugccccgcugcuggcuggugagcaacggcuccuaccucaacgagacccacuucagcgacgacaucgagcagcaggcggacaacaugaucacggagaugcugcagaaggaguacauggaccggcagggcaagaccccgcuggggcucguggaccuguucgucuucuccaccagcuucuaccugaucuccaucuuccugcaccucgugaagauccccacccaccgccacaucgugggcaagcccugccccaagccgcaccggcugaaccacauggggaucugcagcugcggccuguacaagcaccccgggguccccgugaaguggaagcgcugaggacuaguuauaagacugacuagcccgaugggccucccaacgggcccuccuccccuccuugcaccgagauuaaucaaaggcucuuuucagagccaccaaaaaaaaaaaaaaaaaaaaaaaaaaaaaaaaaaaaaaaaaaaaaaaaaaaaaaaaaaaaaaaaagaauu

SEQ ID NO: 24296 - RNA, 1655 nt, Artificial Sequence
  mRNA product Design i-3 (hSL-A64-N5) comprising derived and/or modified sequence from LASV(GA391;Clade III)__CAA36645__GPCmut2 (opt1)
aggagaaagcuuaccaugggccagaucgugaccuucuuccaggaggucccccacgugaucgaggaggugaugaacaucguccugaucgcccucagcauccuggccauccugaaggggcucuacaacguggcgaccugcggccugaucgggcuggugacguuccuccugcuguccggccgcagcugcucccucaucuacaaggggaccuacgagcugcagacccuggagcucaacauggagacccugaacaugugcaugccgcugagcugcacgaagaacaacucccaccacuacauccgggucggcaacgagaccggccucgagcugacccugaccaacacgagcauccucaaccacaaguucugcaaccuguccgacgcccacaagcgcaaccuguacgaccacagccucauguccaucaucagcaccuuccaccuguccauccccaacuucaaccaguacgaggccaugagcugcgacuucaacgggggcaagaucaccgugcaguacaaccugucccacagcuucgccguggacgccgcggggcacugcggcacccucgccaacgggguccugcagacguucaugcggauggccuggggcggcuccuacaucgcccuggacagcgggcgcggcaacugggacugcaucaugaccuccuaccaguaccucaucauccagaacaccaccugggacgaccacugccaguucagccggcccucccccaucggguaccugggccugcucagccagcgcacgcgggacaucuacaucagccgccggcgccggggcaccuucaccuggacccuguccgacagcgaggggaacgagacgccgggcggguacugccugacccgcuggaugcucaucgaggcggagcugaagugcuucggcaacaccgccguggccaagugcaacgagaagcacgacgaggaguucugcgacaugcugcggcuguucgacuucugcaagcaggccauccgccggcugaagacccccgcccagauguccauccagcugaucaacaaggcggugaacgcccucaucaacgaccagcugaucaugaagaaccaccuccgcgacaucauggggauccccuacugcaacuacagccgguacugguaccucaaccacacguccaccggcaagaccagccugccccgcugcuggcugaucuccaacggcagcuaccucaacgagaccaaguucuccgacgacaucgagcagcaggccgacaacaugaucacggagaugcugcagaaggaguacaucgaccggcaggggaagaccccgcugggccuggucgaccucuucguguucagcaccuccuucuaccugaucagcaucuuccugcaccucgugaagauccccacccaccgccacaucgucgggaagcccugccccaagccgcaccggcugaaccacaugggcaucugcuccugcgggcuguacaagcagcccggcgugcccgugcgcuggaagcgcugaggacuaguuauaagacugacuagcccgaugggccucccaacgggcccuccuccccuccuugcaccgagauuaaucaaaggcucuuuucagagccaccaaaaaaaaaaaaaaaaaaaaaaaaaaaaaaaaaaaaaaaaaaaaaaaaaaaaaaaaaaaaaaaaagaauu

SEQ ID NO: 24297 - RNA, 1658 nt, Artificial Sequence
  mRNA product Design i-3 (hSL-A64-N5) comprising derived and/or modified sequence from LASV(AV;Clade V)__CCA30314__GPCmut2 (opt1)
aggagaaagcuuaccaugggccagaucgugaccuucuuccaggaggucccccacgugaucgaggaggugaugaacaucguccugaucgcccucagcauccuggccgugcugaaggggcucuacaacaucgcgaccugcggccugaucgggcugaucacguuccuccugcugugcggccgcuccugcagcuccaaccucuacaaggggguguacgagcugcagagccuggaccucaacauggagacccugaacaugugcaugccgcuguccugcaccaagaacaacagccaccacuacauccgggucggcaacgacaccggccucgagcugacgcugaccaacaccuccauccucaaccacaaguucugcaaccugagcgacgcccacaagaaggaccuguacgaccacgcccucauguccaucaucagcaccuuccaccuguccauccccaacuucaaccaguacgaggccaugagcugcgacuucaacgggggcaagaucuccgugcaguacaaccugagccacuccuacgccaucgacgcggccaaccacugcgggacgguggccaacggcauccuccagaccuucaugcgcauggccuggggcgggagcuacaucgcgcuggacuccggccgggggaacugggacugcaucaugaccagcuaccaguaccugaucauccagaacaccacgugggagaaccacugccaguucucccgccccagccccaucggcuaccucgggcugcugagccagcggacccgcgacaucuacaucucccggcgccggcgcggcaccuucaccuggacgcucagcgacuccgagggcaacgccacccccgggggcuacugccugacccgguggaugcugaucgaggccgagcucaagugcuucgggaacaccgccgucgccaagugcaacgagaagcacgacgaggaguucugcgacaugcugcgccuguucgacuucugcaagcaggcgaucagccggcucaaguccccggcccagaugagcauccagcugaucaacaaggccgugaacgcccugaucaacgaccagcucaucaugaagaaccaccuccgcgacaucaugggcauccccuacugcaacuacuccaaguacugguaccugaaccacacgaucaccgggaagaccagccugcccaagugcuggcugguguccaacggcagcuaccugaacgagacccacuucuccgacgacaucgagcagcaggccgacaacaugaucacggagaugcuccagaaggaguacauggagcggcagggcaagaccccgcuggggcuggucgaccuguucguguucagcaccuccuucuaccucaucagcaucuuccugcgccuggugaagauccccacccaccggcacaucgucggcaagcccugccccaagccgcaccgccucaaccacauggggaucugcuccugcggccuguacaagcagcccggggugcccgugcgguggaagcgcugaggacuaguuauaagacugacuagcccgaugggccucccaacgggcccuccuccccuccuugcaccgagauuaaucaaaggcucuuuucagagccaccaaaaaaaaaaaaaaaaaaaaaaaaaaaaaaaaaaaaaaaaaaaaaaaaaaaaaaaaaaaaaaaaagaauu

SEQ ID NO: 24298 - RNA, 1655 nt, Artificial Sequence
  mRNA product Design i-3 (hSL-A64-N5) comprising derived and/or modified sequence from LASV(Togo/2016/7082;Clade VI)__AMR44577__GPCmut2 (opt1)
aggagaaagcuuaccaugggccagaucaucaccuucuuccaggaggugccccacgucaucgaggaggugaugaacaucgugcugaucgcccucagccugcuggccauccucaagggggucuacaacguggcgaccugcggcaucaucgggcuggugacguuccuguuccucugcggccgcuccugcagccugaucuacaagggguccuacgagcugcagacccucgagcugaacauggagacccugaacaugugcaugccgcucagcugcaccaagaacuccagccaccacuacauccgggucggcaacgagacgggccuggagcugacccucaccaacaccuccaucaucaaccacaaguucugcaaccugagcgacgcccacaagcgcaaccuguacgaccacgcccucauguccauccugagcacguuccaccuguccauccccaacuucaaccaguacgaggccaugagcugcgacuucaacgggggcaagaucuccgugcaguacaaccucagccacgccuacgcgguggacgccgccgagcacugcgggaccgucgccaacggcgugcugcagaccuucaugcggauggcguggggcggguccuacaucgcccuggacagcggccgcgggaacugggacugcaucaugaccuccuaccaguaccucaucauccagaacacgaccugggaggaccacugccaguucagccggcccucccccaucggcuaccuggggcugcucagccagcgcacccgggacaucuacaucagccgccggcgccggggcaccuucacguggacccuguccgacagcgagggcaacgagacccccgggggcuacugccugacccgcuggaugcucaucgaggccgagcugaagugcuucgggaacacggccguggccaagugcaacgagaagcacgacgaggaguucugcgacaugcugcggcuguucgacuucugcaagcaggcgauccagcgccugaaguccccggcccagaugagcauccagcugaucaacaaggccgucaacgcccucaucaacgaccagcugaucaugaagaaccaccuccgggacaugaugggcauccccuacugcaacuacuccaaguacugguaccucaaccacaccagcuccgggcgcaccagccugcccaagugcuggcugguguccaacggcagcuaccucaacgagacccacuucuccgacgacaucgagcagcaggccgacaacaugaucacggagaugcugcagaaggaguacaucgaccggcagggcaagaccccgcuggggcucguggaccuguucgucuucagcaccuccuucuaccugaucagcaucuuccugcaccucaucaagauccccacccaccgccacaucgugggcaagcccugccccaagccgcaccggcugaaccacauggggaucugcuccugcggccuguacaagcagcccggggugcccacgcgcuggaagcggugaggacuaguuauaagacugacuagcccgaugggccucccaacgggcccuccuccccuccuugcaccgagauuaaucaaaggcucuuuucagagccaccaaaaaaaaaaaaaaaaaaaaaaaaaaaaaaaaaaaaaaaaaaaaaaaaaaaaaaaaaaaaaaaaagaauu

SEQ ID NO: 24299 - RNA, 1655 nt, Artificial Sequence
  mRNA product Design i-3 (hSL-A64-N5) comprising derived and/or modified sequence from LASV(KAK-428;Clade n.d. (VII))__ANH09740__GPCmut2 (opt1)
aggagaaagcuuaccaugggccagaucgugaccuucuuccaggaggucccccacgugaucgaggaggugaugaacaucguccugaucgcccucagccugcuggccauccucaaggggcuguacaacuucgcgaccugcggcgugaucgggcugaucacguuccuccugcugugcggccgcuccugcagcgccaccuacaaggggcaguacgagcuccagacccuggagcugaacauggagucccucaacaugugcaugccgcugagcugcaccaagaacaacucccaccacuacauccgggccggcaacaacacgggccuggagcucacccugaccaacaccagcaucaucucccacaaguucugcaaccugagcgacgcccacaagaagaaccucuacgaccacacgcugauguccaucaucaccaccuuccaccugagcauccccaacuucaaccaguacgaggccauguccugcgacuucaacgggggcaagaucagcauccaguacaaccucucccacagcuacgcgggggacgccgcccagcacugcggcaccguggccaacgggguccugcagacguucaugcgcauggcguggggcggcuccuaccuggcccucgacagcgggcggcgcggcugggacugcaucaucuccagcuaccaguaccugaucauccagaacaccaccugggacgaccacugccaguucucccggcccagccccaucggguaccugggcuucgugagccagaagacccgcgacaucuacaucucccggcgccggcgcggcacguucaccuggacccucagcgacuccgaggggcacgacaugccgggcggguacugccugacccgguggaugcugaucgaggccgaccucaagugcuucggcaacacggccguggccaagugcaacgagaagcacgacgaggaguucugcgacauguggcgccuguucgacuucugcaagcaggcgauccagcggcugaaggcccccgcccagaugaacauccagcucaucaacaaggccgucaacgcccugaucaacgaccagcugaugaugaagaaccaccuccgcgacaucauggggauccccuacugcaacuacagcaaguucugguaccugaacaacaccaccaccggccggacgucccugccccgcugcuggcucaucagcaacggcuccuaccugaacgagacccacuucagcgacgacaucgagcagcaggcggacaacaugaucaccgagaugcugcagaaggaguacauggaccggcaggggaagaccccgcucggccugguggaccuguucguguucuccacgagcuucuaccucaucaccaucuuccugcaccuggucaagauccccacccaccgccacaucguggggaagcccugccccaagccgcaccggcugaaccacaugggcaucugcuccugcgggcucuacaagcagcccggcgugcccguccgcuggaagcggugaggacuaguuauaagacugacuagcccgaugggccucccaacgggcccuccuccccuccuugcaccgagauuaaucaaaggcucuuuucagagccaccaaaaaaaaaaaaaaaaaaaaaaaaaaaaaaaaaaaaaaaaaaaaaaaaaaaaaaaaaaaaaaaaagaauu

SEQ ID NO: 24300 - RNA, 1655 nt, Artificial Sequence; identical to SEQ ID NO: 24294
  mRNA product Design i-3 (hSL-A64-N5) comprising derived and/or modified sequence from LASV(Pinneo-NIG-1969;Clade I)__AIT17836__GPCmut2 (opt1)

SEQ ID NO: 24301 - RNA, 1655 nt, Artificial Sequence
  mRNA product Design i-3 (hSL-A64-N5) comprising derived and/or modified sequence from LASV(ISTH0009-NIG-2011;Clade II)__AIT17404__GPCmut2 (opt1)
aggagaaagcuuaccaugggccagaucaucaccuucuuccaggaggugccccacgucaucgaggaggugaugaacaucgugcugaucgcccucagccugcuggccauccucaaggggaucuacaacgucgcgaccugcggccuguucgggcugguguccuuccuccugcugugcggccgcagcugcuccacgaccuacaaggggguguacgagcuccagacccuggagcuggacauggccagccucaacaugugcaugccgcuguccugcaccaagaacaacagccaccacuacaucauggucggcaacgagacgggccuggagcucacccugaccaacaccuccaucaucaaccacaaguucugcaaccugagcgacgcccacaagaagaaccucuacgaccacgcccugauguccaucaucagcacguuccaccuguccauccccaacuucaaccaguacgaggccaugagcugcgacuucaacgggggcaagaucuccgugcaguacaaccucagccacgcguacgccguggacgccgccaaccacugcgggaccaucgcgaacggcguccugcagaccuucaugcggauggccuggggcggguccuacaucgcccuggacagcggcaagggguccugggacugcaucaugaccagcuaccaguaccucaucauccagaacacgaccugggaggaccacugccaguucucccgccccagccccaucggcuaccuggggcugcucagccagcggacccgcgacaucuacaucucccggcgccggcgcggcaccuucacguggacccugagcgacuccgagggcaacgagacccccgggggcuacugccugacccgguggaugcucaucgaggccgagcugaagugcuucgggaacacggccguggcgaagugcaacgagaagcacgacgaggaguucugcgacaugcugcgccucuucgacuucugcaagcaggccauccggcgccugaagaccccggcccagaugagcauccagcugaucaacaaggccgugaacgcccucaucaacgaccagcugaucaugaagaaccaccuccgggacaucaugggcauccccuacugcaacuacuccaaguacugguaccugaaccacaccgucaccgggaagacgagccugccccgcugcuggcugguguccaacggcagcuaccucaacgagacccacuucuccgacgacaucgagcagcaggcggacaacaugaucaccgagcugcugcagaaggaguacauggaccggcagggcaagaccccgcucgggcugguggaccuguucgucuucagcacguccuucuaccugaucagcaucuuccuccaccugaucaagauccccacccaccgccacaucaccggcaagcccugccccaagccgcaccggcugaaccacauggggaucugcuccugcggccucuacaagcaccccggggugcccgugaaguggaagcgcugaggacuaguuauaagacugacuagcccgaugggccucccaacgggcccuccuccccuccuugcaccgagauuaaucaaaggcucuuuucagagccaccaaaaaaaaaaaaaaaaaaaaaaaaaaaaaaaaaaaaaaaaaaaaaaaaaaaaaaaaaaaaaaaaagaauu

SEQ ID NO: 24302 - RNA, 1655 nt, Artificial Sequence
  mRNA product Design i-3 (hSL-A64-N5) comprising derived and/or modified sequence from LASV(ISTH2010-NIG-2012;Clade II)__AIT17482__GPCmut2 (opt1)
aggagaaagcuuaccaugggccagaucaucaccuucuuccaggaggugccccacgucaucgaggaggugaugaacaucgugcugaucgcccucagccugcuggccauccucaaggggaucuacaacgucgcgaccugcggccuguucgggcugguguccuuccuccugcugugcggccgcagcugcuccacgaccuacaaggggguguacgagcuccagacccuggagcuggacauggccagccucaacaugugcaugccgcuguccugcaccaagaacaacagccaccacuacaucauggucggcaacgagacgggccuggagcucacccugaccaacaccuccaucaucaaccacaaguucugcaaccugagcgacgcccacaagaagaaccucuacgaccacgcccugauguccaucaucagcacguuccaccuguccauccccaacuucaaccaguacgaggccaugagcugcgacuucaacgggggcaagaucuccgugcaguacaaccucagccacgcguacgccguggacgccgccaaccacugcgggaccaucgcgaacggcguccugcagaccuucaugcggauggccuggggcggguccuacaucgcccuggacagcggcaagggguccugggacugcaucaugaccagcuaccaguaccucaucauccagaacaucacgugggaggaccacugccaguucucccgccccagccccaucggcuaccuggggcugcucagccagcggacccgcgacaucuacaucucccggcgccggcgcggcaccuucaccuggacgcugagcgacuccgagggcaacgagacccccgggggcuacugccugacccgguggaugcucaucgaggccgagcugaagugcuucgggaacaccgccguggcgaagugcaacgagaagcacgacgaggaguucugcgacaugcugcgccucuucgacuucugcaagcaggccauccggcgccugaagacgccggcccagaugagcauccagcugaucaacaaggccgugaacgcccucaucaacgaccagcugaucaugaagaaccaccuccgggacaucaugggcauccccuacugcaacuacuccaaguacugguaccugaaccacaccgucaccgggaagaccagccugccccgcugcuggcugguguccaacggcagcuaccucaacgagacgcacuucuccgacgacaucgagcagcaggcggacaacaugaucaccgagcugcugcagaaggaguacaucgaccggcagggcaagaccccgcucgggcugguggaccuguucgucuucagcaccuccuucuaccugaucagcaucuuccuccaccuggugaagauccccacgcaccgccacguggucggcaagcccugccccaagccgcaccggcugaaccacauggggaucugcuccugcggccucuacaagcaccccggggugcccgugaaguggaagcgcugaggacuaguuauaagacugacuagcccgaugggccucccaacgggcccuccuccccuccuugcaccgagauuaaucaaaggcucuuuucagagccaccaaaaaaaaaaaaaaaaaaaaaaaaaaaaaaaaaaaaaaaaaaaaaaaaaaaaaaaaaaaaaaaaagaauu

SEQ ID NO: 24303 - RNA, 1655 nt, Artificial Sequence
  mRNA product Design i-3 (hSL-A64-N5) comprising derived and/or modified sequence from LASV(Lassa virus/H.sapiens-wt/NGA/2015/ISTH_0543;Clade II)__AVO03639__GPCmut2 (opt1)
aggagaaagcuuaccaugggccagaucaucaccuucuuccaggaggugccccacgucaucgaggaggugaugaacaucgugcugaucgcccucagccugcuggccauccucaaggggaucuacaacgucgcgaccugcggccuguucgggcugguguccuuccuccugcugugcggccgcagcugcuccacgaccuacaaggggguguacgagcuccagacccuggagcuggacauggccaaccucaacaugugcaugccgcugagcugcaccaagaacaacucccaccacuacaucauggucggcaacgagacgggccuggagcucacccugaccaacaccagcaucaucaaccacaaguucugcaaccuguccgacgcccacaagaagaaccucuacgaccacgcccugaugagcaucaucuccacguuccaccugagcauccccaacuucaaccaguacgaggccauguccugcgacuucaacgggggcaagaucagcgugcaguacaaccucucccacaccuacgcgguggacgccgccaaccacugcgggaccaucgccaacggcguccugcagaccuucaugcggauggcguggggcgggagcuacaucgcccuggacuccggcaaggggagcugggacugcaucaugacguccuaccaguaccucgugauccagaacaccaccugggaggaccacugccaguucagccgccccucccccaucggcuaccuggggcugcucagccagcggacccgcgacaucuacaucagccggcgccggcgcggcacguucaccuggacccuguccgacagcgagggcaacgagacccccgggggcuacugccugacgcgguggaugcucaucgaggccgagcugaagugcuucgggaacaccgccguggccaagugcaacgagaagcacgacgaggaguucugcgacaugcugcgccucuucgacuucugcaagcaggcgauccggcgccugaagaccccggcccagauguccauccagcugaucaacaaggccgucaacgcccucaucaacgaccagcugaucaugaagaaccaccuccgggacaucaugggcauccccuacugcaacuacagcaaguacugguaccugaaccacaccgugacggggaagaccucccugccccgcugcuggcuggugagcaacggcuccuaccucaacgagacccacuucagcgacgacaucgagcagcaggccgacaacaugaucaccgagcugcugcagaaggaguacaucgaccggcagggcaagacgccgcucgggcuggucgaccuguucguguucuccaccagcuucuaccugaucuccaucuuccuccaccuggugaagauccccacccaccgccacaucaccggcaagcccugccccaagccgcaccggcugaaccacauggggaucugcagcugcggccucuacaagcaccccgggguccccgugaaguggaagcgcugaggacuaguuauaagacugacuagcccgaugggccucccaacgggcccuccuccccuccuugcaccgagauuaaucaaaggcucuuuucagagccaccaaaaaaaaaaaaaaaaaaaaaaaaaaaaaaaaaaaaaaaaaaaaaaaaaaaaaaaaaaaaaaaaagaauu

SEQ ID NO: 24304 - RNA, 1655 nt, Artificial Sequence
  mRNA product Design i-3 (hSL-A64-N5) comprising derived and/or modified sequence from LASV(Lassa virus/H.sapiens-wt/NGA/2016/ISTH_0009;Clade II)__AVO03571__GPCmut2 (opt1)
aggagaaagcuuaccaugggccagaucaucaccuucuuccaggaggugccccacgucaucgaggaggugaugaacaucgugcugaucgcccucagccugcuggccauccucaaggggaucuacaacgucgcgaccugcggccugcuggggcucguguccuuccugcugcucugcggccgcagcugcuccacgaccuacaaggggguguacgagcugcagacccuggagcucgacauggccagccugaacaugugcaugccgcuguccugcaccaagaacaacagccaccacuacaucauggucggcaacgagacgggccucgagcugacccugaccaacaccuccaucaucaaccacaaguucugcaaccucagcgacgcccacaagaagaaccuguacgaccacgcccugauguccaucaucagcacguuccaccucuccauccccaacuucaaccaguacgaggccaugagcugcgacuucaacgggggccggaucuccgugcaguacaaccugagccacuccuacgcgguggacgccgccaaccacugcgggaccaucgccaacggcguccugcagaccuucaugcgcauggcguggggcgggagcuacaucgcccucgacuccggcaaggggagcugggacugcaucaugaccuccuaccaguaccugaucauccagaacacgaccugggaggaccacugccaguucagccggcccagccccaucggcuaccuggggcuccugucccagcgcacccgggacaucuacaucagccgccggcgccggggcaccuucacguggacccuguccgacagcgagggcaacgagacccccgggggcuacugccucacccgcuggaugcugaucgaggccgagcugaagugcuucgggaacacggccguggccaagugcaacgagaagcacgacgaggaguucugcgacaugcuccggcuguucgacuucugcaagcaggcgauccgccggcugaagaccccggcccagauguccauccagcucaucaacaaggccgugaacgcccugaucaacgaccagcugaucaugaagaaccaccuccgcgacaucaugggcauccccuacugcaacuacagcaaguacugguaccugaaccacaccgucaccgggaagacgucccugccccggugcuggcucgugagcaacggcuccuaccugaacgagacccacuucagcgacgacaucgagcagcaggccgacaacaugaucaccgagcugcuccagaaggaguacaucgaccgccagggcaagaccccgcuggggcugguggaccuguucgucuucuccacgagcuucuaccucaucuccaucuuccugcaccuggugaagauccccacccaccggcacaucaccggcaagcccugccccaagccgcaccgccucaaccacauggggaucugcagcugcggccuguacaaccaccccggggugcccgucaaguggaagcggugaggacuaguuauaagacugacuagcccgaugggccucccaacgggcccuccuccccuccuugcaccgagauuaaucaaaggcucuuuucagagccaccaaaaaaaaaaaaaaaaaaaaaaaaaaaaaaaaaaaaaaaaaaaaaaaaaaaaaaaaaaaaaaaaagaauu

SEQ ID NO: 24305 - RNA, 1655 nt, Artificial Sequence
  mRNA product Design i-3 (hSL-A64-N5) comprising derived and/or modified sequence from LASV(Lassa virus/H.sapiens-wt/NGA/2016/ISTH_0017;Clade II)__AVO03567__GPCmut2 (opt1)
aggagaaagcuuaccaugggccagaucaucaccuucuuccaggaggugccccacgucaucgaggaggugaugaacaucgugcugaucgcccucagccugcuggccauccucaaggggaucuacaacgucgcgaccugcggccuguucgggcugguguccuuccuccugcugugcggccgcagcugcuccacgaccuacaaggggguguacgagcuccagacccuggagcuggacauggccagccucaacaugugcaugccgcuguccugcaccaagaacaacagccaccacuacaucauggucggcaacgagacgggccuggagcucacccugaccaacaccuccaucaucaaccacaaguucugcaaccugagcgacgcccacaagaagaaccucuacgaccacgcccugauguccaucaucagcacguuccaccuguccauccccaacuucaaccaguacgaggccaugagcugcgacuucaacgggggcaagaucuccgugcaguacaaccucagccacaccuacgcgaucgacgccgccaaccacugcgggaccaucgccaacggcgugcugcagaccuucaugcggauggcguggggcggguccuacaucgcccuggacagcggcaagggguccugggacugcaucaugacgagcuaccaguaccucaucauccagaacaccaccugggaggaccacugccaguucucccgccccagccccaucggcuaccuggggcugcucagccagcggacccgcgacaucuacaucucccggcgccggcgcggcacguucaccuggacccugagcgacuccgagggcaacgagacccccgggggcuacugccugacgcgguggaugcucaucgaggccgagcugaagugcuucgggaacaccgccgucgccaagugcaacgagaagcacgacgaggaguucugcgacaugcugcgccucuucgacuucugcaagcaggcgauccggcgccugaagaccccggcccagaugagcauccagcugaucaacaaggccgugaacgcccucaucaacgaccagcugaucaugaagaaccaccuccgggacaucaugggcauccccuacugcaacuacuccaaguacugguaccugaaccacaccgugacggggaagaccagccugccccgcugcuggcuggucuccaacggcagcuaccucaacgagacccacuucuccgacgacaucgagcagcaggccgacaacaugaucaccgagcugcugcagaaggaguacauggaccggcagggcaagacgccgcucgggcugguggaccuguucguguucagcaccuccuucuaccugaucagcaucuuccuccaccugguccgcauccccacccaccggcacgugaucggcaagcccugccccaagccgcaccgccugaaccacauggggaucugcuccugcggccucuacaagcaccccggggugcccgucaaguggaagcggugaggacuaguuauaagacugacuagcccgaugggccucccaacgggcccuccuccccuccuugcaccgagauuaaucaaaggcucuuuucagagccaccaaaaaaaaaaaaaaaaaaaaaaaaaaaaaaaaaaaaaaaaaaaaaaaaaaaaaaaaaaaaaaaaagaauu

SEQ ID NO: 24306 - RNA, 1655 nt, Artificial Sequence
  mRNA product Design i-3 (hSL-A64-N5) comprising derived and/or modified sequence from LASV(Lassa virus/H.sapiens-wt/NGA/2018/ISTH_0959;Clade II)__AVV65099__GPCmut2 (opt1)
aggagaaagcuuaccaugggccagaucaucaccuucuuccaggaggugccccacgucaucgaggaggugaugaacaucgugcugaucgcccucagccugcuggccauccucaaggggaucuacaacgucgugaccugcggccuguucgggcugguguccuuccuccugcugugcggccgcagcugcuccacgaccuacaagggggucuacgagcuccagacccuggagcuggacauggcgagccucaacaugugcaugccgcuguccugcaccaagaacaacagccaccacuacaucauggugggcaacgagacgggccuggagcucacccugaccaacaccuccaucaucaaccacaaguucugcaaccugagcgacgcccacaagaagaaccucuacgaccacgcccugauguccaucaucagcacguuccaccuguccauccccaacuucaaccaguacgaggccaugagcugcgacuucaacgggggcaagaucuccgugcaguacaaccucagccacgccuacgcgaucgacgccgccaaccacugcgggaccaucgccaacggcguccugcagaccuucaugcggauggcguggggcggguccuacaucgcccuggacagcggcaagggguccugggacugcaucaugaccagcuaccaguaccucaucauccagaacacgaccugggaggaccacugccaguucucccgccccagccccaucggcuaccuggggcugcucagccagcggacccgcgacaucuacaucucccggcgccggcgcggcaccuucacguggacccugagcgacuccgagggcaacgagacccccgggggcuacugccugacccgguggaugcucaucgaggccgagcugaagugcuucgggaacacggccguggccaagugcaacgagaagcacgacgaggaguucugcgacaugcugcgccucuucgacuucugcaagcaggcgauccggcgccugaagaccccggcccagaugagcauccagcugaucaacaaggccgugaacgcccucaucaacgaccagcugaucaugaagaaccaccuccgggacaucaugggcauccccuacugcaacuacuccaaguacugguaccugaaccacaccgucaccgggaagacgagccugccccgcugcuggcugguguccaacggcagcuaccucaacgagacccacuucuccgacgacaucgagcagcaggccgacaacaugaucaccgagcugcugcagaaggaguacaucgaccggcagggcaagaccccgcucgggcugguggaccuguucgucuucagcacguccuucuaccugaucagcaucuuccuccaccuggugaagauccccacccaccgccacgugaucggcaagcccugccccaagccgcaccggcugaaccacauggggaucugcuccugcggccucuacaagcaccccgggguccccgugaaguggaagcgcugaggacuaguuauaagacugacuagcccgaugggccucccaacgggcccuccuccccuccuugcaccgagauuaaucaaaggcucuuuucagagccaccaaaaaaaaaaaaaaaaaaaaaaaaaaaaaaaaaaaaaaaaaaaaaaaaaaaaaaaaaaaaaaaaagaauu

SEQ ID NO: 24307 - RNA, 1655 nt, Artificial Sequence
  mRNA product Design i-3 (hSL-A64-N5) comprising derived and/or modified sequence from LASV(LASV003-NIG-2008;Clade II)__AIT17580__GPCmut2 (opt1)
aggagaaagcuuaccaugggccagaucaucaccuucuuccaggaggugccccacgucaucgaggaggugaugaacaucgugcugaucgcccucagccugcuggccauccucaaggggaucuacaacgucgcgaccugcggccuguucgggcugguguccuuccuccugcugugcggccgcagcugcuccacgaccuacaaggggguguacgagcuccagacccuggagcuggacauggccagccucaacaugugcaugccgcuguccugcaccaagaacaacagccaccacuacaucauggucggcaacgagacgggccuggagcucacccugaccaacaccuccaucaucaaccacaaguucugcaaccugagcgacgcccacaagaagaaccucuacgaccacgcccugauguccaucaucagcacguuccaccuguccauccccaacuucaaccaguacgaggccaugagcugcgacuucaacgggggcaagaucuccgugcaguacaaccucagccacaccuacgcgguggacgccgccaaccacugcgggaccaucgccaacggcguccugcagaccuucaugcggauggcguggggcggguccuacaucgcccuggacagcggcaagggguccugggacugcaucaugacgagcuaccaguaccucaucauccagaacaccaccugggaggaccacugccaguucucccgccccagccccaucggcuaccuggggcugcucagccagcggacccgcgacaucuacaucucccggcgccggcgcggcacguucaccuggacccugagcgacuccgagagcaacgagaccccgggcggguacugccugacgcgguggaugcucaucgaggccgagcugaagugcuucggcaacaccgccguggccaagugcaacgagaagcacgacgaggaguucugcgacaugcugcgccucuucgacuucugcaagcaggcgauccggcgccugaaggcccccgcccagauguccauccagcugaucaacaaggccgugaacgcccucaucaacgaccagcugaucaugaagaaccaccuccgggacaucauggggauccccuacugcaacuacagcaaguacugguaccugaaccacaccgucaccggccgcacgucccugccccggugcuggcuggugagcaacggguccuaccucaacgagacccacuucagcgacgacaucgagcagcaggcggacaacaugaucaccgagcugcugcagaaggaguacauggaccgccagggcaagaccccgcucggccugguggaccuguucgucuucuccacgagcuucuaccugaucuccaucuuccuccaccuggugaagauccccacccaccggcacgugaucgggaagcccugccccaagccgcaccgccugaaccacaugggcaucugcagcugcgggcucuacaagcaccccggcguccccgugaaguggaagcggugaggacuaguuauaagacugacuagcccgaugggccucccaacgggcccuccuccccuccuugcaccgagauuaaucaaaggcucuuuucagagccaccaaaaaaaaaaaaaaaaaaaaaaaaaaaaaaaaaaaaaaaaaaaaaaaaaaaaaaaaaaaaaaaaagaauu

SEQ ID NO: 24308 - RNA, 1655 nt, Artificial Sequence
  mRNA product Design i-3 (hSL-A64-N5) comprising derived and/or modified sequence from LASV(LASV035-NIG-2009;Clade II)__AIT17588__GPCmut2 (opt1)
aggagaaagcuuaccaugggccagaucaucaccuucuuccaggaggugccccacgucaucgaggaggugaugaacaucgugcugaucgcccucagccugcuggccauccucaaggggaucuacaacgucgcgaccugcggccuguucgggcugguguccuuccuccugcugugcggccgcagcugcuccacgaccuacaaggggguguacgagcuccagacccuggagcuggacauggccagccucaacaugugcaugccgcuguccugcaccaagaacaacagccaccacuacaucauggucggcaacgagacgggccuggagcucacccugaccaacaccuccaucaucaaccacaaguucugcaaccugagcgacgcccacaagaagaaccucuacgaccacgcccugauguccaucaucagcacguuccaccuguccauccccaacuucaaccaguacgaggccaugagcugcgacuucaacgggggcaagaucuccgugcaguacaaccucagccacgcguacgccguggacgccgccaaccacugcgggaccaucgcgaacggcguccugcagaccuucaugcggauggccuggggcggguccuacaucgcccuggacagcggcaagggguccugggacugcaucaugaccagcuaccaguaccucaucauccagaacacgaccugggaggaccacugccaguucucccgccccagccccaucggcuaccuggggcugcucagccagcggacccgcgacaucuacaucucccggcgccggcgcggcaccuucacguggacccugagcgacuccgagggcaacgagacccccgggggcuacugccugacccgguggaugcucaucgaggccgagcugaagugcuucgggaacacggccguggcgaagugcaacgagaagcacgacgaggaguucugcgacaugcugcgccucuucgacuucugcaagcaggccauccggcgccugaaggccccggcccagaugagcauccagcugaucaacaaggccgugaacgcgcucaucaacgaccagcugaucaugaagaaccaccuccgggacaucaugggcauccccuacugcaacuacuccaaguacugguaccugaaccacaccgucaccgggaagaccagccugccccgcugcuggcugguguccaacggcagcuaccucaacgagacgcacuucuccgacgacaucgagcagcaggccgacaacaugaucaccgagcugcugcagaaggaguacaucgaccggcagggcaagaccccgcucgggcugguggaccuguucgucuucagcaccuccuucuaccugaucagcaucuuccuccaccuggugaagauccccacgcaccgccacgugaucggcaagcccugccccaagccgcaccggcugaaccacauggggaucugcuccugcggccucuacaagcaccccgggguccccgugaaguggaagcgcugaggacuaguuauaagacugacuagcccgaugggccucccaacgggcccuccuccccuccuugcaccgagauuaaucaaaggcucuuuucagagccaccaaaaaaaaaaaaaaaaaaaaaaaaaaaaaaaaaaaaaaaaaaaaaaaaaaaaaaaaaaaaaaaaagaauu

SEQ ID NO: 24309 - RNA, 1655 nt, Artificial Sequence
  mRNA product Design i-3 (hSL-A64-N5) comprising derived and/or modified sequence from LASV(LASV1000-NIG-2009;Clade II)__AIT17782__GPCmut2 (opt1)
aggagaaagcuuaccaugggccagaucaucaccuucuuccaggaggugccccacgucaucgaggaggugaugaacaucgugcugaucgcccucagccugcuggccauccucaaggggaucuacaacgucgcgaccugcggccuguucgggcugguguccuuccuccugcugugcggccgcagcugcuccacgaccuacaaggggguguacgagcuccagacccuggagcuggacauggccagccucaacaugugcaugccgcuguccugcaccaagaacaacagccaccacuacaucauggucggcaacgagacgggccuggagcucacccugaccaacaccuccaucaucaaccacaaguucugcaaccugagcgacgcccacaagaagaaccucuacgaccacgcccugauguccaucaucagcacguuccaccuguccauccccaacuucaaccaguacgaggccaugagcugcgacuucaacgggggcaagaucuccgugcaguacaaccucagccacaccuacgcgguggacgccgccaaccacugcgggaccaucgccaacggcguccugcagaccuucaugcggauggcguggggcggguccuacaucgcccuggacagcggcaagggguccugggacugcaucaugacgagcuaccaguaccucaucauccagaacaccaccugggaggaccacugccaguucucccgccccagccccaucggcuaccuggggcugcucagccagcggacccgcgacaucuacaucucccggcgccggcgcggcacguucaccuggacccugagcgacuccgagggcaacgagacccccgggggcuacugccugacgcgguggaugcucaucgaggccgagcugaagugcuucgggaacaccgccguggccaagugcaacgagaagcacgacgaggaguucugcgacaugcugcgccucuucgacuucugcaagcaggcgaucaagcggcugaagaccccggcccagaugagcauccagcugaucaacaaggccgugaacgcccucaucaacgaccagcugaucaugaagaaccaccuccgcgacaucaugggcauccccuacugcaacuacuccaaguacugguaccugaaccacaccgucacggggaagaccagccugccccggugcuggcugguguccaacggcagcuaccucaacgagacccacuucuccgacgacaucgagcagcaggccgacaacaugaucaccgagcugcugcagaaggaguacaucgaccgccagggcaagacgccgcucgggcugguggaccuguucgucuucagcaccuccuucuaccugaucagcaucuuccuccaccuggugaagauccccacccaccggcacguggucggcaagcccugccccaagccgcaccgccugaaccacauggggaucugcuccugcggccucuacaagcaccccggggugcccgugaaguggaagcggugaggacuaguuauaagacugacuagcccgaugggccucccaacgggcccuccuccccuccuugcaccgagauuaaucaaaggcucuuuucagagccaccaaaaaaaaaaaaaaaaaaaaaaaaaaaaaaaaaaaaaaaaaaaaaaaaaaaaaaaaaaaaaaaaagaauu

SEQ ID NO: 24310 - RNA, 1655 nt, Artificial Sequence
  mRNA product Design i-3 (hSL-A64-N5) comprising derived and/or modified sequence from LASV(LASV221-NIG-2010;Clade II)__AIT17624__GPCmut2 (opt1)
aggagaaagcuuaccaugggccagaucaucaccuucuuccaggaggugccccacgucaucgaggaggugaugaacaucgugcugaucgcccucagccugcuggccauccucaaggggaucuacaacgucgcgaccugcggccuguucgggcugguguccuuccuccugcugugcggccgcagcugcuccacgaccuacaaggggguguacgagcuccagacccuggagcuggacauggccagccucaacaugugcaugccgcuguccugcaccaagaacaacagccaccacuacaucauggucggcaacgagacgggccuggagcucacccugaccaacaccuccaucaucaaccacaaguucugcaaccugagcgacgcccacaagaagaaccucuacgaccacgcccugauguccaucaucagcacguuccaccuguccauccccaacuucaaccaguacgaggccaugagcugcgacuucaacgggggcaagaucuccgugcaguacaaccucagccacaccuacgcgaucgacgccgccaaccacugcgggaccaucgccaacggcgugcugcagaccuucaugcggauggcguggggcggguccuacaucgcccuggacagcggcaagggguccugggacugcaucaugacgagcuaccaguaccucaucauccagaacaccaccugggaggaccacugccaguucucccgccccagccccaucggcuaccuggggcugcucagccagcggacccgcgacaucuacaucucccggcgccggcgcggcacguucaccuggacccugagcgacuccgagggcaacgagacccccgggggcuacugccugacgcgguggaugcucaucgaggccgagcugaagugcuucgggaacaccgccgucgccaagugcaacgagaagcacgacgaggaguucugcgacaugcugcgccucuucgacuucugcaagcaggcgauccggcgccugaagaccccggcccagaugagcauccagcugaucaacaaggccgugaacgcccucaucaacgaccagcugaucaugaagaaccaccuccgggacaucaugggcauccccuacugcaacuacuccaaguacugguaccugaaccacaccgugacggggaagaccagccugccccgcugcuggcuggucuccaacggcagcuaccucaacgagacccacuucuccgacgacaucgagcagcaggccgacaacaugaucaccgagaugcugcagaaggaguacauggaccggcagggcaagacgccgcuggggcucguggaccuguucguguucagcaccuccuucuaccugaucagcaucuuccugcaccucgucaagauccccacccaccgccacgugaucggcaagcccugccccaagccgcaccggcugaaccacauggggaucugcuccugcggccuguacaagcaccccggggugcccgucaaguggaagcgcugaggacuaguuauaagacugacuagcccgaugggccucccaacgggcccuccuccccuccuugcaccgagauuaaucaaaggcucuuuucagagccaccaaaaaaaaaaaaaaaaaaaaaaaaaaaaaaaaaaaaaaaaaaaaaaaaaaaaaaaaaaaaaaaaagaauu

SEQ ID NO: 24311 - RNA, 1655 nt, Artificial Sequence
  mRNA product Design i-3 (hSL-A64-N5) comprising derived and/or modified sequence from LASV(LASV237-NIG-2010;Clade II)__AIT17638__GPCmut2 (opt1)
aggagaaagcuuaccaugggccagaucaucaccuucuuccaggaggugccccacgucaucgaggaggugaugaacaucgugcugaucgcccucagccugcuggccauccucaaggggaucuacaacgucgcgaccugcggccuguucgggcugguguccuuccuccugcugugcggccgcagcugcuccacgaccuacaaggggguguacgagcuccagacccuggagcuggacauggccagccucaacaugugcaugccgcuguccugcaccaagaacaacagccaccacuacaucauggucggcaacgagacgggccuggagcucacccugaccaacaccuccaucaucaaccacaaguucugcaaccugagcgacgcccacaagaaggaccucuacgaccacgcccugauguccaucaucagcacguuccaccuguccauccccaacuucaaccaguacgaggccaugagcugcgacuucaacgggggcaagaucuccgugcaguacaaccucagccacaccuacgcgguggacgccgccaaccacugcgggaccaucgccaacggcguccugcagaccuucaugcggauggcguggggcggguccuacaucgcccuggacagcggcaagggguccugggacugcaucaugacgagcuaccaguaccucaucauccagaacaccaccugggaggaccacugccaguucucccgccccagccccaucggcuaccuggggcugcucagccagcggacccgcgacaucuacaucucccggcgccggcgcggcacguucaccuggacccugagcgacuccgagggcaacgagacccccgggggcuacugccugacgcgguggaugcucaucgaggccgagcugaagugcuucgggaacaccgccguggccaagugcaacgagaagcacgacgaggaguucugcgacaugcugcgccucuucgacuucugcaagcaggcgauccggcgccugaagaccccggcccagaugagcauccagcugaucaacaaggccgugaacgcccucaucaacgaccagcugaucaugaagaaccaccuccgggacaucaugggcauccccuacugcaacuacuccaaguacugguaccugaaccacaccgucacggggaagaccagccugccccgcugcuggcugguguccaacggcagcuaccucaacgagacccacuucuccgacgacaucgagcagcaggccgacaacaugaucaccgagcugcugcagaaggaguacauggaccggcagggcaagacgccgcucgggcugguggaccuguucgucuucagcaccuccuucuaccugaucagcaucuuccuccaccugaucaagauccccacccaccgccacaucaccggcaagcccugccccaagccgcaccggcugaaccacauggggaucugcuccugcggccucuacaagcaccccggggugcccgugaaguggaagcgcugaggacuaguuauaagacugacuagcccgaugggccucccaacgggcccuccuccccuccuugcaccgagauuaaucaaaggcucuuuucagagccaccaaaaaaaaaaaaaaaaaaaaaaaaaaaaaaaaaaaaaaaaaaaaaaaaaaaaaaaaaaaaaaaaagaauu

SEQ ID NO: 24312 - RNA, 1655 nt, Artificial Sequence
  mRNA product Design i-3 (hSL-A64-N5) comprising derived and/or modified sequence from LASV(LASV253-NIG-2011;Clade II)__AIT17670__GPCmut2 (opt1)
aggagaaagcuuaccaugggccagaucaucaccuucuuccaggaggugccccacgucaucgaggaggugaugaacaucgugcugaucgcccucagccugcuggccauccucaaggggaucuacaacgucgcgaccugcggccuguucgggcugguguccuuccuccugcugugcggccgcagcugcuccacgaccuacaaggggguguacgagcuccagacccuggagcuggacauggccagccucaacaugugcaugccgcuguccugcaccaagaacaacagccaccacuacaucauggucggcaacgagacgggccuggagcucacccugaccaacaccuccaucaucaaccacaaguucugcaaccugagcgacgcccacaagaagaaccucuacgaccacgcccugauguccaucaucagcacguuccaccuguccauccccaacuucaaccaguacgaggccaugagcugcgacuucaacgggggcaagaucuccgugcaguacaaccucagccacaccuacgcgguggacgccgccaaccacugcgggaccaucgccaacggcguccugcagaccuucaugcggauggcguggggcggguccuacaucgcccuggacagcggcaagggguccugggacugcaucaugacgagcuaccaguaccucaucauccagaacaccaccugggaggaccacugccaguucucccgccccagccccaucggcuaccuggggcugcucagccagcggacccgcgacaucuacaucucccggcgccggcgcggcacguucaccuggacccugagcgacuccgagggcaacgagacccccgggggcuacugccugacgcgguggaugcucaucgaggccgagcugaagugcuucgggaacaccgccguggccaagugcaacgagaagcacgacgaggaguucugcgacaugcugcgccucuucgacuucugcaagcaggcgauccggcgccugaaggccccggcccagaugagcauccagcugaucaacaaggccgugaacgcccucaucaacgaccagcugaucaugaagaaccaccuccgggacaucaugggcauccccuacugcaacuacuccaaguacugguaccugaaccacaccgucaccgggcgcacgagccugccccggugcuggcugguguccaacggcagcuaccucaacgagacccacuucuccgacgacaucgagcagcaggcggacaacaugaucaccgagcugcugcagaaggaguacaucgaccgccagggcaagaccccgcucgggcugguggaccuguucgucuucagcacguccuucuaccugaucagcaucuuccuccaccuggugaagauccccacccaccggcacaucaucggcaagcccugccccaagccgcaccgccugaaccacauggggaucugcuccugcggccucuacaagcaccccggggugcccgucaaguggaagcggugaggacuaguuauaagacugacuagcccgaugggccucccaacgggcccuccuccccuccuugcaccgagauuaaucaaaggcucuuuucagagccaccaaaaaaaaaaaaaaaaaaaaaaaaaaaaaaaaaaaaaaaaaaaaaaaaaaaaaaaaaaaaaaaaagaauu

SEQ ID NO: 24313 - RNA, 1655 nt, Artificial Sequence
  mRNA product Design i-3 (hSL-A64-N5) comprising derived and/or modified sequence from LASV(LASV254-NIG-2011;Clade II)__AIT17674__GPCmut2 (opt1)
aggagaaagcuuaccaugggccagaucaucaccuucuuccaggaggugccccacgucaucgaggaggugaugaacaucgugcugaucgcccucagccugcuggccauccucaaggggaucuacaacgucgcgaccugcggccuguucgggcugguguccuuccuccugcugugcggccgcagcugcuccacgaccuacaaggggguguacgagcuccagacccuggagcuggacaugaccaaccucaacaugugcaugccgcugagcugcacgaagaacaacucccaccacuacaucauggucggcaacgagaccggccuggagcucacccugaccaacacgagcaucaucaaccacaaguucugcaaccuguccgacgcccacaagaagaaccucuacaaccacgcccugaugagcaucaucuccaccuuccaccugagcauccccaacuucaaccaguacgaggccauguccugcgacuucaacgggggcaagaucagcgugcaguacaaccucucccacagcuacgccguggacgcggccaaccacugcgggaccaucgccaacggcguccugcagaccuucaugcggauggccuggggcggguccuacaucgcgcuggacagcggcaaggggaacugggacugcaucaugacguccuaccaguaccucaucauccagaacaccaccugggaggaccacugccaguucagccgccccucccccaucggcuaccuggggcugcucagccagcggacccgcgacaucuacaucagccggcgccggcgcggcacguucaccuggacccuguccgacagcgagggcaacgagacccccgggggcuacugccugacgcgguggaugcucaucgaggccgagcugaagugcuucgggaacaccgccguggccaagugcaacgagaagcacgacgaggaguucugcgacaugcugcgccucuucgacuucugcaagcaggccauccggcgccugaagaccccggcgcaggccaacauccagcugaucaacaaggccgugaacgcccucaucaacgaccagcugaucaugaagaaccaccuccgggacaucaugggcauccccuacugcaacuacuccaaguacugguaccugaaccacaccgucacggggaagaccagccugccccgcugcuggcugguguccaacggcagcuaccucaacgagacccacuucuccgacgacaucgagcagcaggccgacaacaugaucaccgagcugcugcagaaggaguacauggaccggcagggcaagacgccgcucgggcugguggaccuguucgucuucagcaccuccuucuaccugaucagcaucuuccuccaccuggugaagauccccacccaccgccacgugaucggcaagcccugccccaagccgcaccggcugaaccacauggggaucugcuccugcggccucuacaagcaccccgggguccccgugaaguggaagcgcugaggacuaguuauaagacugacuagcccgaugggccucccaacgggcccuccuccccuccuugcaccgagauuaaucaaaggcucuuuucagagccaccaaaaaaaaaaaaaaaaaaaaaaaaaaaaaaaaaaaaaaaaaaaaaaaaaaaaaaaaaaaaaaaaagaauu

SEQ ID NO: 24314 - RNA, 1655 nt, Artificial Sequence
  mRNA product Design i-3 (hSL-A64-N5) comprising derived and/or modified sequence from LASV(Nig08-A19;Clade III)__ADU56618__GPCmut2 (opt1)
aggagaaagcuuaccaugggccagaucgugaccuucuuccaggaggucccccacgugaucgaggaggugaugaacaucguccugaucgcccucagcauccuggccauccugaaggggcucuacaacaucgcgaccugcggccugaucgggcuggugacguuccuccugcuguccggccgcagcugcuccaugaccuacaaggggguguacgagcuccagacccuggagcugaacaugaacacccucaacaugugcaugccgcugagcugcacgaagaacaacucccaccacuacaucauggucggcaacgagaccggccuggagcucacccugaccaacacgagccugcuccaccacaaguucugcaaccuguccgacgcccacaagaagaaccuguacgaccacacccucaugagcaucaucuccaccuuccaccugagcauccccaacuucaaccaguacgaggccauguccugcgacuucaacgggggcaagaucaccgugcaguacaaccugagccacuccuacgccaucgacgccgcgaaccacugcgggacgguggccaacggcguccuccagaccuucaugcggauggccuggggcgggagcuacaucgcccuggacuccggccgcgggaagugggacugcaucaugaccagcuaccaguaccugaucauccagaacaccacgugggaggaccacugccaguucucccggcccagccccaucggcuaccucgggcugcugucccagcgcacccgggacaucuacaucagccgccggcgccggggcaccuucaccuggacgcucagcgacuccgagggcaacgagacccccgggggcuacugccugacccgcuggaugcugaucgaggcggagcucaagugcuucgggaacaccgccguggccaagugcaacgagaagcacgacgaggaguucugcgacaugcugcggcuguucgacuucugcaagcaggccauccgccggcucaaggccccggcgcagaugagcauccagcugaucaacaaggccgugaacgcccugaucaacgaccagcucaucaugaagaaccaccuccgcgacaucaugggcauccccuacugcaacuacuccaaguacugguaccugaaccacacgagcaccgggcggaccucccugccccgcugcuggcuggucagcaacggcuccuaccugaacgagacccacuucagcgacgacaucgagcagcaggccgacaacaugaucacggagaugcuccagaaggaguaccuggaccggcagggcaagaccccgcuggggcugguggaccucuucguguucuccaccagcuucuaccugaucuccaucuuccugcaccucgucaagauccccacccaccgccacaucgugggcaagcccugccccaagccgcaccggcugaaccacauggggaucugcagcugcggccuguacaagcagcccggggugcccguccgcuggaagcggugaggacuaguuauaagacugacuagcccgaugggccucccaacgggcccuccuccccuccuugcaccgagauuaaucaaaggcucuuuucagagccaccaaaaaaaaaaaaaaaaaaaaaaaaaaaaaaaaaaaaaaaaaaaaaaaaaaaaaaaaaaaaaaaaagaauu

SEQ ID NO: 24315 - RNA, 1658 nt, Artificial Sequence
  mRNA product Design i-3 (hSL-A64-N5) comprising derived and/or modified sequence from LASV(G1180-SLE-2010;Clade IV)__AIT17168__GPCmut2 (opt1)
aggagaaagcuuaccaugggccagaucgugaccuucuuccaggaggucccccacgugaucgaggaggugaugaacaucguccugaucgcccucagcauccuggccgugcugaaggggcucuacaacuucgcgaccugcggccugguggggcugcucacguuccugcugcucugcggccgcuccugcaccgccagccgguacaagggggucuacgagcugcagacccuggagcucaacauggagacccugaacaugugcaugccgcuguccugcacgaagaacaacagccaccacuacaucauggugggcaacgagaccggccucgagcugacccugaccaacacguccaucaucaaccacaaguucugcaaccucagcgacgcccacaagaagaaccuguacgaccacgcccugauguccaucaucagcaccuuccaccucuccauccccaacuucaaccaguacgaggccaugagcugcgacuucaacgggggcaagaucuccgugcaguacaaccugagccacuccuacgcgggggacgccgccaaccacugcggcaccgucgccaacggggugcugcagaccuucaugcgcauggcguggggcggcagcuacaucgcccucgacuccgggcacggcagcugggacugcaucaugacguccuaccaguaccugaucauccagaacaccaccugggaggaccacugccaguucagccggcccucccccaucggguaccugggccuccugagccagcgcacccgggacaucuacaucagccgccggcgccggggcacguucaccuggacccuguccgacagcgaggggaaggacaccccgggcggguacugccucacgcgcuggaugcugaucgaggccgagcugaagugcuucggcaacaccgccguggccaagugcaacgagaagcacgacgaggaguucugcgacaugcuccggcuguucgacuucugcaagcaggcgauccagcgccugaaggcccccgcccagauguccauccagcucaucaacaaggccgucaacgcccugaucaacgaccagcugaucaugaagaaccaccuccgggacaucauggggauccccuacugcaacuacagcaaguacugguaccugaaccacaccaccacgggcaagaccucccugcccaagugcuggcucgugagcaacggcuccuaccugaacgagacccacuucagcgacgacaucgagcagcaggcggacaacaugaucaccgagaugcugcagaaggaguacauggagcgccaggggaagacgccgcucggccugguggaccuguucgucuucuccaccagcuucuaccugaucuccaucuuccuccaccuggugaagauccccacccaccggcacaucgugggcaagagcugccccaagccccaccgccugaaccacauggggaucugcuccugcgggcucuacaagcagccgggcguccccgugaaguggaagcggugaggacuaguuauaagacugacuagcccgaugggccucccaacgggcccuccuccccuccuugcaccgagauuaaucaaaggcucuuuucagagccaccaaaaaaaaaaaaaaaaaaaaaaaaaaaaaaaaaaaaaaaaaaaaaaaaaaaaaaaaaaaaaaaaagaauu

SEQ ID NO: 24316 - RNA, 1658 nt, Artificial Sequence
  mRNA product Design i-3 (hSL-A64-N5) comprising derived and/or modified sequence from LASV(G1442-SLE-2011;Clade IV)__AIT17180__GPCmut2 (opt1)
aggagaaagcuuaccaugggccagaucgugaccuucuuccaggaggucccccacgugaucgaggaggugaugaacaucguccugaucgcccucagcauccuggccgugcugaaggggcucuacaacguggcgaccugcggccugaucgggcuggucacguuccuccugcugugcggccgcuccugcaccaccacccucuacaaggggguguacgagcugcagacgcuggagcucaacauggagacccugaacaugugcaugccgcugagcugcaccaagaacaacucccaccacuacauccgggugggcaacgagaccggccucgagcugacgcugaccaacaccagcaucaucaaccacaaguucugcaaccucuccgacgcccacaagaagaaccuguacgaccacgcccugaugagcaucaucuccaccuuccaccucagcauccccaacuucaaccaguacgaggccauguccugcgacuucaacgggggcaagaucagcguccaguacaaccugucccacagcuacgccggggacgcggccaaccacugcggcacgguggccaacggggugcugcagaccuucaugcgcauggccuggggcggcuccuacaucgcgcucgacagcgggcggggcaacugggacugcaucaugaccuccuaccaguaccugaucauccagaacaccacgugggacgaccacugccaguucagccgccccucccccaucggguaccugggccuccugagccagcggacccgcgacgucuacaucucccggcgccggcgcggcaccuucaccuggacgcugagcgacagcgaggggaaggacaccccgggcggguacugccucacccgguggaugcugaucgaggccgagcugaagugcuucggcaacaccgccguggccaagugcaacgagaagcacgacgaggaguucugcgacaugcuccgccuguucgacuucugcaagcaggccauccagcggcugaaggcgcccgcccagauguccauccagcucaucaacaaggccgugaacgcccugaucaacgaccagcugaucaugaagaaccaccuccgcgacaucauggggauccccuacugcaacuacagcaaguacugguaccugaacaacacggccaccggcaagaccucccugcccaagugcuggcucaucagcaacggcuccuaccugaacgagacccacuucagcgacgacaucgagcaggaggcggacaacaugaucacggagaugcugcagaaggaguacauggagcggcaggggaagaccccgcucggccuggucgaccuguucguguucuccaccagcuucuaccugaucuccaucuuccuccaccuggugaagauccccacccaccgccacaucgucggcaagagcugccccaagccccaccggcugaaccacauggggaucugcuccugcgggcucuacaagcagccgggcgugcccgugcgcuggaagcggugaggacuaguuauaagacugacuagcccgaugggccucccaacgggcccuccuccccuccuugcaccgagauuaaucaaaggcucuuuucagagccaccaaaaaaaaaaaaaaaaaaaaaaaaaaaaaaaaaaaaaaaaaaaaaaaaaaaaaaaaaaaaaaaaagaauu

SEQ ID NO: 24317 - RNA, 1658 nt, Artificial Sequence
  mRNA product Design i-3 (hSL-A64-N5) comprising derived and/or modified sequence from LASV(G3010-SLE-2013;Clade IV)__AIT17344__GPCmut2 (opt1)
aggagaaagcuuaccaugggccagaucgugaccuucuuccaggaggucccccacgugaucgaggaggugaugaacaucguccugaucgcccucagcauccuggccgugcugaaggggcucuacaacuucgcgaccugcggccugguggggcuggucacguuccuccugcugugcggccgcuccugcaccaccagccucuacaaggggguguacgagcugcagacccuggagcucaacauggagacgcugaacaugugcaugccgcuguccugcaccaagaacaacagccaccacuacaucauggugggcaacgagaccggccucgagcugacccugacgaacaccuccaucaucaaccacaaguucugcaaccucagcgacgcccacaagaagaaccuguacaaccacgcccugauguccaucaucagcaccuuccaccucuccauccccaacuucaaccaguacgaggccaugagcugcgacuucaacgggggcaagaucuccguccaguacaaccugagccacuccuacgccggggacgcggccagccacugcggcaccguggccaacggggugcugcagacguucaugcggauggccuggggcggcuccuacaucgcgcucgacagcggguacggcaagugggacugcaucaugaccuccuaccaguaccugaucauccagaacaccaccugggaggaccacugccaguucagccgccccucccccaucggguaccugggccuccugagccagcggacgcgcgacaucuacaucagccggcgccggcgcggcaccuucaccuggacccuguccgacagcgaggggaaggacacgccgggcggguacugccucacccgguggaugcugaucgaggccgagcugaagugcuucggcaacaccgccgucgccaagugcaacgagaagcacgacgaggaguucugcgacaugcuccgccuguucgacuucugcaagcaggccauccagcggcugaagacccccgcgcagauguccauccagcucaucaacaaggccgugaacgcccugaucaacgaccagcugaucaugaagaaccaccuccgcgacaucauggggauccccuacugcaacuacagcaaguacugguaccugaaccacacgaccaccggcaagaccucccugcccaagugcuggcucgugagcaacggcuccuaccugaacgagacgcacuucagcgacgacaucgagcagcaggccgacaacaugaucaccgagaugcugcagaaggaguacauggagcggcaggggaagaccccgcucggccuggucgaccuguucguguucuccaccagcuucuaccugaucuccaucuuccuccaccuggugaagauccccacgcaccgccacaucgucggcaagagcugccccaagccccaccggcugaaccacauggggaucugcuccugcgggcucuacaagcagccgggcgugcccgugcgcuggaagcggugaggacuaguuauaagacugacuagcccgaugggccucccaacgggcccuccuccccuccuugcaccgagauuaaucaaaggcucuuuucagagccaccaaaaaaaaaaaaaaaaaaaaaaaaaaaaaaaaaaaaaaaaaaaaaaaaaaaaaaaaaaaaaaaaagaauu

SEQ ID NO: 24318 - RNA, 1658 nt, Artificial Sequence
  mRNA product Design i-3 (hSL-A64-N5) comprising derived and/or modified sequence from LASV(G502-SLE-2009;Clade IV)__AIT17126__GPCmut2 (opt1)
aggagaaagcuuaccaugggccagaucgugaccuucuuccaggaggucccccacgugaucgaggaggugaugaacaucguccugaucgcccucagcauccuggccgugcugaaggggcucuacaacuucgcgaccugcggccugguggggcugcucacguuccugcugcucugcggccgcuccugcaccaccgggcuguacaagggcgucuacgagcugcagacccucgagcugaacauggagacgcugaacaugugcaugccgcucagcugcaccaagaacaacucccaccacuacaucauggugggcaacgagaccgggcuggagcugacccucacgaacaccagcaucaucaaccacaaguucugcaaccuguccgacgcccacaagaagaaccuguacgaccacgcccucaugagcaucaucuccaccuuccaccugagcauccccaacuucaaccaguacgaggccauguccugcgacuucaacggcgggaagaucagcgugcaguacaaccugucccacagcuacgccggcgacgcggccgaccacugcgggaccgucgccaacggcgugcuccagacguucaugcggauggccuggggcggguccuacaucgcgcuggacagcggccgcgggcggugggacugcaucaugaccuccuaccaguaccugaucauccagaacaccaccugggaggaccacugccaguucagccgccccucccccaucggcuaccucggccugcugagccagcggacgcgcgacaucuacaucucccggcgccggcgcgggaccuucaccuggacccucagcgacagcgagggcaaggacacgcccgggggcuacugccugacccgguggaugcugaucgaggccgagcucaagugcuucgggaacaccgccguggccaagugcaacgagaagcacgacgaggaguucugcgacaugcugcgccuguucgacuucugcaagcaggccauccagcggcucaaggcgccggcccagauguccauccagcugaucaacaaggccgucaacgcccugaucaacgaccagcucgugaugaagaaccaccuccgcgacaucaugggcauccccuacugcaacuacagccgguacugguaccugaaccacaccacgaccggccgcaccucccugcccaagugcuggcuggugagcaacggguccuaccugaacgagacccacuucagcgacgacaucgagcagcaggccgacaacaugaucacggagaugcuccagaaggaguacauggagcggcagggcaagaccccgcuggggcuggucgaccuguucguguucuccaccagcuucuaccucaucuccaucuuccugcaccuggugaagauccccacccaccgccacaucgucggcaagagcugccccaagccccaccggcucaaccacauggggaucugcuccugcggccuguacaagcagccgggcgugcccgugaaguggaagcgcugaggacuaguuauaagacugacuagcccgaugggccucccaacgggcccuccuccccuccuugcaccgagauuaaucaaaggcucuuuucagagccaccaaaaaaaaaaaaaaaaaaaaaaaaaaaaaaaaaaaaaaaaaaaaaaaaaaaaaaaaaaaaaaaaagaauu

SEQ ID NO: 24319 - RNA, 1658 nt, Artificial Sequence
  mRNA product Design i-3 (hSL-A64-N5) comprising derived and/or modified sequence from LASV(G733-SLE-2010;Clade IV)__AIT17154__GPCmut2 (opt1)
aggagaaagcuuaccaugggccagaucgugaccuucuuccaggaggucccccacgugaucgaggaggugaugaacaucguccugaucgcccucagcauccuggccgugcugaaggggcucuacaacuucgcgaccugcggcaucguggggcuggucuccuuccugcuccugugcggccgcagcugcacgaccucccuguacaaggggguguacgagcuccagacccuggagcugaacauggagacccucaacaugugcaugccgcugagcugcacgaagaacaacucccaccacuacaucauggugggcaacgagaccggccuggagcucacccugaccaacacgagcaucaucaaccacaaguucugcaaccuguccgacgcccacaagaagaaccucuacgaccacgcccugaugagcaucaucuccaccuuccaccugagcauccccaacuucaaccaguacgaggccauguccugcgacuucaacgggggcaagaucagcguccaguacaaccucucccacagcuacgccggggacgcggccaaccacugcggcaccaucgccaacggggugcugcagaccuucaugcggauggccuggggcggcuccuacaucgcgcuggacagcgggcgcgaccggugggacugcaucaugacguccuaccaguaccucaucauccagaacaccaccugggaggaccacugccaguucagccgccccucccccaucggcuaccuggggcugcucagccagcggacccgcgacaucuacaucagccggcgccggcgcggcacguucaccuggacccuguccgacagcgagggcaaggacacccccgggggcuacugccugacgcgguggaugcucaucgaggccgagcugaagugcuucgggaacaccgccguggccaagugcaacgagaagcacgacgaggaguucugcgacaugcugcgccucuucgacuucugcaagcaggccauccagcggcugaaggcgccggcccagauguccauccagcugaucaacaaggccgucaacgcccucaucaacgaccagcugaucaugaagaaccaccuccgcgacaucaugggcauccccuacugcaacuacagcaaguacugguaccugaaccacaccaccacggggaagaccucccugcccaagugcuggcuggugagcaacggcuccuaccucaacgagacccacuucagcgacgacaucgagcagcaggccgacaacaugaucaccgagaugcugcagaaggaguacauggagcggcagggcaagacgccgcuggggcucguggaccuguucgucuucuccaccagcuucuaccugaucuccaucuuccugcaccucgugaagauccccacccaccgccacguggucggcaagagcugccccaagccccaccggcugaaccacauggggaucugcuccugcggccuguacgggcagccgggcgugcccgugaaguggaagcgcugaggacuaguuauaagacugacuagcccgaugggccucccaacgggcccuccuccccuccuugcaccgagauuaaucaaaggcucuuuucagagccaccaaaaaaaaaaaaaaaaaaaaaaaaaaaaaaaaaaaaaaaaaaaaaaaaaaaaaaaaaaaaaaaaagaauu

SEQ ID NO: 24320 - RNA, 1658 nt, Artificial Sequence
  mRNA product Design i-3 (hSL-A64-N5) comprising derived and/or modified sequence from MOPV/LASV reassortant(IGS-1;Clade IV)__AFY05576__GPCmut2 (opt1)
aggagaaagcuuaccaugggccagaucgugaccuucuuccaggaggucccccacgugaucgaggaggugaugaacaucguccugaucgcccucagcgugcuggccgugcugaaggggcucuacaacuucgcgaccugcggccuggucgggcuggugacguuccuccugcugugcggccgcuccugcaccaccagccucuacaaggggguguacgagcugcagacccuggagcucaacauggagacgcugaacaugugcaugccgcuguccugcaccaagaacaacagccaccacuacaucauggucggcaacgagaccggccucgagcugacccugacgaacaccuccaucaucaaccacaaguucugcaaccucagcgacgcccacaagaagaaccuguacgaccacgcccugauguccaucaucagcaccuuccaccucuccauccccaacuucaaccaguacgaggccaugagcugcgacuucaacgggggcaagaucuccgugcaguacaaccugagccacuccuacgccggggacgcggccaaccacugcggcaccguggccaacgggguccugcagacguucaugcggauggccuggggcggcagcuacaucgcgcucgacuccgggcgcggcaacugggacugcaucaugaccagcuaccaguaccugaucauccagaacaccaccugggaggaccacugccaguucucccggcccagccccaucggguaccugggccuccugucccagcgcacgcgggacaucuacaucagccgccggcgccggggcaccuucaccuggacccugagcgacuccgagggggaggacacgccgggcggguacugccucacccgcuggaugcugaucgaggccgagcugaagugcuucggcaacaccgccguggccaagugcaacgagaagcacgacgaggaguucugcgacaugcuccggcuguucgacuucugcaagcaggccauccagcgccugaaggcgcccgcccagaugagcauccagcucaucaacaaggccgugaacgcccugaucaacgaccagcugaucaugaagaaccaccuccgggacaucauggggauccccuacugcaacuacuccaaguacugguaccugaaccacaccacgaccggccgcaccagccugcccaagugcuggcucgucuccaacggcagcuaccugaacgagacccacuucuccgacgacaucgagcagcaggccgacaacaugaucacggagaugcugcagaaggaguacauggagcggcaggggaagaccccgcucggccugguggaccuguucguguucagcaccuccuucuaccugaucagcaucuuccuccaccuggucaagauccccacccaccgccacaucguggggaaguccugccccaagccccaccggcugaaccacaugggcaucugcagcugcgggcucuacaagcagccgggcgugcccgucaaguggaagcgcugaggacuaguuauaagacugacuagcccgaugggccucccaacgggcccuccuccccuccuugcaccgagauuaaucaaaggcucuuuucagagccaccaaaaaaaaaaaaaaaaaaaaaaaaaaaaaaaaaaaaaaaaaaaaaaaaaaaaaaaaaaaaaaaaagaauu

SEQ ID NO: 24321 - RNA, 1658 nt, Artificial Sequence
  mRNA product Design i-3 (hSL-A64-N5) comprising derived and/or modified sequence from LASV(LM765-SLE-2012;Clade IV)__AIT17814__GPCmut2 (opt1)
aggagaaagcuuaccaugggccagaucgugaccuucuuccaggaggucccccacgugaucgaggaggugaugaacaucguccugaucgcccucagcauccuggccgugcugaaggggcucuacaacuucgcgaccugcggccugguggggcuggucacguuccuccugcugugcggccgcuccugcaccaccagccucuacaaggggguguacgagcugcagacccuggagcucaacauggagacgcugaacaugugcaugccgcuguccugcaccaagaacaacagccaccacuacaucauggugggcaacgagaccggccucgagcugacccugacgaacaccuccaucaucgaccacaaguucugcaaccucagcgacgcccaccggaagaaccuguacgaccacgcccugauguccaucaucagcaccuuccaccucuccauccccaacuucaaccaguacgaggccaugagcugcgacuucaacgggggcaagaucuccguccaguacaaccugagccacuccuacgccaaggacgcggccgaccacugcgggaccguggccaacggcgugcugcagacguucaugcgcauggccuggggcgggagcuacaucgcgcucgacuccggccgggggcgcugggacugcaucaugaccagcuaccaguaccugaucauccagaacaccaccugggaggaccacugccaguucucccggcccagccccaucggcuaccuggggcuccugucccagcgcacgcgggacaucuacaucagccgccggcgccggggcaccuucaccuggacccugagcgacuccgagggcaaggacacgcccgggggcuacugccucacccgcuggaugcugaucgaggccgagcugaagugcuucgggaacaccgccgucgccaagugcaacgagaagcacgacgaggaguucugcgacaugcuccggcuguucgacuucugcaagcaggccauccagcgccugaaggcgccggcccagaugagcauccagcucaucaacaaggccgugaacgcccugaucaacgaccagcugaucaugaagaaccaccuccgggacaucaugggcauccccuacugcaacuacuccaaguacugguaccugaaccacaccacgaccgggaagaccagccugcccaagugcuggcucguguccaacggcagcuaccugaacgagacccacuucuccgacgacaucgagcagcaggccgacaacaugaucacggagaugcugcagaaggaguacauggagcgccagggcaagaccccgcucgggcuggucgaccuguucguguucagcaccuccuucuaccugaucagcaucuuccuccaccuggugaagauccccacccaccggcacaucgucggcaagcccugccccaagccgcaccgccugaaccacauggggaucugcuccugcggccucuacaagcagcccggggugcccgugaaguggaagcggugaggacuaguuauaagacugacuagcccgaugggccucccaacgggcccuccuccccuccuugcaccgagauuaaucaaaggcucuuuucagagccaccaaaaaaaaaaaaaaaaaaaaaaaaaaaaaaaaaaaaaaaaaaaaaaaaaaaaaaaaaaaaaaaaagaauu

SEQ ID NO: 24322 - RNA, 1658 nt, Artificial Sequence
  mRNA product Design i-3 (hSL-A64-N5) comprising derived and/or modified sequence from LASV(LM776-SLE-2012;Clade IV)__AIT17824__GPCmut2 (opt1)
aggagaaagcuuaccaugggccagaucgugaccuucuuccaggaggucccccacgugaucgaggaggugaugaacaucguccugaucgcccucagcauccuggccgugcugaaggggcucuacaacuucgcgaccugcggccugguggggcuggucacguuccuccugcugugcggccgcuccugcaccaccagcguguacaaggggguguacgagcuccagacccuggagcugaacauggagacgcucaacaugugcaugccgcuguccugcaccaagaacaacagccaccacuacaucauggucggcaacgagaccggccuggagcucacccugacgaacaccuccaucaucaaccacaaguucugcaaccugagcgacgcccacaagaagaaccucuacgaccacgcccugauguccaucaucagcaccuuccaccuguccauccccaacuucaaccaguacgaggccaugagcugcgacuucaacgggggcaagaucuccgugcaguacaaccucagccacuccuacgccggggacgcggccaaccacugcggcaccguggccaacgggguccugcagacguucaugcggauggccuggggcggcagcuacaucgcgcuggacuccgggcacggcaagugggacugcaucaugaccagcuaccaguaccucaucauccagaacaccaccugggaggaccacugccaguucucccgccccagccccaucggguaccugggccugcucucccagcggacgcgcgacaucuacaucagccggcgccggcgcggcaccuucaccuggacccugagcgacuccgaggggaaggacacgccgggcggguacugccugacccgguggaugcucaucgaggccgagcugaagugcuucggcaacaccgccguggccaagugcaacgagaagcacgacgaggaguucugcgacaugcugcgccucuucgacuucugcaagcaggccauccagcggcugaaggcgcccgcccagaugagcauccagcugaucaacaaggccgugaacgcccucaucaacgaccagcugaucaugaagaaccaccuccgcgacaucauggggauccccuacugcaacuacuccaaguacugguaccugaaccacaccacgaccggcaagaccagccugcccaagugcuggcuggucuccaacggcagcuaccucaacgagacccacuucuccgacgacaucgagcagcaggccgacaacaugaucacggagaugcugcagaaggaguacauggagcggcaggggaagaccccgcugggccucguggaccuguucguguucagcaccuccuucuaccugaucagcaucuuccugcaccucgucaagauccccacccaccgccacaucguggggaaguccugccccaagccccaccggcugaaccacaugggcaucugcagcugcgggcuguacaagcagccgggcgugcccguccgcuggaagcggugaggacuaguuauaagacugacuagcccgaugggccucccaacgggcccuccuccccuccuugcaccgagauuaaucaaaggcucuuuucagagccaccaaaaaaaaaaaaaaaaaaaaaaaaaaaaaaaaaaaaaaaaaaaaaaaaaaaaaaaaaaaaaaaaagaauu

SEQ ID NO: 24323 - RNA, 1658 nt, Artificial Sequence
  mRNA product Design i-3 (hSL-A64-N5) comprising derived and/or modified sequence from LASV(Mad39;Clade IV)__ANH09722__GPCmut2 (opt1)
aggagaaagcuuaccaugggccagaucgugaccuucuuccaggaggucccccacgugaucgaggaggugaugaacaucguccugaucgcccucagcauccuggccgugcugaaggggcucuacaacguggcgaccugcggccugaucgggcuggucacguuccuccugcugugcggccgcuccugcaccaccacccucuacaaggggguguacgagcugcaggcccuggagcucaacauggagacgcugaacaugugcaugccgcugagcugcaccaagaacaacucccaccacuacauccgggugggcaacgagaccggccucgagcugacccugacgaacaccagccucaucaaccacaaguucugcaaccuguccgacgcccacaagaagaaccuguacgaccacgcccucaugagcaucaucuccaccuuccaccugagcauccccaacuucaaccaguacgaggccauguccugcgacuucaacgacgggaagaucagcguccaguacaaccugucccacaccuacgcgggcgacacggccaaccacugcgggaccguggccaacggcgugcuccagaccuucaugcgcauggccuggggcgggagcuacaucgcgcuggacuccggccgcgggggcugggacugcaucaugaccagcuaccaguaccugaucauccagaacacgaccugggaggaccacugccaguucucccggcccagccccaucggguaccucggccugcugucccagcggacccgcgacaucuacaucagccggcgccggcgcggcaccuucacguggacccucuccgacagcgaggggaaggacaccccgggcggguacugccugacccgguggaugcugaucgaggccgagcucaagugcuucggcaacacggccgucgccaagugcaacgagaagcacgacgaggaguucugcgacaugcugcgccuguucgacuucugcaagcaggccauccagcggcucaaggcgcccgcccagaugagcauccagcugaucaacaaggccgugaacgcccugaucaacgaccagcucaucaugaagaaccaccuccgcgacaucauggggauccccuacugcaacuacuccaaguacugguaccugaaccacaccgugaccggcaagaccagccugcccaagugcuggcuggucuccaacggcagcuaccugaacgagacgcacuucuccgacgacaucgagcagcaggccgacaacaugaucaccgagaugcuccagaaggaguacauggagcggcaggggaagaccccgcugggccugguggaccuguucguguucagcaccuccuucuaccucaucagcaucuuccugcaccuggucaagauccccacgcaccgccacgugguggggaagcccugccccaagccgcaccggcucaaccacaugggcaucugcuccugcggguucuacaagcagcccggcguccccgugcgcuggaagcggugaggacuaguuauaagacugacuagcccgaugggccucccaacgggcccuccuccccuccuugcaccgagauuaaucaaaggcucuuuucagagccaccaaaaaaaaaaaaaaaaaaaaaaaaaaaaaaaaaaaaaaaaaaaaaaaaaaaaaaaaaaaaaaaaagaauu

SEQ ID NO: 24324 - RNA, 1658 nt, Artificial Sequence
  mRNA product Design i-3 (hSL-A64-N5) comprising derived and/or modified sequence from LASV(Z0947-SLE-2011;Clade IV)__AIT17840__GPCmut2 (opt1)
aggagaaagcuuaccaugggccagaucgugaccuucuuccaggaggucccccacgugaucgaggaggugaugaacaucguccugaucgcccucagcauccuggccgugcugaaggggcucuacaacuucgcgaccugcggccugguggggcuggucacguuccuccugcugugcggccgcuccugcaccaucagccucuacaaggggguguacgagcugcagacccuggagcucaacauggagacccugaacaugugcaugccgcuguccugcacgaagaacaacagccaccacuacaucauggugggcaacgagaccggccucgagcugacccugaccaacacguccaucaucaaccacaaguucugcaaccucagcgacgcccacaagaagaaccuguacgaccacgcccugauguccaucaucagcaccuuccaccucuccauccccaacuucaaccaguacgaggccaugagcugcgacuucaacgggggcaagaucuccguccaguacaaccugagccacuccuacgccggggacgcggccaaccacugcggcaccguggccaacggggugcugcagaccuucaugcggauggccuggggcggcagcuacaucgcgcucgacuccgggcgcgaccggugggacugcaucaugacgagcuaccaguaccugaucauccagaacaccaccugggaggaccacugccaguucucccgccccagccccaucggcuaccuggggcuccugucccagcggacccgcgacaucuacaucagccggcgccggcgcggcacguucaccuggacccugagcgacuccgagggcaaggacacccccgggggcuacugccucacgcgguggaugcugaucgaggccgagcugaagugcuucgggaacaccgccgucgccaagugcaacgagaagcacgacgaggaguucugcgacaugcuccgccuguucgacuucugcaagcaggccauccagcggcugaaggcgccggcccagaugagcauccagcucaucaacaaggccgugaacgcccugaucaacgaccagcugaucaugaagaaccaccuccgcgacaucaugggcauccccuacugcaacuacuccaaguacugguaccugaaccacaccaccacggggaagaccagccugcccaagugcuggcucguguccaacggcagcuaccugaacgagacccacuucuccgacgacaucgagcagcaggccgacaacaugaucaccgagaugcugcagaaggaguacauggagcggcagggcaagacgccgcucgggcuggucgaccuguucguguucagcaccuccuucuaccugaucagcaucuuccuccaccuggugaagauccccacccaccgccacaucgucggcaagcccugccccaagccgcaccggcugaaccacauggggaucugcuccugcggccucuacaagcagcccggggugcccgugaaguggaagcgcugaggacuaguuauaagacugacuagcccgaugggccucccaacgggcccuccuccccuccuugcaccgagauuaaucaaaggcucuuuucagagccaccaaaaaaaaaaaaaaaaaaaaaaaaaaaaaaaaaaaaaaaaaaaaaaaaaaaaaaaaaaaaaaaaagaauu

SEQ ID NO: 24325 - RNA, 1658 nt, Artificial Sequence
  mRNA product Design i-3 (hSL-A64-N5) comprising derived and/or modified sequence from LASV(Josiah;Clade IV)__NP_694870__GPCmut2 (opt4)
aggagaaagcuuaccaugggccagaucgugaccuucuuccaggaggugccccacgugaucgaggaggugaugaacaucgugcugaucgcccugagcgugcuggccgugcugaagggccuguacaacuucgccaccugcggccuggugggccuggugaccuuccugcugcugugcggcagaagcugcaccaccagccuguacaagggcguguacgagcugcagacccuggagcugaacauggagacccugaacaugugcaugccccugagcugcaccaagaacaacagccaccacuacaucauggugggcaacgagaccggccuggagcugacccugaccaacaccagcaucaucaaccacaaguucugcaaccugagcgacgcccacaagaagaaccuguacgaccacgcccugaugagcaucaucagcaccuuccaccugagcauccccaacuucaaccaguacgaggccaugagcugcgacuucaacggcggcaagaucagcgugcaguacaaccugagccacagcuacgccggcgacgccgccaaccacugcggcaccguggccaacggcgugcugcagaccuucaugagaauggccuggggcggcagcuacaucgcccuggacagcggcagaggcaacugggacugcaucaugaccagcuaccaguaccugaucauccagaacaccaccugggaggaccacugccaguucagcagacccagccccaucggcuaccugggccugcugagccagagaaccagagacaucuacaucagcagaagaagaagaggcaccuucaccuggacccugagcgacagcgagggcaaggacacccccggcggcuacugccugaccagauggaugcugaucgaggccgagcugaagugcuucggcaacaccgccguggccaagugcaacgagaagcacgacgaggaguucugcgacaugcugagacuguucgacuucugcaagcaggccauccagagacugaaggcccccgcccagaugagcauccagcugaucaacaaggccgugaacgcccugaucaacgaccagcugaucaugaagaaccaccugagagacaucaugggcauccccuacugcaacuacagcaaguacugguaccugaaccacaccaccaccggcagaaccagccugcccaagugcuggcuggugagcaacggcagcuaccugaacgagacccacuucagcgacgacaucgagcagcaggccgacaacaugaucaccgagaugcugcagaaggaguacauggagagacagggcaagaccccccugggccugguggaccuguucguguucagcaccagcuucuaccugaucagcaucuuccugcaccuggugaagauccccacccacagacacaucgugggcaagagcugccccaagccccacagacugaaccacaugggcaucugcagcugcggccuguacaagcagcccggcgugcccgugaaguggaagagaugaggacuaguuauaagacugacuagcccgaugggccucccaacgggcccuccuccccuccuugcaccgagauuaaucaaaggcucuuuucagagccaccaaaaaaaaaaaaaaaaaaaaaaaaaaaaaaaaaaaaaaaaaaaaaaaaaaaaaaaaaaaaaaaaagaauu

SEQ ID NO: 24326 - RNA, 1655 nt, Artificial Sequence
  mRNA product Design i-3 (hSL-A64-N5) comprising derived and/or modified sequence from LASV(LP;Clade I)__AAF86701__GPCmut2 (opt4)
aggagaaagcuuaccaugggccagaucaucaccuucuuccaggaggugccccacgugaucgaggaggugaugaacaucgugcugaucgcccugagccugcuggccauccugaagggccuguacaacaucgccaccugcggcaucaucggccugguggccuuccuguuccugugcggcaagagcugcagccugacccugaagggcggcuacgagcugcagacccuggagcugaacauggagacccugaacaugugcaugccccugagcugcaccaagaacagcagccaccacuacaucagagugggcaacgagaccggccuggagcugacccugaccaacaccagcaucaucaaccacaaguucugcaaccugagcgacgcccacaagaagaaccuguacgaccacgcccugaugagcaucaucagcaccuuccaccugagcauccccaacuucaaccaguacgaggccaugagcugcgacuucaacggcggcaagaucagcgugcaguacaaccugagccacagcuacgccggcgacgccgccgagcacugcggcaccguggccaacggcgugcugcagaccuucaugagaauggccuggggcggcagauacaucgcccuggacagcggcaagggcaacugggacugcaucaugaccagcuaccaguaccugaucauccagaacaccaccugggaggaccacugccaguucagcagacccagccccaucggcuaccugggccugcugagccagagaaccagagacaucuacaucagcagaagaagaagaggcaccuucaccuggacccugagcgacagcgagggcaacgagacccccggcggcuacugccugaccagauggaugcugaucgaggccgagcugaagugcuucggcaacaccgccguggccaagugcaacgagaagcacgacgaggaguucugcgacaugcugagacuguucgacuucugcaagcaggccaucagaagacugaaggcccccgcccagaugagcauccagcugaucaacaaggccgugaacgcccugaucaacgaccagcugaucaugaagaaccaccugagagacaucaugggcauccccuacugcaacuacagcaaguacugguaccugaaccacaccagcagcggcagaaccagccugcccaagugcuggcugaucagcaacggcagcuaccugaacgagacccaguucagcgacgacaucgagcagcaggccgacaacaugaucaccgagaugcugcagaaggaguacaucgagagacagggcaagaccccccugggccugguggacaucuucaucuucagcaccagcuucuaccugaucagcaucuuccugcaccugaucaagauccccacccacagacacaucgugggcaagcccugccccaagccccacagacugaaccacaugggcgugugcagcugcggccuguacaagcaccccggcgugcccaccaaguggaagagaugaggacuaguuauaagacugacuagcccgaugggccucccaacgggcccuccuccccuccuugcaccgagauuaaucaaaggcucuuuucagagccaccaaaaaaaaaaaaaaaaaaaaaaaaaaaaaaaaaaaaaaaaaaaaaaaaaaaaaaaaaaaaaaaaagaauu

SEQ ID NO: 24327 - RNA, 1655 nt, Artificial Sequence
  mRNA product Design i-3 (hSL-A64-N5) comprising derived and/or modified sequence from LASV(803213;Clade II)__AAF86703__GPCmut2 (opt4)
aggagaaagcuuaccaugggccagaucaucaccuucuuccaggaggugccccacgugaucgaggaggugaugaacaucgugcugaucgcccugagccugcuggccauccugaagggcaucuacaacguggccaccugcggccuguucggccugaucagcuuccugcugcugugcggcagaagcugcagcgugaccuacaagggcguguacgagcugcagacccuggagcugaacauggccaaccugaacaugugcaugccccugagcugcaccaagaacaacagccaccacuacaucauggugggcaacgagaccggccuggagcugacccugaccaacaccagcaucaucaaccacaaguucugcaaccugagcgacgcccacaagaagaaccuguacgaccacgcccugaugagcaucaucagcaccuuccaccugagcauccccaacuucaaccaguacgaggccaugagcugcgacuucaacggcggcaagaucagcgugcaguacaaccugagccacagcuucgccguggacgccgccaaccacugcggcaccaucgccaacggcgugcugcagaccuucaugagaauggccuggggcggcagcuacaucgcccuggacagcggcaagggcaacugggacugcaucaugaccagcuaccaguaccugaucauccagaacaccaccugggaggaccacugccaguucagcagacccagccccaucggcuaccugggccugcugagccagagaaccagagacaucuacaucagcagaagaagaagaggcaccuucaccuggacccugagcgacagcgagggcaacgaggcccccggcggcuacugccugaccagauggaugcugaucgaggccgagcugaagugcuucggcaacaccgccguggccaagugcaacgagaagcacgacgaggaguucugcgacaugcugagacuguucgacuucugcaagcaggccaucaagagacugaagacccccgcccagaugagcauccagcugaucaacaaggccgugaacgcccugaucaacgaccagcugaucaugaagaaccaccugagagacaucaugggcauccccuacugcaacuacagcagauacugguaccugaaccacaccgugaccggcaagaccagccugcccagaugcuggcuggugagcaacggcagcuaccugaacgagacccacuucagcgacgacaucgagcagcaggccgacaacaugaucaccgagaugcugcagaaggaguacauggacagacagggcaagaccccccugggccugguggaccuguucguguucagcaccagcuucuaccugaucagcaucuuccugcaccuggugaagauccccacccacagacacaucgugggcaagcccugccccaagccccacagacugaaccacaugggcaucugcagcugcggccuguacaagcaccccggcgugcccgugaaguggaagagaugaggacuaguuauaagacugacuagcccgaugggccucccaacgggcccuccuccccuccuugcaccgagauuaaucaaaggcucuuuucagagccaccaaaaaaaaaaaaaaaaaaaaaaaaaaaaaaaaaaaaaaaaaaaaaaaaaaaaaaaaaaaaaaaaagaauu

SEQ ID NO: 24328 - RNA, 1655 nt, Artificial Sequence
  mRNA product Design i-3 (hSL-A64-N5) comprising derived and/or modified sequence from LASV(GA391;Clade III)__CAA36645__GPCmut2 (opt4)
aggagaaagcuuaccaugggccagaucgugaccuucuuccaggaggugccccacgugaucgaggaggugaugaacaucgugcugaucgcccugagcauccuggccauccugaagggccuguacaacguggccaccugcggccugaucggccuggugaccuuccugcugcugagcggcagaagcugcagccugaucuacaagggcaccuacgagcugcagacccuggagcugaacauggagacccugaacaugugcaugccccugagcugcaccaagaacaacagccaccacuacaucagagugggcaacgagaccggccuggagcugacccugaccaacaccagcauccugaaccacaaguucugcaaccugagcgacgcccacaagagaaaccuguacgaccacagccugaugagcaucaucagcaccuuccaccugagcauccccaacuucaaccaguacgaggccaugagcugcgacuucaacggcggcaagaucaccgugcaguacaaccugagccacagcuucgccguggacgccgccggccacugcggcacccuggccaacggcgugcugcagaccuucaugagaauggccuggggcggcagcuacaucgcccuggacagcggcagaggcaacugggacugcaucaugaccagcuaccaguaccugaucauccagaacaccaccugggacgaccacugccaguucagcagacccagccccaucggcuaccugggccugcugagccagagaaccagagacaucuacaucagcagaagaagaagaggcaccuucaccuggacccugagcgacagcgagggcaacgagacccccggcggcuacugccugaccagauggaugcugaucgaggccgagcugaagugcuucggcaacaccgccguggccaagugcaacgagaagcacgacgaggaguucugcgacaugcugagacuguucgacuucugcaagcaggccaucagaagacugaagacccccgcccagaugagcauccagcugaucaacaaggccgugaacgcccugaucaacgaccagcugaucaugaagaaccaccugagagacaucaugggcauccccuacugcaacuacagcagauacugguaccugaaccacaccagcaccggcaagaccagccugcccagaugcuggcugaucagcaacggcagcuaccugaacgagaccaaguucagcgacgacaucgagcagcaggccgacaacaugaucaccgagaugcugcagaaggaguacaucgacagacagggcaagaccccccugggccugguggaccuguucguguucagcaccagcuucuaccugaucagcaucuuccugcaccuggugaagauccccacccacagacacaucgugggcaagcccugccccaagccccacagacugaaccacaugggcaucugcagcugcggccuguacaagcagcccggcgugcccgugagauggaagagaugaggacuaguuauaagacugacuagcccgaugggccucccaacgggcccuccuccccuccuugcaccgagauuaaucaaaggcucuuuucagagccaccaaaaaaaaaaaaaaaaaaaaaaaaaaaaaaaaaaaaaaaaaaaaaaaaaaaaaaaaaaaaaaaaagaauu

SEQ ID NO: 24329 - RNA, 1658 nt, Artificial Sequence
  mRNA product Design i-3 (hSL-A64-N5) comprising derived and/or modified sequence from LASV(AV;Clade V)__CCA30314__GPCmut2 (opt4)
aggagaaagcuuaccaugggccagaucgugaccuucuuccaggaggugccccacgugaucgaggaggugaugaacaucgugcugaucgcccugagcauccuggccgugcugaagggccuguacaacaucgccaccugcggccugaucggccugaucaccuuccugcugcugugcggcagaagcugcagcagcaaccuguacaagggcguguacgagcugcagagccuggaccugaacauggagacccugaacaugugcaugccccugagcugcaccaagaacaacagccaccacuacaucagagugggcaacgacaccggccuggagcugacccugaccaacaccagcauccugaaccacaaguucugcaaccugagcgacgcccacaagaaggaccuguacgaccacgcccugaugagcaucaucagcaccuuccaccugagcauccccaacuucaaccaguacgaggccaugagcugcgacuucaacggcggcaagaucagcgugcaguacaaccugagccacagcuacgccaucgacgccgccaaccacugcggcaccguggccaacggcauccugcagaccuucaugagaauggccuggggcggcagcuacaucgcccuggacagcggcagaggcaacugggacugcaucaugaccagcuaccaguaccugaucauccagaacaccaccugggagaaccacugccaguucagcagacccagccccaucggcuaccugggccugcugagccagagaaccagagacaucuacaucagcagaagaagaagaggcaccuucaccuggacccugagcgacagcgagggcaacgccacccccggcggcuacugccugaccagauggaugcugaucgaggccgagcugaagugcuucggcaacaccgccguggccaagugcaacgagaagcacgacgaggaguucugcgacaugcugagacuguucgacuucugcaagcaggccaucagcagacugaagagccccgcccagaugagcauccagcugaucaacaaggccgugaacgcccugaucaacgaccagcugaucaugaagaaccaccugagagacaucaugggcauccccuacugcaacuacagcaaguacugguaccugaaccacaccaucaccggcaagaccagccugcccaagugcuggcuggugagcaacggcagcuaccugaacgagacccacuucagcgacgacaucgagcagcaggccgacaacaugaucaccgagaugcugcagaaggaguacauggagagacagggcaagaccccccugggccugguggaccuguucguguucagcaccagcuucuaccugaucagcaucuuccugagacuggugaagauccccacccacagacacaucgugggcaagcccugccccaagccccacagacugaaccacaugggcaucugcagcugcggccuguacaagcagcccggcgugcccgugagauggaagagaugaggacuaguuauaagacugacuagcccgaugggccucccaacgggcccuccuccccuccuugcaccgagauuaaucaaaggcucuuuucagagccaccaaaaaaaaaaaaaaaaaaaaaaaaaaaaaaaaaaaaaaaaaaaaaaaaaaaaaaaaaaaaaaaaagaauu

SEQ ID NO: 24330 - RNA, 1655 nt, Artificial Sequence
  mRNA product Design i-3 (hSL-A64-N5) comprising derived and/or modified sequence from LASV(Togo/2016/7082;Clade VI)__AMR44577__GPCmut2 (opt4)
aggagaaagcuuaccaugggccagaucaucaccuucuuccaggaggugccccacgugaucgaggaggugaugaacaucgugcugaucgcccugagccugcuggccauccugaagggcguguacaacguggccaccugcggcaucaucggccuggugaccuuccuguuccugugcggcagaagcugcagccugaucuacaagggcagcuacgagcugcagacccuggagcugaacauggagacccugaacaugugcaugccccugagcugcaccaagaacagcagccaccacuacaucagagugggcaacgagaccggccuggagcugacccugaccaacaccagcaucaucaaccacaaguucugcaaccugagcgacgcccacaagagaaaccuguacgaccacgcccugaugagcauccugagcaccuuccaccugagcauccccaacuucaaccaguacgaggccaugagcugcgacuucaacggcggcaagaucagcgugcaguacaaccugagccacgccuacgccguggacgccgccgagcacugcggcaccguggccaacggcgugcugcagaccuucaugagaauggccuggggcggcagcuacaucgcccuggacagcggcagaggcaacugggacugcaucaugaccagcuaccaguaccugaucauccagaacaccaccugggaggaccacugccaguucagcagacccagccccaucggcuaccugggccugcugagccagagaaccagagacaucuacaucagcagaagaagaagaggcaccuucaccuggacccugagcgacagcgagggcaacgagacccccggcggcuacugccugaccagauggaugcugaucgaggccgagcugaagugcuucggcaacaccgccguggccaagugcaacgagaagcacgacgaggaguucugcgacaugcugagacuguucgacuucugcaagcaggccauccagagacugaagagccccgcccagaugagcauccagcugaucaacaaggccgugaacgcccugaucaacgaccagcugaucaugaagaaccaccugagagacaugaugggcauccccuacugcaacuacagcaaguacugguaccugaaccacaccagcagcggcagaaccagccugcccaagugcuggcuggugagcaacggcagcuaccugaacgagacccacuucagcgacgacaucgagcagcaggccgacaacaugaucaccgagaugcugcagaaggaguacaucgacagacagggcaagaccccccugggccugguggaccuguucguguucagcaccagcuucuaccugaucagcaucuuccugcaccugaucaagauccccacccacagacacaucgugggcaagcccugccccaagccccacagacugaaccacaugggcaucugcagcugcggccuguacaagcagcccggcgugcccaccagauggaagagaugaggacuaguuauaagacugacuagcccgaugggccucccaacgggcccuccuccccuccuugcaccgagauuaaucaaaggcucuuuucagagccaccaaaaaaaaaaaaaaaaaaaaaaaaaaaaaaaaaaaaaaaaaaaaaaaaaaaaaaaaaaaaaaaaagaauu

SEQ ID NO: 24331 - RNA, 1655 nt, Artificial Sequence
  mRNA product Design i-3 (hSL-A64-N5) comprising derived and/or modified sequence from LASV(KAK-428;Clade n.d. (VII))__ANH09740__GPCmut2 (opt4)
aggagaaagcuuaccaugggccagaucgugaccuucuuccaggaggugccccacgugaucgaggaggugaugaacaucgugcugaucgcccugagccugcuggccauccugaagggccuguacaacuucgccaccugcggcgugaucggccugaucaccuuccugcugcugugcggcagaagcugcagcgccaccuacaagggccaguacgagcugcagacccuggagcugaacauggagagccugaacaugugcaugccccugagcugcaccaagaacaacagccaccacuacaucagagccggcaacaacaccggccuggagcugacccugaccaacaccagcaucaucagccacaaguucugcaaccugagcgacgcccacaagaagaaccuguacgaccacacccugaugagcaucaucaccaccuuccaccugagcauccccaacuucaaccaguacgaggccaugagcugcgacuucaacggcggcaagaucagcauccaguacaaccugagccacagcuacgccggcgacgccgcccagcacugcggcaccguggccaacggcgugcugcagaccuucaugagaauggccuggggcggcagcuaccuggcccuggacagcggcagaagaggcugggacugcaucaucagcagcuaccaguaccugaucauccagaacaccaccugggacgaccacugccaguucagcagacccagccccaucggcuaccugggcuucgugagccagaagaccagagacaucuacaucagcagaagaagaagaggcaccuucaccuggacccugagcgacagcgagggccacgacaugcccggcggcuacugccugaccagauggaugcugaucgaggccgaccugaagugcuucggcaacaccgccguggccaagugcaacgagaagcacgacgaggaguucugcgacauguggagacuguucgacuucugcaagcaggccauccagagacugaaggcccccgcccagaugaacauccagcugaucaacaaggccgugaacgcccugaucaacgaccagcugaugaugaagaaccaccugagagacaucaugggcauccccuacugcaacuacagcaaguucugguaccugaacaacaccaccaccggcagaaccagccugcccagaugcuggcugaucagcaacggcagcuaccugaacgagacccacuucagcgacgacaucgagcagcaggccgacaacaugaucaccgagaugcugcagaaggaguacauggacagacagggcaagaccccccugggccugguggaccuguucguguucagcaccagcuucuaccugaucaccaucuuccugcaccuggugaagauccccacccacagacacaucgugggcaagcccugccccaagccccacagacugaaccacaugggcaucugcagcugcggccuguacaagcagcccggcgugcccgugagauggaagagaugaggacuaguuauaagacugacuagcccgaugggccucccaacgggcccuccuccccuccuugcaccgagauuaaucaaaggcucuuuucagagccaccaaaaaaaaaaaaaaaaaaaaaaaaaaaaaaaaaaaaaaaaaaaaaaaaaaaaaaaaaaaaaaaaagaauu

SEQ ID NO: 24332 - RNA, 1655 nt, Artificial Sequence; identical to SEQ ID NO: 24326
  mRNA product Design i-3 (hSL-A64-N5) comprising derived and/or modified sequence from LASV(Pinneo-NIG-1969;Clade I)__AIT17836__GPCmut2 (opt4)

SEQ ID NO: 24333 - RNA, 1655 nt, Artificial Sequence
  mRNA product Design i-3 (hSL-A64-N5) comprising derived and/or modified sequence from LASV(ISTH0009-NIG-2011;Clade II)__AIT17404__GPCmut2 (opt4)
aggagaaagcuuaccaugggccagaucaucaccuucuuccaggaggugccccacgugaucgaggaggugaugaacaucgugcugaucgcccugagccugcuggccauccugaagggcaucuacaacguggccaccugcggccuguucggccuggugagcuuccugcugcugugcggcagaagcugcagcaccaccuacaagggcguguacgagcugcagacccuggagcuggacauggccagccugaacaugugcaugccccugagcugcaccaagaacaacagccaccacuacaucauggugggcaacgagaccggccuggagcugacccugaccaacaccagcaucaucaaccacaaguucugcaaccugagcgacgcccacaagaagaaccuguacgaccacgcccugaugagcaucaucagcaccuuccaccugagcauccccaacuucaaccaguacgaggccaugagcugcgacuucaacggcggcaagaucagcgugcaguacaaccugagccacgccuacgccguggacgccgccaaccacugcggcaccaucgccaacggcgugcugcagaccuucaugagaauggccuggggcggcagcuacaucgcccuggacagcggcaagggcagcugggacugcaucaugaccagcuaccaguaccugaucauccagaacaccaccugggaggaccacugccaguucagcagacccagccccaucggcuaccugggccugcugagccagagaaccagagacaucuacaucagcagaagaagaagaggcaccuucaccuggacccugagcgacagcgagggcaacgagacccccggcggcuacugccugaccagauggaugcugaucgaggccgagcugaagugcuucggcaacaccgccguggccaagugcaacgagaagcacgacgaggaguucugcgacaugcugagacuguucgacuucugcaagcaggccaucagaagacugaagacccccgcccagaugagcauccagcugaucaacaaggccgugaacgcccugaucaacgaccagcugaucaugaagaaccaccugagagacaucaugggcauccccuacugcaacuacagcaaguacugguaccugaaccacaccgugaccggcaagaccagccugcccagaugcuggcuggugagcaacggcagcuaccugaacgagacccacuucagcgacgacaucgagcagcaggccgacaacaugaucaccgagcugcugcagaaggaguacauggacagacagggcaagaccccccugggccugguggaccuguucguguucagcaccagcuucuaccugaucagcaucuuccugcaccugaucaagauccccacccacagacacaucaccggcaagcccugccccaagccccacagacugaaccacaugggcaucugcagcugcggccuguacaagcaccccggcgugcccgugaaguggaagagaugaggacuaguuauaagacugacuagcccgaugggccucccaacgggcccuccuccccuccuugcaccgagauuaaucaaaggcucuuuucagagccaccaaaaaaaaaaaaaaaaaaaaaaaaaaaaaaaaaaaaaaaaaaaaaaaaaaaaaaaaaaaaaaaaagaauu

SEQ ID NO: 24334 - RNA, 1655 nt, Artificial Sequence
  mRNA product Design i-3 (hSL-A64-N5) comprising derived and/or modified sequence from LASV(ISTH2010-NIG-2012;Clade II)__AIT17482__GPCmut2 (opt4)
aggagaaagcuuaccaugggccagaucaucaccuucuuccaggaggugccccacgugaucgaggaggugaugaacaucgugcugaucgcccugagccugcuggccauccugaagggcaucuacaacguggccaccugcggccuguucggccuggugagcuuccugcugcugugcggcagaagcugcagcaccaccuacaagggcguguacgagcugcagacccuggagcuggacauggccagccugaacaugugcaugccccugagcugcaccaagaacaacagccaccacuacaucauggugggcaacgagaccggccuggagcugacccugaccaacaccagcaucaucaaccacaaguucugcaaccugagcgacgcccacaagaagaaccuguacgaccacgcccugaugagcaucaucagcaccuuccaccugagcauccccaacuucaaccaguacgaggccaugagcugcgacuucaacggcggcaagaucagcgugcaguacaaccugagccacgccuacgccguggacgccgccaaccacugcggcaccaucgccaacggcgugcugcagaccuucaugagaauggccuggggcggcagcuacaucgcccuggacagcggcaagggcagcugggacugcaucaugaccagcuaccaguaccugaucauccagaacaucaccugggaggaccacugccaguucagcagacccagccccaucggcuaccugggccugcugagccagagaaccagagacaucuacaucagcagaagaagaagaggcaccuucaccuggacccugagcgacagcgagggcaacgagacccccggcggcuacugccugaccagauggaugcugaucgaggccgagcugaagugcuucggcaacaccgccguggccaagugcaacgagaagcacgacgaggaguucugcgacaugcugagacuguucgacuucugcaagcaggccaucagaagacugaagacccccgcccagaugagcauccagcugaucaacaaggccgugaacgcccugaucaacgaccagcugaucaugaagaaccaccugagagacaucaugggcauccccuacugcaacuacagcaaguacugguaccugaaccacaccgugaccggcaagaccagccugcccagaugcuggcuggugagcaacggcagcuaccugaacgagacccacuucagcgacgacaucgagcagcaggccgacaacaugaucaccgagcugcugcagaaggaguacaucgacagacagggcaagaccccccugggccugguggaccuguucguguucagcaccagcuucuaccugaucagcaucuuccugcaccuggugaagauccccacccacagacacguggugggcaagcccugccccaagccccacagacugaaccacaugggcaucugcagcugcggccuguacaagcaccccggcgugcccgugaaguggaagagaugaggacuaguuauaagacugacuagcccgaugggccucccaacgggcccuccuccccuccuugcaccgagauuaaucaaaggcucuuuucagagccaccaaaaaaaaaaaaaaaaaaaaaaaaaaaaaaaaaaaaaaaaaaaaaaaaaaaaaaaaaaaaaaaaagaauu

SEQ ID NO: 24335 - RNA, 1655 nt, Artificial Sequence
  mRNA product Design i-3 (hSL-A64-N5) comprising derived and/or modified sequence from LASV(Lassa virus/H.sapiens-wt/NGA/2015/ISTH_0543;Clade II)__AVO03639__GPCmut2 (opt4)
aggagaaagcuuaccaugggccagaucaucaccuucuuccaggaggugccccacgugaucgaggaggugaugaacaucgugcugaucgcccugagccugcuggccauccugaagggcaucuacaacguggccaccugcggccuguucggccuggugagcuuccugcugcugugcggcagaagcugcagcaccaccuacaagggcguguacgagcugcagacccuggagcuggacauggccaaccugaacaugugcaugccccugagcugcaccaagaacaacagccaccacuacaucauggugggcaacgagaccggccuggagcugacccugaccaacaccagcaucaucaaccacaaguucugcaaccugagcgacgcccacaagaagaaccuguacgaccacgcccugaugagcaucaucagcaccuuccaccugagcauccccaacuucaaccaguacgaggccaugagcugcgacuucaacggcggcaagaucagcgugcaguacaaccugagccacaccuacgccguggacgccgccaaccacugcggcaccaucgccaacggcgugcugcagaccuucaugagaauggccuggggcggcagcuacaucgcccuggacagcggcaagggcagcugggacugcaucaugaccagcuaccaguaccuggugauccagaacaccaccugggaggaccacugccaguucagcagacccagccccaucggcuaccugggccugcugagccagagaaccagagacaucuacaucagcagaagaagaagaggcaccuucaccuggacccugagcgacagcgagggcaacgagacccccggcggcuacugccugaccagauggaugcugaucgaggccgagcugaagugcuucggcaacaccgccguggccaagugcaacgagaagcacgacgaggaguucugcgacaugcugagacuguucgacuucugcaagcaggccaucagaagacugaagacccccgcccagaugagcauccagcugaucaacaaggccgugaacgcccugaucaacgaccagcugaucaugaagaaccaccugagagacaucaugggcauccccuacugcaacuacagcaaguacugguaccugaaccacaccgugaccggcaagaccagccugcccagaugcuggcuggugagcaacggcagcuaccugaacgagacccacuucagcgacgacaucgagcagcaggccgacaacaugaucaccgagcugcugcagaaggaguacaucgacagacagggcaagaccccccugggccugguggaccuguucguguucagcaccagcuucuaccugaucagcaucuuccugcaccuggugaagauccccacccacagacacaucaccggcaagcccugccccaagccccacagacugaaccacaugggcaucugcagcugcggccuguacaagcaccccggcgugcccgugaaguggaagagaugaggacuaguuauaagacugacuagcccgaugggccucccaacgggcccuccuccccuccuugcaccgagauuaaucaaaggcucuuuucagagccaccaaaaaaaaaaaaaaaaaaaaaaaaaaaaaaaaaaaaaaaaaaaaaaaaaaaaaaaaaaaaaaaaagaauu

SEQ ID NO: 24336 - RNA, 1655 nt, Artificial Sequence
  mRNA product Design i-3 (hSL-A64-N5) comprising derived and/or modified sequence from LASV(Lassa virus/H.sapiens-wt/NGA/2016/ISTH_0009;Clade II)__AVO03571__GPCmut2 (opt4)
aggagaaagcuuaccaugggccagaucaucaccuucuuccaggaggugccccacgugaucgaggaggugaugaacaucgugcugaucgcccugagccugcuggccauccugaagggcaucuacaacguggccaccugcggccugcugggccuggugagcuuccugcugcugugcggcagaagcugcagcaccaccuacaagggcguguacgagcugcagacccuggagcuggacauggccagccugaacaugugcaugccccugagcugcaccaagaacaacagccaccacuacaucauggugggcaacgagaccggccuggagcugacccugaccaacaccagcaucaucaaccacaaguucugcaaccugagcgacgcccacaagaagaaccuguacgaccacgcccugaugagcaucaucagcaccuuccaccugagcauccccaacuucaaccaguacgaggccaugagcugcgacuucaacggcggcagaaucagcgugcaguacaaccugagccacagcuacgccguggacgccgccaaccacugcggcaccaucgccaacggcgugcugcagaccuucaugagaauggccuggggcggcagcuacaucgcccuggacagcggcaagggcagcugggacugcaucaugaccagcuaccaguaccugaucauccagaacaccaccugggaggaccacugccaguucagcagacccagccccaucggcuaccugggccugcugagccagagaaccagagacaucuacaucagcagaagaagaagaggcaccuucaccuggacccugagcgacagcgagggcaacgagacccccggcggcuacugccugaccagauggaugcugaucgaggccgagcugaagugcuucggcaacaccgccguggccaagugcaacgagaagcacgacgaggaguucugcgacaugcugagacuguucgacuucugcaagcaggccaucagaagacugaagacccccgcccagaugagcauccagcugaucaacaaggccgugaacgcccugaucaacgaccagcugaucaugaagaaccaccugagagacaucaugggcauccccuacugcaacuacagcaaguacugguaccugaaccacaccgugaccggcaagaccagccugcccagaugcuggcuggugagcaacggcagcuaccugaacgagacccacuucagcgacgacaucgagcagcaggccgacaacaugaucaccgagcugcugcagaaggaguacaucgacagacagggcaagaccccccugggccugguggaccuguucguguucagcaccagcuucuaccugaucagcaucuuccugcaccuggugaagauccccacccacagacacaucaccggcaagcccugccccaagccccacagacugaaccacaugggcaucugcagcugcggccuguacaaccaccccggcgugcccgugaaguggaagagaugaggacuaguuauaagacugacuagcccgaugggccucccaacgggcccuccuccccuccuugcaccgagauuaaucaaaggcucuuuucagagccaccaaaaaaaaaaaaaaaaaaaaaaaaaaaaaaaaaaaaaaaaaaaaaaaaaaaaaaaaaaaaaaaaagaauu

SEQ ID NO: 24337 - RNA, 1655 nt, Artificial Sequence
  mRNA product Design i-3 (hSL-A64-N5) comprising derived and/or modified sequence from LASV(Lassa virus/H.sapiens-wt/NGA/2016/ISTH_0017;Clade II)__AVO03567__GPCmut2 (opt4)
aggagaaagcuuaccaugggccagaucaucaccuucuuccaggaggugccccacgugaucgaggaggugaugaacaucgugcugaucgcccugagccugcuggccauccugaagggcaucuacaacguggccaccugcggccuguucggccuggugagcuuccugcugcugugcggcagaagcugcagcaccaccuacaagggcguguacgagcugcagacccuggagcuggacauggccagccugaacaugugcaugccccugagcugcaccaagaacaacagccaccacuacaucauggugggcaacgagaccggccuggagcugacccugaccaacaccagcaucaucaaccacaaguucugcaaccugagcgacgcccacaagaagaaccuguacgaccacgcccugaugagcaucaucagcaccuuccaccugagcauccccaacuucaaccaguacgaggccaugagcugcgacuucaacggcggcaagaucagcgugcaguacaaccugagccacaccuacgccaucgacgccgccaaccacugcggcaccaucgccaacggcgugcugcagaccuucaugagaauggccuggggcggcagcuacaucgcccuggacagcggcaagggcagcugggacugcaucaugaccagcuaccaguaccugaucauccagaacaccaccugggaggaccacugccaguucagcagacccagccccaucggcuaccugggccugcugagccagagaaccagagacaucuacaucagcagaagaagaagaggcaccuucaccuggacccugagcgacagcgagggcaacgagacccccggcggcuacugccugaccagauggaugcugaucgaggccgagcugaagugcuucggcaacaccgccguggccaagugcaacgagaagcacgacgaggaguucugcgacaugcugagacuguucgacuucugcaagcaggccaucagaagacugaagacccccgcccagaugagcauccagcugaucaacaaggccgugaacgcccugaucaacgaccagcugaucaugaagaaccaccugagagacaucaugggcauccccuacugcaacuacagcaaguacugguaccugaaccacaccgugaccggcaagaccagccugcccagaugcuggcuggugagcaacggcagcuaccugaacgagacccacuucagcgacgacaucgagcagcaggccgacaacaugaucaccgagcugcugcagaaggaguacauggacagacagggcaagaccccccugggccugguggaccuguucguguucagcaccagcuucuaccugaucagcaucuuccugcaccuggugagaauccccacccacagacacgugaucggcaagcccugccccaagccccacagacugaaccacaugggcaucugcagcugcggccuguacaagcaccccggcgugcccgugaaguggaagagaugaggacuaguuauaagacugacuagcccgaugggccucccaacgggcccuccuccccuccuugcaccgagauuaaucaaaggcucuuuucagagccaccaaaaaaaaaaaaaaaaaaaaaaaaaaaaaaaaaaaaaaaaaaaaaaaaaaaaaaaaaaaaaaaaagaauu

SEQ ID NO: 24338 - RNA, 1655 nt, Artificial Sequence
  mRNA product Design i-3 (hSL-A64-N5) comprising derived and/or modified sequence from LASV(Lassa virus/H.sapiens-wt/NGA/2018/ISTH_0959;Clade II)__AVV65099__GPCmut2 (opt4)
aggagaaagcuuaccaugggccagaucaucaccuucuuccaggaggugccccacgugaucgaggaggugaugaacaucgugcugaucgcccugagccugcuggccauccugaagggcaucuacaacguggugaccugcggccuguucggccuggugagcuuccugcugcugugcggcagaagcugcagcaccaccuacaagggcguguacgagcugcagacccuggagcuggacauggccagccugaacaugugcaugccccugagcugcaccaagaacaacagccaccacuacaucauggugggcaacgagaccggccuggagcugacccugaccaacaccagcaucaucaaccacaaguucugcaaccugagcgacgcccacaagaagaaccuguacgaccacgcccugaugagcaucaucagcaccuuccaccugagcauccccaacuucaaccaguacgaggccaugagcugcgacuucaacggcggcaagaucagcgugcaguacaaccugagccacgccuacgccaucgacgccgccaaccacugcggcaccaucgccaacggcgugcugcagaccuucaugagaauggccuggggcggcagcuacaucgcccuggacagcggcaagggcagcugggacugcaucaugaccagcuaccaguaccugaucauccagaacaccaccugggaggaccacugccaguucagcagacccagccccaucggcuaccugggccugcugagccagagaaccagagacaucuacaucagcagaagaagaagaggcaccuucaccuggacccugagcgacagcgagggcaacgagacccccggcggcuacugccugaccagauggaugcugaucgaggccgagcugaagugcuucggcaacaccgccguggccaagugcaacgagaagcacgacgaggaguucugcgacaugcugagacuguucgacuucugcaagcaggccaucagaagacugaagacccccgcccagaugagcauccagcugaucaacaaggccgugaacgcccugaucaacgaccagcugaucaugaagaaccaccugagagacaucaugggcauccccuacugcaacuacagcaaguacugguaccugaaccacaccgugaccggcaagaccagccugcccagaugcuggcuggugagcaacggcagcuaccugaacgagacccacuucagcgacgacaucgagcagcaggccgacaacaugaucaccgagcugcugcagaaggaguacaucgacagacagggcaagaccccccugggccugguggaccuguucguguucagcaccagcuucuaccugaucagcaucuuccugcaccuggugaagauccccacccacagacacgugaucggcaagcccugccccaagccccacagacugaaccacaugggcaucugcagcugcggccuguacaagcaccccggcgugcccgugaaguggaagagaugaggacuaguuauaagacugacuagcccgaugggccucccaacgggcccuccuccccuccuugcaccgagauuaaucaaaggcucuuuucagagccaccaaaaaaaaaaaaaaaaaaaaaaaaaaaaaaaaaaaaaaaaaaaaaaaaaaaaaaaaaaaaaaaaagaauu

SEQ ID NO: 24339 - RNA, 1655 nt, Artificial Sequence
  mRNA product Design i-3 (hSL-A64-N5) comprising derived and/or modified sequence from LASV(LASV003-NIG-2008;Clade II)__AIT17580__GPCmut2 (opt4)
aggagaaagcuuaccaugggccagaucaucaccuucuuccaggaggugccccacgugaucgaggaggugaugaacaucgugcugaucgcccugagccugcuggccauccugaagggcaucuacaacguggccaccugcggccuguucggccuggugagcuuccugcugcugugcggcagaagcugcagcaccaccuacaagggcguguacgagcugcagacccuggagcuggacauggccagccugaacaugugcaugccccugagcugcaccaagaacaacagccaccacuacaucauggugggcaacgagaccggccuggagcugacccugaccaacaccagcaucaucaaccacaaguucugcaaccugagcgacgcccacaagaagaaccuguacgaccacgcccugaugagcaucaucagcaccuuccaccugagcauccccaacuucaaccaguacgaggccaugagcugcgacuucaacggcggcaagaucagcgugcaguacaaccugagccacaccuacgccguggacgccgccaaccacugcggcaccaucgccaacggcgugcugcagaccuucaugagaauggccuggggcggcagcuacaucgcccuggacagcggcaagggcagcugggacugcaucaugaccagcuaccaguaccugaucauccagaacaccaccugggaggaccacugccaguucagcagacccagccccaucggcuaccugggccugcugagccagagaaccagagacaucuacaucagcagaagaagaagaggcaccuucaccuggacccugagcgacagcgagagcaacgagacccccggcggcuacugccugaccagauggaugcugaucgaggccgagcugaagugcuucggcaacaccgccguggccaagugcaacgagaagcacgacgaggaguucugcgacaugcugagacuguucgacuucugcaagcaggccaucagaagacugaaggcccccgcccagaugagcauccagcugaucaacaaggccgugaacgcccugaucaacgaccagcugaucaugaagaaccaccugagagacaucaugggcauccccuacugcaacuacagcaaguacugguaccugaaccacaccgugaccggcagaaccagccugcccagaugcuggcuggugagcaacggcagcuaccugaacgagacccacuucagcgacgacaucgagcagcaggccgacaacaugaucaccgagcugcugcagaaggaguacauggacagacagggcaagaccccccugggccugguggaccuguucguguucagcaccagcuucuaccugaucagcaucuuccugcaccuggugaagauccccacccacagacacgugaucggcaagcccugccccaagccccacagacugaaccacaugggcaucugcagcugcggccuguacaagcaccccggcgugcccgugaaguggaagagaugaggacuaguuauaagacugacuagcccgaugggccucccaacgggcccuccuccccuccuugcaccgagauuaaucaaaggcucuuuucagagccaccaaaaaaaaaaaaaaaaaaaaaaaaaaaaaaaaaaaaaaaaaaaaaaaaaaaaaaaaaaaaaaaaagaauu

SEQ ID NO: 24340 - RNA, 1655 nt, Artificial Sequence
  mRNA product Design i-3 (hSL-A64-N5) comprising derived and/or modified sequence from LASV(LASV035-NIG-2009;Clade II)__AIT17588__GPCmut2 (opt4)
aggagaaagcuuaccaugggccagaucaucaccuucuuccaggaggugccccacgugaucgaggaggugaugaacaucgugcugaucgcccugagccugcuggccauccugaagggcaucuacaacguggccaccugcggccuguucggccuggugagcuuccugcugcugugcggcagaagcugcagcaccaccuacaagggcguguacgagcugcagacccuggagcuggacauggccagccugaacaugugcaugccccugagcugcaccaagaacaacagccaccacuacaucauggugggcaacgagaccggccuggagcugacccugaccaacaccagcaucaucaaccacaaguucugcaaccugagcgacgcccacaagaagaaccuguacgaccacgcccugaugagcaucaucagcaccuuccaccugagcauccccaacuucaaccaguacgaggccaugagcugcgacuucaacggcggcaagaucagcgugcaguacaaccugagccacgccuacgccguggacgccgccaaccacugcggcaccaucgccaacggcgugcugcagaccuucaugagaauggccuggggcggcagcuacaucgcccuggacagcggcaagggcagcugggacugcaucaugaccagcuaccaguaccugaucauccagaacaccaccugggaggaccacugccaguucagcagacccagccccaucggcuaccugggccugcugagccagagaaccagagacaucuacaucagcagaagaagaagaggcaccuucaccuggacccugagcgacagcgagggcaacgagacccccggcggcuacugccugaccagauggaugcugaucgaggccgagcugaagugcuucggcaacaccgccguggccaagugcaacgagaagcacgacgaggaguucugcgacaugcugagacuguucgacuucugcaagcaggccaucagaagacugaaggcccccgcccagaugagcauccagcugaucaacaaggccgugaacgcccugaucaacgaccagcugaucaugaagaaccaccugagagacaucaugggcauccccuacugcaacuacagcaaguacugguaccugaaccacaccgugaccggcaagaccagccugcccagaugcuggcuggugagcaacggcagcuaccugaacgagacccacuucagcgacgacaucgagcagcaggccgacaacaugaucaccgagcugcugcagaaggaguacaucgacagacagggcaagaccccccugggccugguggaccuguucguguucagcaccagcuucuaccugaucagcaucuuccugcaccuggugaagauccccacccacagacacgugaucggcaagcccugccccaagccccacagacugaaccacaugggcaucugcagcugcggccuguacaagcaccccggcgugcccgugaaguggaagagaugaggacuaguuauaagacugacuagcccgaugggccucccaacgggcccuccuccccuccuugcaccgagauuaaucaaaggcucuuuucagagccaccaaaaaaaaaaaaaaaaaaaaaaaaaaaaaaaaaaaaaaaaaaaaaaaaaaaaaaaaaaaaaaaaagaauu

SEQ ID NO: 24341 - RNA, 1655 nt, Artificial Sequence
  mRNA product Design i-3 (hSL-A64-N5) comprising derived and/or modified sequence from LASV(LASV1000-NIG-2009;Clade II)__AIT17782__GPCmut2 (opt4)
aggagaaagcuuaccaugggccagaucaucaccuucuuccaggaggugccccacgugaucgaggaggugaugaacaucgugcugaucgcccugagccugcuggccauccugaagggcaucuacaacguggccaccugcggccuguucggccuggugagcuuccugcugcugugcggcagaagcugcagcaccaccuacaagggcguguacgagcugcagacccuggagcuggacauggccagccugaacaugugcaugccccugagcugcaccaagaacaacagccaccacuacaucauggugggcaacgagaccggccuggagcugacccugaccaacaccagcaucaucaaccacaaguucugcaaccugagcgacgcccacaagaagaaccuguacgaccacgcccugaugagcaucaucagcaccuuccaccugagcauccccaacuucaaccaguacgaggccaugagcugcgacuucaacggcggcaagaucagcgugcaguacaaccugagccacaccuacgccguggacgccgccaaccacugcggcaccaucgccaacggcgugcugcagaccuucaugagaauggccuggggcggcagcuacaucgcccuggacagcggcaagggcagcugggacugcaucaugaccagcuaccaguaccugaucauccagaacaccaccugggaggaccacugccaguucagcagacccagccccaucggcuaccugggccugcugagccagagaaccagagacaucuacaucagcagaagaagaagaggcaccuucaccuggacccugagcgacagcgagggcaacgagacccccggcggcuacugccugaccagauggaugcugaucgaggccgagcugaagugcuucggcaacaccgccguggccaagugcaacgagaagcacgacgaggaguucugcgacaugcugagacuguucgacuucugcaagcaggccaucaagagacugaagacccccgcccagaugagcauccagcugaucaacaaggccgugaacgcccugaucaacgaccagcugaucaugaagaaccaccugagagacaucaugggcauccccuacugcaacuacagcaaguacugguaccugaaccacaccgugaccggcaagaccagccugcccagaugcuggcuggugagcaacggcagcuaccugaacgagacccacuucagcgacgacaucgagcagcaggccgacaacaugaucaccgagcugcugcagaaggaguacaucgacagacagggcaagaccccccugggccugguggaccuguucguguucagcaccagcuucuaccugaucagcaucuuccugcaccuggugaagauccccacccacagacacguggugggcaagcccugccccaagccccacagacugaaccacaugggcaucugcagcugcggccuguacaagcaccccggcgugcccgugaaguggaagagaugaggacuaguuauaagacugacuagcccgaugggccucccaacgggcccuccuccccuccuugcaccgagauuaaucaaaggcucuuuucagagccaccaaaaaaaaaaaaaaaaaaaaaaaaaaaaaaaaaaaaaaaaaaaaaaaaaaaaaaaaaaaaaaaaagaauu

SEQ ID NO: 24342 - RNA, 1655 nt, Artificial Sequence
  mRNA product Design i-3 (hSL-A64-N5) comprising derived and/or modified sequence from LASV(LASV221-NIG-2010;Clade II)__AIT17624__GPCmut2 (opt4)
aggagaaagcuuaccaugggccagaucaucaccuucuuccaggaggugccccacgugaucgaggaggugaugaacaucgugcugaucgcccugagccugcuggccauccugaagggcaucuacaacguggccaccugcggccuguucggccuggugagcuuccugcugcugugcggcagaagcugcagcaccaccuacaagggcguguacgagcugcagacccuggagcuggacauggccagccugaacaugugcaugccccugagcugcaccaagaacaacagccaccacuacaucauggugggcaacgagaccggccuggagcugacccugaccaacaccagcaucaucaaccacaaguucugcaaccugagcgacgcccacaagaagaaccuguacgaccacgcccugaugagcaucaucagcaccuuccaccugagcauccccaacuucaaccaguacgaggccaugagcugcgacuucaacggcggcaagaucagcgugcaguacaaccugagccacaccuacgccaucgacgccgccaaccacugcggcaccaucgccaacggcgugcugcagaccuucaugagaauggccuggggcggcagcuacaucgcccuggacagcggcaagggcagcugggacugcaucaugaccagcuaccaguaccugaucauccagaacaccaccugggaggaccacugccaguucagcagacccagccccaucggcuaccugggccugcugagccagagaaccagagacaucuacaucagcagaagaagaagaggcaccuucaccuggacccugagcgacagcgagggcaacgagacccccggcggcuacugccugaccagauggaugcugaucgaggccgagcugaagugcuucggcaacaccgccguggccaagugcaacgagaagcacgacgaggaguucugcgacaugcugagacuguucgacuucugcaagcaggccaucagaagacugaagacccccgcccagaugagcauccagcugaucaacaaggccgugaacgcccugaucaacgaccagcugaucaugaagaaccaccugagagacaucaugggcauccccuacugcaacuacagcaaguacugguaccugaaccacaccgugaccggcaagaccagccugcccagaugcuggcuggugagcaacggcagcuaccugaacgagacccacuucagcgacgacaucgagcagcaggccgacaacaugaucaccgagaugcugcagaaggaguacauggacagacagggcaagaccccccugggccugguggaccuguucguguucagcaccagcuucuaccugaucagcaucuuccugcaccuggugaagauccccacccacagacacgugaucggcaagcccugccccaagccccacagacugaaccacaugggcaucugcagcugcggccuguacaagcaccccggcgugcccgugaaguggaagagaugaggacuaguuauaagacugacuagcccgaugggccucccaacgggcccuccuccccuccuugcaccgagauuaaucaaaggcucuuuucagagccaccaaaaaaaaaaaaaaaaaaaaaaaaaaaaaaaaaaaaaaaaaaaaaaaaaaaaaaaaaaaaaaaaagaauu

SEQ ID NO: 24343 - RNA, 1655 nt, Artificial Sequence
  mRNA product Design i-3 (hSL-A64-N5) comprising derived and/or modified sequence from LASV(LASV237-NIG-2010;Clade II)__AIT17638__GPCmut2 (opt4)
aggagaaagcuuaccaugggccagaucaucaccuucuuccaggaggugccccacgugaucgaggaggugaugaacaucgugcugaucgcccugagccugcuggccauccugaagggcaucuacaacguggccaccugcggccuguucggccuggugagcuuccugcugcugugcggcagaagcugcagcaccaccuacaagggcguguacgagcugcagacccuggagcuggacauggccagccugaacaugugcaugccccugagcugcaccaagaacaacagccaccacuacaucauggugggcaacgagaccggccuggagcugacccugaccaacaccagcaucaucaaccacaaguucugcaaccugagcgacgcccacaagaaggaccuguacgaccacgcccugaugagcaucaucagcaccuuccaccugagcauccccaacuucaaccaguacgaggccaugagcugcgacuucaacggcggcaagaucagcgugcaguacaaccugagccacaccuacgccguggacgccgccaaccacugcggcaccaucgccaacggcgugcugcagaccuucaugagaauggccuggggcggcagcuacaucgcccuggacagcggcaagggcagcugggacugcaucaugaccagcuaccaguaccugaucauccagaacaccaccugggaggaccacugccaguucagcagacccagccccaucggcuaccugggccugcugagccagagaaccagagacaucuacaucagcagaagaagaagaggcaccuucaccuggacccugagcgacagcgagggcaacgagacccccggcggcuacugccugaccagauggaugcugaucgaggccgagcugaagugcuucggcaacaccgccguggccaagugcaacgagaagcacgacgaggaguucugcgacaugcugagacuguucgacuucugcaagcaggccaucagaagacugaagacccccgcccagaugagcauccagcugaucaacaaggccgugaacgcccugaucaacgaccagcugaucaugaagaaccaccugagagacaucaugggcauccccuacugcaacuacagcaaguacugguaccugaaccacaccgugaccggcaagaccagccugcccagaugcuggcuggugagcaacggcagcuaccugaacgagacccacuucagcgacgacaucgagcagcaggccgacaacaugaucaccgagcugcugcagaaggaguacauggacagacagggcaagaccccccugggccugguggaccuguucguguucagcaccagcuucuaccugaucagcaucuuccugcaccugaucaagauccccacccacagacacaucaccggcaagcccugccccaagccccacagacugaaccacaugggcaucugcagcugcggccuguacaagcaccccggcgugcccgugaaguggaagagaugaggacuaguuauaagacugacuagcccgaugggccucccaacgggcccuccuccccuccuugcaccgagauuaaucaaaggcucuuuucagagccaccaaaaaaaaaaaaaaaaaaaaaaaaaaaaaaaaaaaaaaaaaaaaaaaaaaaaaaaaaaaaaaaaagaauu

SEQ ID NO: 24344 - RNA, 1655 nt, Artificial Sequence
  mRNA product Design i-3 (hSL-A64-N5) comprising derived and/or modified sequence from LASV(LASV253-NIG-2011;Clade II)__AIT17670__GPCmut2 (opt4)
aggagaaagcuuaccaugggccagaucaucaccuucuuccaggaggugccccacgugaucgaggaggugaugaacaucgugcugaucgcccugagccugcuggccauccugaagggcaucuacaacguggccaccugcggccuguucggccuggugagcuuccugcugcugugcggcagaagcugcagcaccaccuacaagggcguguacgagcugcagacccuggagcuggacauggccagccugaacaugugcaugccccugagcugcaccaagaacaacagccaccacuacaucauggugggcaacgagaccggccuggagcugacccugaccaacaccagcaucaucaaccacaaguucugcaaccugagcgacgcccacaagaagaaccuguacgaccacgcccugaugagcaucaucagcaccuuccaccugagcauccccaacuucaaccaguacgaggccaugagcugcgacuucaacggcggcaagaucagcgugcaguacaaccugagccacaccuacgccguggacgccgccaaccacugcggcaccaucgccaacggcgugcugcagaccuucaugagaauggccuggggcggcagcuacaucgcccuggacagcggcaagggcagcugggacugcaucaugaccagcuaccaguaccugaucauccagaacaccaccugggaggaccacugccaguucagcagacccagccccaucggcuaccugggccugcugagccagagaaccagagacaucuacaucagcagaagaagaagaggcaccuucaccuggacccugagcgacagcgagggcaacgagacccccggcggcuacugccugaccagauggaugcugaucgaggccgagcugaagugcuucggcaacaccgccguggccaagugcaacgagaagcacgacgaggaguucugcgacaugcugagacuguucgacuucugcaagcaggccaucagaagacugaaggcccccgcccagaugagcauccagcugaucaacaaggccgugaacgcccugaucaacgaccagcugaucaugaagaaccaccugagagacaucaugggcauccccuacugcaacuacagcaaguacugguaccugaaccacaccgugaccggcagaaccagccugcccagaugcuggcuggugagcaacggcagcuaccugaacgagacccacuucagcgacgacaucgagcagcaggccgacaacaugaucaccgagcugcugcagaaggaguacaucgacagacagggcaagaccccccugggccugguggaccuguucguguucagcaccagcuucuaccugaucagcaucuuccugcaccuggugaagauccccacccacagacacaucaucggcaagcccugccccaagccccacagacugaaccacaugggcaucugcagcugcggccuguacaagcaccccggcgugcccgugaaguggaagagaugaggacuaguuauaagacugacuagcccgaugggccucccaacgggcccuccuccccuccuugcaccgagauuaaucaaaggcucuuuucagagccaccaaaaaaaaaaaaaaaaaaaaaaaaaaaaaaaaaaaaaaaaaaaaaaaaaaaaaaaaaaaaaaaaagaauu

SEQ ID NO: 24345 - RNA, 1655 nt, Artificial Sequence
  mRNA product Design i-3 (hSL-A64-N5) comprising derived and/or modified sequence from LASV(LASV254-NIG-2011;Clade II)__AIT17674__GPCmut2 (opt4)
aggagaaagcuuaccaugggccagaucaucaccuucuuccaggaggugccccacgugaucgaggaggugaugaacaucgugcugaucgcccugagccugcuggccauccugaagggcaucuacaacguggccaccugcggccuguucggccuggugagcuuccugcugcugugcggcagaagcugcagcaccaccuacaagggcguguacgagcugcagacccuggagcuggacaugaccaaccugaacaugugcaugccccugagcugcaccaagaacaacagccaccacuacaucauggugggcaacgagaccggccuggagcugacccugaccaacaccagcaucaucaaccacaaguucugcaaccugagcgacgcccacaagaagaaccuguacaaccacgcccugaugagcaucaucagcaccuuccaccugagcauccccaacuucaaccaguacgaggccaugagcugcgacuucaacggcggcaagaucagcgugcaguacaaccugagccacagcuacgccguggacgccgccaaccacugcggcaccaucgccaacggcgugcugcagaccuucaugagaauggccuggggcggcagcuacaucgcccuggacagcggcaagggcaacugggacugcaucaugaccagcuaccaguaccugaucauccagaacaccaccugggaggaccacugccaguucagcagacccagccccaucggcuaccugggccugcugagccagagaaccagagacaucuacaucagcagaagaagaagaggcaccuucaccuggacccugagcgacagcgagggcaacgagacccccggcggcuacugccugaccagauggaugcugaucgaggccgagcugaagugcuucggcaacaccgccguggccaagugcaacgagaagcacgacgaggaguucugcgacaugcugagacuguucgacuucugcaagcaggccaucagaagacugaagacccccgcccaggccaacauccagcugaucaacaaggccgugaacgcccugaucaacgaccagcugaucaugaagaaccaccugagagacaucaugggcauccccuacugcaacuacagcaaguacugguaccugaaccacaccgugaccggcaagaccagccugcccagaugcuggcuggugagcaacggcagcuaccugaacgagacccacuucagcgacgacaucgagcagcaggccgacaacaugaucaccgagcugcugcagaaggaguacauggacagacagggcaagaccccccugggccugguggaccuguucguguucagcaccagcuucuaccugaucagcaucuuccugcaccuggugaagauccccacccacagacacgugaucggcaagcccugccccaagccccacagacugaaccacaugggcaucugcagcugcggccuguacaagcaccccggcgugcccgugaaguggaagagaugaggacuaguuauaagacugacuagcccgaugggccucccaacgggcccuccuccccuccuugcaccgagauuaaucaaaggcucuuuucagagccaccaaaaaaaaaaaaaaaaaaaaaaaaaaaaaaaaaaaaaaaaaaaaaaaaaaaaaaaaaaaaaaaaagaauu

SEQ ID NO: 24346 - RNA, 1655 nt, Artificial Sequence
  mRNA product Design i-3 (hSL-A64-N5) comprising derived and/or modified sequence from LASV(Nig08-A19;Clade III)__ADU56618__GPCmut2 (opt4)
aggagaaagcuuaccaugggccagaucgugaccuucuuccaggaggugccccacgugaucgaggaggugaugaacaucgugcugaucgcccugagcauccuggccauccugaagggccuguacaacaucgccaccugcggccugaucggccuggugaccuuccugcugcugagcggcagaagcugcagcaugaccuacaagggcguguacgagcugcagacccuggagcugaacaugaacacccugaacaugugcaugccccugagcugcaccaagaacaacagccaccacuacaucauggugggcaacgagaccggccuggagcugacccugaccaacaccagccugcugcaccacaaguucugcaaccugagcgacgcccacaagaagaaccuguacgaccacacccugaugagcaucaucagcaccuuccaccugagcauccccaacuucaaccaguacgaggccaugagcugcgacuucaacggcggcaagaucaccgugcaguacaaccugagccacagcuacgccaucgacgccgccaaccacugcggcaccguggccaacggcgugcugcagaccuucaugagaauggccuggggcggcagcuacaucgcccuggacagcggcagaggcaagugggacugcaucaugaccagcuaccaguaccugaucauccagaacaccaccugggaggaccacugccaguucagcagacccagccccaucggcuaccugggccugcugagccagagaaccagagacaucuacaucagcagaagaagaagaggcaccuucaccuggacccugagcgacagcgagggcaacgagacccccggcggcuacugccugaccagauggaugcugaucgaggccgagcugaagugcuucggcaacaccgccguggccaagugcaacgagaagcacgacgaggaguucugcgacaugcugagacuguucgacuucugcaagcaggccaucagaagacugaaggcccccgcccagaugagcauccagcugaucaacaaggccgugaacgcccugaucaacgaccagcugaucaugaagaaccaccugagagacaucaugggcauccccuacugcaacuacagcaaguacugguaccugaaccacaccagcaccggcagaaccagccugcccagaugcuggcuggugagcaacggcagcuaccugaacgagacccacuucagcgacgacaucgagcagcaggccgacaacaugaucaccgagaugcugcagaaggaguaccuggacagacagggcaagaccccccugggccugguggaccuguucguguucagcaccagcuucuaccugaucagcaucuuccugcaccuggugaagauccccacccacagacacaucgugggcaagcccugccccaagccccacagacugaaccacaugggcaucugcagcugcggccuguacaagcagcccggcgugcccgugagauggaagagaugaggacuaguuauaagacugacuagcccgaugggccucccaacgggcccuccuccccuccuugcaccgagauuaaucaaaggcucuuuucagagccaccaaaaaaaaaaaaaaaaaaaaaaaaaaaaaaaaaaaaaaaaaaaaaaaaaaaaaaaaaaaaaaaaagaauu

SEQ ID NO: 24347 - RNA, 1658 nt, Artificial Sequence
  mRNA product Design i-3 (hSL-A64-N5) comprising derived and/or modified sequence from LASV(G1180-SLE-2010;Clade IV)__AIT17168__GPCmut2 (opt4)
aggagaaagcuuaccaugggccagaucgugaccuucuuccaggaggugccccacgugaucgaggaggugaugaacaucgugcugaucgcccugagcauccuggccgugcugaagggccuguacaacuucgccaccugcggccuggugggccugcugaccuuccugcugcugugcggcagaagcugcaccgccagcagauacaagggcguguacgagcugcagacccuggagcugaacauggagacccugaacaugugcaugccccugagcugcaccaagaacaacagccaccacuacaucauggugggcaacgagaccggccuggagcugacccugaccaacaccagcaucaucaaccacaaguucugcaaccugagcgacgcccacaagaagaaccuguacgaccacgcccugaugagcaucaucagcaccuuccaccugagcauccccaacuucaaccaguacgaggccaugagcugcgacuucaacggcggcaagaucagcgugcaguacaaccugagccacagcuacgccggcgacgccgccaaccacugcggcaccguggccaacggcgugcugcagaccuucaugagaauggccuggggcggcagcuacaucgcccuggacagcggccacggcagcugggacugcaucaugaccagcuaccaguaccugaucauccagaacaccaccugggaggaccacugccaguucagcagacccagccccaucggcuaccugggccugcugagccagagaaccagagacaucuacaucagcagaagaagaagaggcaccuucaccuggacccugagcgacagcgagggcaaggacacccccggcggcuacugccugaccagauggaugcugaucgaggccgagcugaagugcuucggcaacaccgccguggccaagugcaacgagaagcacgacgaggaguucugcgacaugcugagacuguucgacuucugcaagcaggccauccagagacugaaggcccccgcccagaugagcauccagcugaucaacaaggccgugaacgcccugaucaacgaccagcugaucaugaagaaccaccugagagacaucaugggcauccccuacugcaacuacagcaaguacugguaccugaaccacaccaccaccggcaagaccagccugcccaagugcuggcuggugagcaacggcagcuaccugaacgagacccacuucagcgacgacaucgagcagcaggccgacaacaugaucaccgagaugcugcagaaggaguacauggagagacagggcaagaccccccugggccugguggaccuguucguguucagcaccagcuucuaccugaucagcaucuuccugcaccuggugaagauccccacccacagacacaucgugggcaagagcugccccaagccccacagacugaaccacaugggcaucugcagcugcggccuguacaagcagcccggcgugcccgugaaguggaagagaugaggacuaguuauaagacugacuagcccgaugggccucccaacgggcccuccuccccuccuugcaccgagauuaaucaaaggcucuuuucagagccaccaaaaaaaaaaaaaaaaaaaaaaaaaaaaaaaaaaaaaaaaaaaaaaaaaaaaaaaaaaaaaaaaagaauu

SEQ ID NO: 24348 - RNA, 1658 nt, Artificial Sequence
  mRNA product Design i-3 (hSL-A64-N5) comprising derived and/or modified sequence from LASV(G1442-SLE-2011;Clade IV)__AIT17180__GPCmut2 (opt4)
aggagaaagcuuaccaugggccagaucgugaccuucuuccaggaggugccccacgugaucgaggaggugaugaacaucgugcugaucgcccugagcauccuggccgugcugaagggccuguacaacguggccaccugcggccugaucggccuggugaccuuccugcugcugugcggcagaagcugcaccaccacccuguacaagggcguguacgagcugcagacccuggagcugaacauggagacccugaacaugugcaugccccugagcugcaccaagaacaacagccaccacuacaucagagugggcaacgagaccggccuggagcugacccugaccaacaccagcaucaucaaccacaaguucugcaaccugagcgacgcccacaagaagaaccuguacgaccacgcccugaugagcaucaucagcaccuuccaccugagcauccccaacuucaaccaguacgaggccaugagcugcgacuucaacggcggcaagaucagcgugcaguacaaccugagccacagcuacgccggcgacgccgccaaccacugcggcaccguggccaacggcgugcugcagaccuucaugagaauggccuggggcggcagcuacaucgcccuggacagcggcagaggcaacugggacugcaucaugaccagcuaccaguaccugaucauccagaacaccaccugggacgaccacugccaguucagcagacccagccccaucggcuaccugggccugcugagccagagaaccagagacguguacaucagcagaagaagaagaggcaccuucaccuggacccugagcgacagcgagggcaaggacacccccggcggcuacugccugaccagauggaugcugaucgaggccgagcugaagugcuucggcaacaccgccguggccaagugcaacgagaagcacgacgaggaguucugcgacaugcugagacuguucgacuucugcaagcaggccauccagagacugaaggcccccgcccagaugagcauccagcugaucaacaaggccgugaacgcccugaucaacgaccagcugaucaugaagaaccaccugagagacaucaugggcauccccuacugcaacuacagcaaguacugguaccugaacaacaccgccaccggcaagaccagccugcccaagugcuggcugaucagcaacggcagcuaccugaacgagacccacuucagcgacgacaucgagcaggaggccgacaacaugaucaccgagaugcugcagaaggaguacauggagagacagggcaagaccccccugggccugguggaccuguucguguucagcaccagcuucuaccugaucagcaucuuccugcaccuggugaagauccccacccacagacacaucgugggcaagagcugccccaagccccacagacugaaccacaugggcaucugcagcugcggccuguacaagcagcccggcgugcccgugagauggaagagaugaggacuaguuauaagacugacuagcccgaugggccucccaacgggcccuccuccccuccuugcaccgagauuaaucaaaggcucuuuucagagccaccaaaaaaaaaaaaaaaaaaaaaaaaaaaaaaaaaaaaaaaaaaaaaaaaaaaaaaaaaaaaaaaaagaauu

SEQ ID NO: 24349 - RNA, 1658 nt, Artificial Sequence
  mRNA product Design i-3 (hSL-A64-N5) comprising derived and/or modified sequence from LASV(G3010-SLE-2013;Clade IV)__AIT17344__GPCmut2 (opt4)
aggagaaagcuuaccaugggccagaucgugaccuucuuccaggaggugccccacgugaucgaggaggugaugaacaucgugcugaucgcccugagcauccuggccgugcugaagggccuguacaacuucgccaccugcggccuggugggccuggugaccuuccugcugcugugcggcagaagcugcaccaccagccuguacaagggcguguacgagcugcagacccuggagcugaacauggagacccugaacaugugcaugccccugagcugcaccaagaacaacagccaccacuacaucauggugggcaacgagaccggccuggagcugacccugaccaacaccagcaucaucaaccacaaguucugcaaccugagcgacgcccacaagaagaaccuguacaaccacgcccugaugagcaucaucagcaccuuccaccugagcauccccaacuucaaccaguacgaggccaugagcugcgacuucaacggcggcaagaucagcgugcaguacaaccugagccacagcuacgccggcgacgccgccagccacugcggcaccguggccaacggcgugcugcagaccuucaugagaauggccuggggcggcagcuacaucgcccuggacagcggcuacggcaagugggacugcaucaugaccagcuaccaguaccugaucauccagaacaccaccugggaggaccacugccaguucagcagacccagccccaucggcuaccugggccugcugagccagagaaccagagacaucuacaucagcagaagaagaagaggcaccuucaccuggacccugagcgacagcgagggcaaggacacccccggcggcuacugccugaccagauggaugcugaucgaggccgagcugaagugcuucggcaacaccgccguggccaagugcaacgagaagcacgacgaggaguucugcgacaugcugagacuguucgacuucugcaagcaggccauccagagacugaagacccccgcccagaugagcauccagcugaucaacaaggccgugaacgcccugaucaacgaccagcugaucaugaagaaccaccugagagacaucaugggcauccccuacugcaacuacagcaaguacugguaccugaaccacaccaccaccggcaagaccagccugcccaagugcuggcuggugagcaacggcagcuaccugaacgagacccacuucagcgacgacaucgagcagcaggccgacaacaugaucaccgagaugcugcagaaggaguacauggagagacagggcaagaccccccugggccugguggaccuguucguguucagcaccagcuucuaccugaucagcaucuuccugcaccuggugaagauccccacccacagacacaucgugggcaagagcugccccaagccccacagacugaaccacaugggcaucugcagcugcggccuguacaagcagcccggcgugcccgugagauggaagagaugaggacuaguuauaagacugacuagcccgaugggccucccaacgggcccuccuccccuccuugcaccgagauuaaucaaaggcucuuuucagagccaccaaaaaaaaaaaaaaaaaaaaaaaaaaaaaaaaaaaaaaaaaaaaaaaaaaaaaaaaaaaaaaaaagaauu

SEQ ID NO: 24350 - RNA, 1658 nt, Artificial Sequence
  mRNA product Design i-3 (hSL-A64-N5) comprising derived and/or modified sequence from LASV(G502-SLE-2009;Clade IV)__AIT17126__GPCmut2 (opt4)
aggagaaagcuuaccaugggccagaucgugaccuucuuccaggaggugccccacgugaucgaggaggugaugaacaucgugcugaucgcccugagcauccuggccgugcugaagggccuguacaacuucgccaccugcggccuggugggccugcugaccuuccugcugcugugcggcagaagcugcaccaccggccuguacaagggcguguacgagcugcagacccuggagcugaacauggagacccugaacaugugcaugccccugagcugcaccaagaacaacagccaccacuacaucauggugggcaacgagaccggccuggagcugacccugaccaacaccagcaucaucaaccacaaguucugcaaccugagcgacgcccacaagaagaaccuguacgaccacgcccugaugagcaucaucagcaccuuccaccugagcauccccaacuucaaccaguacgaggccaugagcugcgacuucaacggcggcaagaucagcgugcaguacaaccugagccacagcuacgccggcgacgccgccgaccacugcggcaccguggccaacggcgugcugcagaccuucaugagaauggccuggggcggcagcuacaucgcccuggacagcggcagaggcagaugggacugcaucaugaccagcuaccaguaccugaucauccagaacaccaccugggaggaccacugccaguucagcagacccagccccaucggcuaccugggccugcugagccagagaaccagagacaucuacaucagcagaagaagaagaggcaccuucaccuggacccugagcgacagcgagggcaaggacacccccggcggcuacugccugaccagauggaugcugaucgaggccgagcugaagugcuucggcaacaccgccguggccaagugcaacgagaagcacgacgaggaguucugcgacaugcugagacuguucgacuucugcaagcaggccauccagagacugaaggcccccgcccagaugagcauccagcugaucaacaaggccgugaacgcccugaucaacgaccagcuggugaugaagaaccaccugagagacaucaugggcauccccuacugcaacuacagcagauacugguaccugaaccacaccaccaccggcagaaccagccugcccaagugcuggcuggugagcaacggcagcuaccugaacgagacccacuucagcgacgacaucgagcagcaggccgacaacaugaucaccgagaugcugcagaaggaguacauggagagacagggcaagaccccccugggccugguggaccuguucguguucagcaccagcuucuaccugaucagcaucuuccugcaccuggugaagauccccacccacagacacaucgugggcaagagcugccccaagccccacagacugaaccacaugggcaucugcagcugcggccuguacaagcagcccggcgugcccgugaaguggaagagaugaggacuaguuauaagacugacuagcccgaugggccucccaacgggcccuccuccccuccuugcaccgagauuaaucaaaggcucuuuucagagccaccaaaaaaaaaaaaaaaaaaaaaaaaaaaaaaaaaaaaaaaaaaaaaaaaaaaaaaaaaaaaaaaaagaauu

SEQ ID NO: 24351 - RNA, 1658 nt, Artificial Sequence
  mRNA product Design i-3 (hSL-A64-N5) comprising derived and/or modified sequence from LASV(G733-SLE-2010;Clade IV)__AIT17154__GPCmut2 (opt4)
aggagaaagcuuaccaugggccagaucgugaccuucuuccaggaggugccccacgugaucgaggaggugaugaacaucgugcugaucgcccugagcauccuggccgugcugaagggccuguacaacuucgccaccugcggcaucgugggccuggugagcuuccugcugcugugcggcagaagcugcaccaccagccuguacaagggcguguacgagcugcagacccuggagcugaacauggagacccugaacaugugcaugccccugagcugcaccaagaacaacagccaccacuacaucauggugggcaacgagaccggccuggagcugacccugaccaacaccagcaucaucaaccacaaguucugcaaccugagcgacgcccacaagaagaaccuguacgaccacgcccugaugagcaucaucagcaccuuccaccugagcauccccaacuucaaccaguacgaggccaugagcugcgacuucaacggcggcaagaucagcgugcaguacaaccugagccacagcuacgccggcgacgccgccaaccacugcggcaccaucgccaacggcgugcugcagaccuucaugagaauggccuggggcggcagcuacaucgcccuggacagcggcagagacagaugggacugcaucaugaccagcuaccaguaccugaucauccagaacaccaccugggaggaccacugccaguucagcagacccagccccaucggcuaccugggccugcugagccagagaaccagagacaucuacaucagcagaagaagaagaggcaccuucaccuggacccugagcgacagcgagggcaaggacacccccggcggcuacugccugaccagauggaugcugaucgaggccgagcugaagugcuucggcaacaccgccguggccaagugcaacgagaagcacgacgaggaguucugcgacaugcugagacuguucgacuucugcaagcaggccauccagagacugaaggcccccgcccagaugagcauccagcugaucaacaaggccgugaacgcccugaucaacgaccagcugaucaugaagaaccaccugagagacaucaugggcauccccuacugcaacuacagcaaguacugguaccugaaccacaccaccaccggcaagaccagccugcccaagugcuggcuggugagcaacggcagcuaccugaacgagacccacuucagcgacgacaucgagcagcaggccgacaacaugaucaccgagaugcugcagaaggaguacauggagagacagggcaagaccccccugggccugguggaccuguucguguucagcaccagcuucuaccugaucagcaucuuccugcaccuggugaagauccccacccacagacacguggugggcaagagcugccccaagccccacagacugaaccacaugggcaucugcagcugcggccuguacggccagcccggcgugcccgugaaguggaagagaugaggacuaguuauaagacugacuagcccgaugggccucccaacgggcccuccuccccuccuugcaccgagauuaaucaaaggcucuuuucagagccaccaaaaaaaaaaaaaaaaaaaaaaaaaaaaaaaaaaaaaaaaaaaaaaaaaaaaaaaaaaaaaaaaagaauu

SEQ ID NO: 24352 - RNA, 1658 nt, Artificial Sequence
  mRNA product Design i-3 (hSL-A64-N5) comprising derived and/or modified sequence from MOPV/LASV reassortant(IGS-1;Clade IV)__AFY05576__GPCmut2 (opt4)
aggagaaagcuuaccaugggccagaucgugaccuucuuccaggaggugccccacgugaucgaggaggugaugaacaucgugcugaucgcccugagcgugcuggccgugcugaagggccuguacaacuucgccaccugcggccuggugggccuggugaccuuccugcugcugugcggcagaagcugcaccaccagccuguacaagggcguguacgagcugcagacccuggagcugaacauggagacccugaacaugugcaugccccugagcugcaccaagaacaacagccaccacuacaucauggugggcaacgagaccggccuggagcugacccugaccaacaccagcaucaucaaccacaaguucugcaaccugagcgacgcccacaagaagaaccuguacgaccacgcccugaugagcaucaucagcaccuuccaccugagcauccccaacuucaaccaguacgaggccaugagcugcgacuucaacggcggcaagaucagcgugcaguacaaccugagccacagcuacgccggcgacgccgccaaccacugcggcaccguggccaacggcgugcugcagaccuucaugagaauggccuggggcggcagcuacaucgcccuggacagcggcagaggcaacugggacugcaucaugaccagcuaccaguaccugaucauccagaacaccaccugggaggaccacugccaguucagcagacccagccccaucggcuaccugggccugcugagccagagaaccagagacaucuacaucagcagaagaagaagaggcaccuucaccuggacccugagcgacagcgagggcgaggacacccccggcggcuacugccugaccagauggaugcugaucgaggccgagcugaagugcuucggcaacaccgccguggccaagugcaacgagaagcacgacgaggaguucugcgacaugcugagacuguucgacuucugcaagcaggccauccagagacugaaggcccccgcccagaugagcauccagcugaucaacaaggccgugaacgcccugaucaacgaccagcugaucaugaagaaccaccugagagacaucaugggcauccccuacugcaacuacagcaaguacugguaccugaaccacaccaccaccggcagaaccagccugcccaagugcuggcuggugagcaacggcagcuaccugaacgagacccacuucagcgacgacaucgagcagcaggccgacaacaugaucaccgagaugcugcagaaggaguacauggagagacagggcaagaccccccugggccugguggaccuguucguguucagcaccagcuucuaccugaucagcaucuuccugcaccuggugaagauccccacccacagacacaucgugggcaagagcugccccaagccccacagacugaaccacaugggcaucugcagcugcggccuguacaagcagcccggcgugcccgugaaguggaagagaugaggacuaguuauaagacugacuagcccgaugggccucccaacgggcccuccuccccuccuugcaccgagauuaaucaaaggcucuuuucagagccaccaaaaaaaaaaaaaaaaaaaaaaaaaaaaaaaaaaaaaaaaaaaaaaaaaaaaaaaaaaaaaaaaagaauu

SEQ ID NO: 24353 - RNA, 1658 nt, Artificial Sequence
  mRNA product Design i-3 (hSL-A64-N5) comprising derived and/or modified sequence from LASV(LM765-SLE-2012;Clade IV)__AIT17814__GPCmut2 (opt4)
aggagaaagcuuaccaugggccagaucgugaccuucuuccaggaggugccccacgugaucgaggaggugaugaacaucgugcugaucgcccugagcauccuggccgugcugaagggccuguacaacuucgccaccugcggccuggugggccuggugaccuuccugcugcugugcggcagaagcugcaccaccagccuguacaagggcguguacgagcugcagacccuggagcugaacauggagacccugaacaugugcaugccccugagcugcaccaagaacaacagccaccacuacaucauggugggcaacgagaccggccuggagcugacccugaccaacaccagcaucaucgaccacaaguucugcaaccugagcgacgcccacagaaagaaccuguacgaccacgcccugaugagcaucaucagcaccuuccaccugagcauccccaacuucaaccaguacgaggccaugagcugcgacuucaacggcggcaagaucagcgugcaguacaaccugagccacagcuacgccaaggacgccgccgaccacugcggcaccguggccaacggcgugcugcagaccuucaugagaauggccuggggcggcagcuacaucgcccuggacagcggcagaggcagaugggacugcaucaugaccagcuaccaguaccugaucauccagaacaccaccugggaggaccacugccaguucagcagacccagccccaucggcuaccugggccugcugagccagagaaccagagacaucuacaucagcagaagaagaagaggcaccuucaccuggacccugagcgacagcgagggcaaggacacccccggcggcuacugccugaccagauggaugcugaucgaggccgagcugaagugcuucggcaacaccgccguggccaagugcaacgagaagcacgacgaggaguucugcgacaugcugagacuguucgacuucugcaagcaggccauccagagacugaaggcccccgcccagaugagcauccagcugaucaacaaggccgugaacgcccugaucaacgaccagcugaucaugaagaaccaccugagagacaucaugggcauccccuacugcaacuacagcaaguacugguaccugaaccacaccaccaccggcaagaccagccugcccaagugcuggcuggugagcaacggcagcuaccugaacgagacccacuucagcgacgacaucgagcagcaggccgacaacaugaucaccgagaugcugcagaaggaguacauggagagacagggcaagaccccccugggccugguggaccuguucguguucagcaccagcuucuaccugaucagcaucuuccugcaccuggugaagauccccacccacagacacaucgugggcaagcccugccccaagccccacagacugaaccacaugggcaucugcagcugcggccuguacaagcagcccggcgugcccgugaaguggaagagaugaggacuaguuauaagacugacuagcccgaugggccucccaacgggcccuccuccccuccuugcaccgagauuaaucaaaggcucuuuucagagccaccaaaaaaaaaaaaaaaaaaaaaaaaaaaaaaaaaaaaaaaaaaaaaaaaaaaaaaaaaaaaaaaaagaauu

SEQ ID NO: 24354 - RNA, 1658 nt, Artificial Sequence
  mRNA product Design i-3 (hSL-A64-N5) comprising derived and/or modified sequence from LASV(LM776-SLE-2012;Clade IV)__AIT17824__GPCmut2 (opt4)
aggagaaagcuuaccaugggccagaucgugaccuucuuccaggaggugccccacgugaucgaggaggugaugaacaucgugcugaucgcccugagcauccuggccgugcugaagggccuguacaacuucgccaccugcggccuggugggccuggugaccuuccugcugcugugcggcagaagcugcaccaccagcguguacaagggcguguacgagcugcagacccuggagcugaacauggagacccugaacaugugcaugccccugagcugcaccaagaacaacagccaccacuacaucauggugggcaacgagaccggccuggagcugacccugaccaacaccagcaucaucaaccacaaguucugcaaccugagcgacgcccacaagaagaaccuguacgaccacgcccugaugagcaucaucagcaccuuccaccugagcauccccaacuucaaccaguacgaggccaugagcugcgacuucaacggcggcaagaucagcgugcaguacaaccugagccacagcuacgccggcgacgccgccaaccacugcggcaccguggccaacggcgugcugcagaccuucaugagaauggccuggggcggcagcuacaucgcccuggacagcggccacggcaagugggacugcaucaugaccagcuaccaguaccugaucauccagaacaccaccugggaggaccacugccaguucagcagacccagccccaucggcuaccugggccugcugagccagagaaccagagacaucuacaucagcagaagaagaagaggcaccuucaccuggacccugagcgacagcgagggcaaggacacccccggcggcuacugccugaccagauggaugcugaucgaggccgagcugaagugcuucggcaacaccgccguggccaagugcaacgagaagcacgacgaggaguucugcgacaugcugagacuguucgacuucugcaagcaggccauccagagacugaaggcccccgcccagaugagcauccagcugaucaacaaggccgugaacgcccugaucaacgaccagcugaucaugaagaaccaccugagagacaucaugggcauccccuacugcaacuacagcaaguacugguaccugaaccacaccaccaccggcaagaccagccugcccaagugcuggcuggugagcaacggcagcuaccugaacgagacccacuucagcgacgacaucgagcagcaggccgacaacaugaucaccgagaugcugcagaaggaguacauggagagacagggcaagaccccccugggccugguggaccuguucguguucagcaccagcuucuaccugaucagcaucuuccugcaccuggugaagauccccacccacagacacaucgugggcaagagcugccccaagccccacagacugaaccacaugggcaucugcagcugcggccuguacaagcagcccggcgugcccgugagauggaagagaugaggacuaguuauaagacugacuagcccgaugggccucccaacgggcccuccuccccuccuugcaccgagauuaaucaaaggcucuuuucagagccaccaaaaaaaaaaaaaaaaaaaaaaaaaaaaaaaaaaaaaaaaaaaaaaaaaaaaaaaaaaaaaaaaagaauu

SEQ ID NO: 24355 - RNA, 1658 nt, Artificial Sequence
  mRNA product Design i-3 (hSL-A64-N5) comprising derived and/or modified sequence from LASV(Mad39;Clade IV)__ANH09722__GPCmut2 (opt4)
aggagaaagcuuaccaugggccagaucgugaccuucuuccaggaggugccccacgugaucgaggaggugaugaacaucgugcugaucgcccugagcauccuggccgugcugaagggccuguacaacguggccaccugcggccugaucggccuggugaccuuccugcugcugugcggcagaagcugcaccaccacccuguacaagggcguguacgagcugcaggcccuggagcugaacauggagacccugaacaugugcaugccccugagcugcaccaagaacaacagccaccacuacaucagagugggcaacgagaccggccuggagcugacccugaccaacaccagccugaucaaccacaaguucugcaaccugagcgacgcccacaagaagaaccuguacgaccacgcccugaugagcaucaucagcaccuuccaccugagcauccccaacuucaaccaguacgaggccaugagcugcgacuucaacgacggcaagaucagcgugcaguacaaccugagccacaccuacgccggcgacaccgccaaccacugcggcaccguggccaacggcgugcugcagaccuucaugagaauggccuggggcggcagcuacaucgcccuggacagcggcagaggcggcugggacugcaucaugaccagcuaccaguaccugaucauccagaacaccaccugggaggaccacugccaguucagcagacccagccccaucggcuaccugggccugcugagccagagaaccagagacaucuacaucagcagaagaagaagaggcaccuucaccuggacccugagcgacagcgagggcaaggacacccccggcggcuacugccugaccagauggaugcugaucgaggccgagcugaagugcuucggcaacaccgccguggccaagugcaacgagaagcacgacgaggaguucugcgacaugcugagacuguucgacuucugcaagcaggccauccagagacugaaggcccccgcccagaugagcauccagcugaucaacaaggccgugaacgcccugaucaacgaccagcugaucaugaagaaccaccugagagacaucaugggcauccccuacugcaacuacagcaaguacugguaccugaaccacaccgugaccggcaagaccagccugcccaagugcuggcuggugagcaacggcagcuaccugaacgagacccacuucagcgacgacaucgagcagcaggccgacaacaugaucaccgagaugcugcagaaggaguacauggagagacagggcaagaccccccugggccugguggaccuguucguguucagcaccagcuucuaccugaucagcaucuuccugcaccuggugaagauccccacccacagacacguggugggcaagcccugccccaagccccacagacugaaccacaugggcaucugcagcugcggcuucuacaagcagcccggcgugcccgugagauggaagagaugaggacuaguuauaagacugacuagcccgaugggccucccaacgggcccuccuccccuccuugcaccgagauuaaucaaaggcucuuuucagagccaccaaaaaaaaaaaaaaaaaaaaaaaaaaaaaaaaaaaaaaaaaaaaaaaaaaaaaaaaaaaaaaaaagaauu

SEQ ID NO: 24356 - RNA, 1658 nt, Artificial Sequence
  mRNA product Design i-3 (hSL-A64-N5) comprising derived and/or modified sequence from LASV(Z0947-SLE-2011;Clade IV)__AIT17840__GPCmut2 (opt4)
aggagaaagcuuaccaugggccagaucgugaccuucuuccaggaggugccccacgugaucgaggaggugaugaacaucgugcugaucgcccugagcauccuggccgugcugaagggccuguacaacuucgccaccugcggccuggugggccuggugaccuuccugcugcugugcggcagaagcugcaccaucagccuguacaagggcguguacgagcugcagacccuggagcugaacauggagacccugaacaugugcaugccccugagcugcaccaagaacaacagccaccacuacaucauggugggcaacgagaccggccuggagcugacccugaccaacaccagcaucaucaaccacaaguucugcaaccugagcgacgcccacaagaagaaccuguacgaccacgcccugaugagcaucaucagcaccuuccaccugagcauccccaacuucaaccaguacgaggccaugagcugcgacuucaacggcggcaagaucagcgugcaguacaaccugagccacagcuacgccggcgacgccgccaaccacugcggcaccguggccaacggcgugcugcagaccuucaugagaauggccuggggcggcagcuacaucgcccuggacagcggcagagacagaugggacugcaucaugaccagcuaccaguaccugaucauccagaacaccaccugggaggaccacugccaguucagcagacccagccccaucggcuaccugggccugcugagccagagaaccagagacaucuacaucagcagaagaagaagaggcaccuucaccuggacccugagcgacagcgagggcaaggacacccccggcggcuacugccugaccagauggaugcugaucgaggccgagcugaagugcuucggcaacaccgccguggccaagugcaacgagaagcacgacgaggaguucugcgacaugcugagacuguucgacuucugcaagcaggccauccagagacugaaggcccccgcccagaugagcauccagcugaucaacaaggccgugaacgcccugaucaacgaccagcugaucaugaagaaccaccugagagacaucaugggcauccccuacugcaacuacagcaaguacugguaccugaaccacaccaccaccggcaagaccagccugcccaagugcuggcuggugagcaacggcagcuaccugaacgagacccacuucagcgacgacaucgagcagcaggccgacaacaugaucaccgagaugcugcagaaggaguacauggagagacagggcaagaccccccugggccugguggaccuguucguguucagcaccagcuucuaccugaucagcaucuuccugcaccuggugaagauccccacccacagacacaucgugggcaagcccugccccaagccccacagacugaaccacaugggcaucugcagcugcggccuguacaagcagcccggcgugcccgugaaguggaagagaugaggacuaguuauaagacugacuagcccgaugggccucccaacgggcccuccuccccuccuugcaccgagauuaaucaaaggcucuuuucagagccaccaaaaaaaaaaaaaaaaaaaaaaaaaaaaaaaaaaaaaaaaaaaaaaaaaaaaaaaaaaaaaaaaagaauu

SEQ ID NO: 24357 - RNA, 1658 nt, Artificial Sequence
  mRNA product Design i-3 (hSL-A64-N5) comprising derived and/or modified sequence from LASV(Josiah;Clade IV)__NP_694870__GPCmut2 (opt5)
aggagaaagcuuaccaugggccagaucgugaccuucuuucaagaggucccccacguuauugaagaggugaugaacaucgugcugauugcccucagcguccuggcugugcuuaaggggcuguacaauuucgccacaugcggacucguuggccuggugacguuucuucugcucugugggagauccugcaccacaucucuguauaaaggagucuacgaacugcagacccucgagcugaacauggaaacacuuaauauguguaugccucugagcugcaccaagaacaauucccaucacuauaucauggugggcaacgagacagggcucgagcugacccuuacgaauaccucuauuaucaaccauaaauucuguaaucugagcgacgcgcacaagaaaaaccucuacgaucaugcucugauguccaucauuucuacauuucaccugagcaucccgaauuucaaccaguaugaagccauguccugcgacuuuaauggaggcaagauuagcguucaguacaaccucucucacuccuaugccggcgaugcugccaaucauugugggaccguggcuaacggaguccugcaaacauucaugcggauggccuggggcgggagcuacaucgcgcuugacucuggacgcggcaacugggauugcauuaugaccuccuaccaguaucugaucauucagaauacgacaugggaggaccacugucaguuuagcagacccucuccuaucggguaccucggacugcuuucccaacggacccgcgauaucuauauuagcagacggcgcagaggcacauucaccuggacccuguccgacucugaaggcaaggauacacccgggggauacugccucacgcgguggaugcugaucgaggccgagcugaaauguuuuggcaacaccgcuguggccaagugcaaugaaaaacaugacgaggaguucugcgauaugcuccgccuguuugacuucuguaagcaggcuauucagagacuuaaagccccugcgcagaugagcauccaacugauuaacaaggccgugaaugcucucaucaacgaucagcugaucaugaagaaucaccuucgggacauuauggggauccccuauugcaacuacuccaaauauugguaccugaaucacacaaccacaggacgcaccagccucccuaaguguuggcuggucucuaacggcuccuaccugaaugaaacgcauuucagcgacgauauugaacagcaagccgacaacaugaucacagagaugcuccagaaagaguauauggaaagacaggggaagaccccgcugggacuuguugaucuguuuguguucucuaccagcuuuuaccucauuuccaucuuccugcaccuggugaaaauccccacacaucggcacauugucggcaagucuugcccuaaaccccaucgccuuaaucacaugggcaucuguagcugcgggcucuauaagcagccuggagugcccguuaaguggaaaagaugaggacuaguuauaagacugacuagcccgaugggccucccaacgggcccuccuccccuccuugcaccgagauuaaucaaaggcucuuuucagagccaccaaaaaaaaaaaaaaaaaaaaaaaaaaaaaaaaaaaaaaaaaaaaaaaaaaaaaaaaaaaaaaaaagaauu

SEQ ID NO: 24358 - RNA, 1655 nt, Artificial Sequence
  mRNA product Design i-3 (hSL-A64-N5) comprising derived and/or modified sequence from LASV(LP;Clade I)__AAF86701__GPCmut2 (opt5)
aggagaaagcuuaccaugggccagaucauuaccuucuuucaagaggugccccacgucaucgaagagguuaugaacauugugcugaucgcccucagccugcuugcuauucugaaggggcucuacaauaucgccacaugcggaaucauuggccugguggcguuccuuuuucugugugggaaauccugcucucucacgcugaagggaggcuaugaacugcagacccucgagcugaacauggaaacacuuaauauguguaugccucugagcugcaccaaaaacuccucucaucacuacaucagagucgggaaugagacaggacucgagcugacccuuacaaacaccagcauuaucaaucauaaguucuguaaccuguccgacgcucacaaaaagaaucucuaugaucaugcccugaugucuauuaucagcacguuucaccuguccauuccgaacuucaaucaguacgaagccaugagcugcgacuuuaacggcggcaagaucucugugcaguauaaucucucccacagcuacgcuggggaugccgcugagcauuguggaaccguugccaacggcgugcugcaaacauucaugcggauggcguggggagggcgcuauaucgcccuugacucuggcaaagggaauugggauugcauuaugaccuccuaccaguaccugaucauucagaacacaaccugggaagaccacugucaguuuagcagacccucuccuaucggauaucucggccugcuuucccaacggacgcgcgauauuuacaucagcagacggcgcagaggcacauucaccuggacacuguccgacucugaggggaacgagacccccggaggcuauugccucacccgguggaugcugaucgaagcugagcugaaguguuuugggaauacagccgucgcuaaaugcaacgaaaagcaugaugaggaguucugcgacaugcuccgccuguuugauuucuguaaacaggccauuagacggcuuaaggcgccugcccagaugagcauccagcugauuaauaaggcugugaacgcccucaucaaugaccaacugauuaugaaaaaccaccuucgcgauaucaugggaauccccuacugcaauuauuccaaguacugguaucugaaccacacgagcucuggcagaaccucccucccuaaauguuggcugauuagcaaugggucuuaccugaacgaaacacaguucagcgacgacaucgagcagcaagcugauaauaugauuaccgaaaugcuccagaaggaguacaucgaacggcagggaaaaacaccgcugggccuuguugacauuuuuaucuucuccaccucuuuuuaucugauuagcaucuuccuccaucugaucaagauucccacgcaccgccauaucgugggcaaaccuugccccaagccucacagacugaaccauaugggggucuguuccugcggacuuuacaagcaccccggcgugccgacaaaauggaagcggugaggacuaguuauaagacugacuagcccgaugggccucccaacgggcccuccuccccuccuugcaccgagauuaaucaaaggcucuuuucagagccaccaaaaaaaaaaaaaaaaaaaaaaaaaaaaaaaaaaaaaaaaaaaaaaaaaaaaaaaaaaaaaaaaagaauu

SEQ ID NO: 24359 - RNA, 1655 nt, Artificial Sequence
  mRNA product Design i-3 (hSL-A64-N5) comprising derived and/or modified sequence from LASV(803213;Clade II)__AAF86703__GPCmut2 (opt5)
aggagaaagcuuaccaugggccagaucauuaccuucuuucaagaggugccccacgucaucgaagagguuaugaacauugugcugaucgcccucagccugcuugcuauucugaaggggaucuacaauguggccacaugcggacucuucggccugaucuccuuucuucugcucugugggagaucuugcagcgucacguauaaaggaguguacgaacugcagacccuggagcucaacauggcgaaucugaacauguguaugccucuuuccugcacaaagaauaacucucaucacuauauuaugguuggcaaugaaaccgggcuggagcucacacugaccaacacaagcaucauuaaucauaaauucuguaaccuuuccgacgcucacaagaaaaaucuguacgaucaugcccucaugucuaucauuagcaccuuucaccuguccaucccgaacuucaaucaguaugaggccaugagcugcgacuuuaacggaggcaagauuucugugcaguacaaucugucccacagcuucgcugucgaugccgcuaaccauuguggcacgaucgccaacggggugcuccaaaccuuuaugcggauggcguggggaggcucuuauaucgcccuggacuccgggaagggaaauugggauugcauuaugacaagcuaccaguaccuuaucauucagaacaccacaugggaagaccacugucaguucucucgccccuccccuaucggcuaucuggggcuccugagccaaagaacccgggauauuuacaucucccgcagacggcgcggaacguuuacauggacccuuucugacagcgagggcaaugaagcucccggcggguauugccugacaagauggaugcucaucgaggccgagcugaaauguuucggaaacaccgcuguugccaagugcaaugaaaaacaugaugaggaauuuugcgacaugcugcgccucuucgauuucuguaagcaggcgauuaaacggcugaagaccccugcccagauguccauccagcuuauuaacaaggcugugaaugcccugaucaacgaccaacucauuaugaaaaaucaccugagagauaucaugggcauccccuacugcaacuauagccgguacugguaucuuaaucacacagucacggggaagaccucucugccucgcuguuggcucguguccaacggaagcuaccugaaugagacacauuuuucugacgacauugaacagcaggcugauaacaugaucaccgagaugcugcaaaaagaguacauggacagacagggcaagacaccgcucgggcugguggaucuuuucgucuuuagcaccuccuucuaucugauuucuaucuuucuccaccugguuaaaauucccacgcaucggcacaucgugggaaagccuugccccaaaccucaucgccugaaucacaugggcauuuguagcugcggccuuuacaagcaccccggggugccggucaaguggaaaagaugaggacuaguuauaagacugacuagcccgaugggccucccaacgggcccuccuccccuccuugcaccgagauuaaucaaaggcucuuuucagagccaccaaaaaaaaaaaaaaaaaaaaaaaaaaaaaaaaaaaaaaaaaaaaaaaaaaaaaaaaaaaaaaaaagaauu

SEQ ID NO: 24360 - RNA, 1655 nt, Artificial Sequence
  mRNA product Design i-3 (hSL-A64-N5) comprising derived and/or modified sequence from LASV(GA391;Clade III)__CAA36645__GPCmut2 (opt5)
aggagaaagcuuaccaugggccagaucgugaccuucuuucaagaggucccccacguuauugaagaggugaugaacaucgugcugauugcccucagcauccuggcuauucuuaaggggcuguacaaugucgccacaugcggacucaucggccuggugacguuccuucugcucuccgggagaucuuguagccugaucuauaaaggaaccuacgaacugcagacacucgagcugaacauggaaacccuuaauaugugcaugccucuguccuguacaaagaacaauucucaucacuauauucggguuggcaacgagaccgggcucgagcugacacuuaccaauacgagcauccugaaccauaaauuuugcaaucucuccgacgcgcacaagcgcaaccuguacgaucauucucugaugagcauuaucuccaccuuccaccucagcauuccgaauuuuaaccaguaugaagcuaugucuugugacuucaauggaggcaaaaucacagugcaguacaaccugucccacagcuuugccgucgaugccgcuggccauugcgggacccuugccaauggagugcugcaaacauucaugagaauggcuuggggcgggucuuauauugcccucgacuccggacggggcaacugggauuguaucaugaccagcuaccaguaccugaucauucagaacacgacaugggacgaucacugccaguuuucucgccccuccccuaucggguaucuuggacugcucagccaaagaacccgggacauuuacaucucccgcagacggcgcggcacauucaccuggacccugucugauagcgagggcaaugaaacacccgggggauauugucugacgagauggaugcucauugaggcggagcugaagugcuuuggcaacaccgccguugcuaaguguaaugaaaaacaugacgaggaguucugcgauaugcuucggcuguuugacuucugcaagcaggccauccgcagacucaaaaccccugcucagauguccauccagcugauuaacaaggccgugaaugcgcuuaucaacgaucaacugauuaugaaaaaucaccuccgggacaucauggggauucccuacuguaacuauagccgcuacugguaucugaaucacacaucuacaggaaagaccucccugccuagaugcuggcucaucagcaacggcucuuaccugaaugaaacgaaguucagcgacgauaucgaacagcaggccgacaacaugauuacagagaugcuucaaaaagaguacaucgaucggcaggggaagaccccgcugggacucgucgaccuguuuguguucuccaccucuuuuuaucugauuagcaucuuccuucaucucgugaaaauucccacacacagacauaucgucggcaagccuugucccaaaccucaccgccugaaucauaugggcauuugcuccugugggcuguacaagcagcccggaguuccggugcgguggaaaagaugaggacuaguuauaagacugacuagcccgaugggccucccaacgggcccuccuccccuccuugcaccgagauuaaucaaaggcucuuuucagagccaccaaaaaaaaaaaaaaaaaaaaaaaaaaaaaaaaaaaaaaaaaaaaaaaaaaaaaaaaaaaaaaaaagaauu

SEQ ID NO: 24361 - RNA, 1658 nt, Artificial Sequence
  mRNA product Design i-3 (hSL-A64-N5) comprising derived and/or modified sequence from LASV(AV;Clade V)__CCA30314__GPCmut2 (opt5)
aggagaaagcuuaccaugggccagaucgugaccuucuuucaagaggucccccacguuauugaagaggugaugaacaucgugcugauugcccucagcauccuggcuguccuuaaggggcuguacaauauugccacaugcggacucaucggccugaucacguuccuucugcucugugggagauccugcucuagcaaccuguauaaaggaguguacgaacugcagucccucgaccugaauauggagacccuuaacauguguaugccucugucuugcacaaagaauaacagccaucacuauauucggguuggcaaugauaccgggcucgaacugacacuuaccaacacauccauccugaaucauaaauuuuguaaccucucugacgcgcacaagaaagaucuguacgaccaugcucugaugagcauuaucuccaccuuccaccucagcauuccgaauuuuaaccaguaugaggccaugucuugcgauuucaauggaggcaagaucuccgugcaguacaaccugagccacucuuaugccauugacgcugccaaucauuguggcacggucgcuaacgggauccuucaaaccuuuaugcgcauggccuggggaggcuccuacaucgcgcuggauagcgggagaggaaacugggacugcauuaugacaucuuaccaguaucucaucauucagaauaccacaugggagaaccacugucaguucucccggcccagcccuaucggcuaccuggggcuucugucccaacgcaccagagauauuuauaucucucggcgcagacggggaacguuuacauggacccucagcgacuccgaaggcaaugccacacccggcggguacugccugacccgcuggaugcugaucgaggcugaacucaaguguuucggaaacaccgccguggcuaaaugcaaugagaagcaugaugaggaauuuugcgacaugcugagacuuuucgauuuuuguaaacaggccauuagccggcugaagucuccugcgcagauguccauccagcucauuaacaaagccguuaaugcucugaucaacgaccaacuuauuaugaagaaucaucugcgcgacaucaugggcauccccuauugcaacuacagcaaguauugguaccucaaucacacaauuacggggaaaaccucucugccuaaguguuggcuggugagcaacggauccuaccucaaugagacacacuucucugaugacaucgaacagcaggccgauaacaugauuaccgagaugcugcaaaaagaauauauggagagacagggcaagacaccgcuugggcuggucgaccucuucguguuuagcaccuccuucuaccugaucagcauuuuucugcggcuugugaaaauccccacgcaccgccauauugucggaaagccuugccccaaaccucacagacucaaucauaugggcaucuguucuugcggccuguauaagcagcccgggguuccggugcgguggaagagaugaggacuaguuauaagacugacuagcccgaugggccucccaacgggcccuccuccccuccuugcaccgagauuaaucaaaggcucuuuucagagccaccaaaaaaaaaaaaaaaaaaaaaaaaaaaaaaaaaaaaaaaaaaaaaaaaaaaaaaaaaaaaaaaaagaauu

SEQ ID NO: 24362 - RNA, 1655 nt, Artificial Sequence
  mRNA product Design i-3 (hSL-A64-N5) comprising derived and/or modified sequence from LASV(Togo/2016/7082;Clade VI)__AMR44577__GPCmut2 (opt5)
aggagaaagcuuaccaugggccagaucauuaccuucuuucaagaggugccccacgucaucgaagagguuaugaacauugugcugaucgcccucagccugcuugcuauucugaaggggguguacaaugucgccacaugcggaaucaucggccucgugacguuccuguuucuuugugggagauccugcucucugauuuauaaaggaagcuacgaacuccagacccuggagcugaacauggaaacacucaauauguguaugccucuguccugcaccaagaacucuagccaucacuauauccggguuggcaaugagacagggcuugagcugacccucacaaacaccuccauuaucaaucauaaauucuguaaccugucugacgcgcacaagcgcaaucuuuacgaucaugcucugaugagcauucucuccacguuucaccugagcaucccgaacuucaaucaguaugaagccaugucuugcgacuuuaacggaggcaaaauuuccgugcaguacaaucugagccacgccuaugcugucgaugccgcugagcauuguggcaccguggccaacgggguucuccaaacauucaugagaauggcguggggaggcucuuacaucgcccuggacuccgggcggggaaauugggauugcaucaugaccagcuaccaguaucuuauuauccagaacacaaccugggaagaccacugucaguuuucucgccccuccccuauuggcuaccuggggcuccugagccaaagaacgcgggauaucuauauuucccgcagacggcgcggaacauucaccuggacacuuucugacagcgagggcaacgagacccccggcggguacugccugaccagauggaugcucaucgaagcugagcugaaguguuuuggaaauacagccguggcuaagugcaacgaaaaacaugaugaggaguucugcgacaugcugcggcucuuugauuucuguaagcaggccauccagcgccugaaauccccugcgcagaugagcauucaacuuaucaauaaggccgucaacgcucugauuaaugaccagcucaucaugaaaaaccaccugagagauaugaugggcauucccuauugcaauuacucuaaguauugguaccuuaaccacacguccagcgggcggaccucucugccuaaguguuggcucgugagcaauggauccuaccugaacgaaacacauuucucugacgacaucgagcagcaagccgauaauaugaucaccgaaaugcugcagaaagaguauauugaccgccagggcaagacaccgcucgggcugguggaucuuuuugucuucagcaccuccuuuuaccugaucagcauuuuccuccaccugaucaaaauucccacgcauagacacaucguuggaaagccuugccccaaaccucaucggcugaaccacaugggcauuuguucuugcggccuuuauaagcagcccggggugccgacaagauggaaacgcugaggacuaguuauaagacugacuagcccgaugggccucccaacgggcccuccuccccuccuugcaccgagauuaaucaaaggcucuuuucagagccaccaaaaaaaaaaaaaaaaaaaaaaaaaaaaaaaaaaaaaaaaaaaaaaaaaaaaaaaaaaaaaaaaagaauu

SEQ ID NO: 24363 - RNA, 1655 nt, Artificial Sequence
  mRNA product Design i-3 (hSL-A64-N5) comprising derived and/or modified sequence from LASV(KAK-428;Clade n.d. (VII))__ANH09740__GPCmut2 (opt5)
aggagaaagcuuaccaugggccagaucgugaccuucuuucaagaggucccccacguuauugaagaggugaugaacaucgugcugauugcccucagccugcuugcuauccugaaggggcucuacaauuucgccacaugcggagucauuggccugaucacguuucuucugcucugugggagauccugcucugcgaccuauaaaggacaguacgaacugcagacacuggagcucaacauggaaagccugaauauguguaugccucuuuccugcaccaagaacaauucucaucacuauauccgggcuggcaacaauacagggcuggagcucacccugacaaacaccagcauuaucucccauaaauucuguaaucuuucugacgcccacaagaaaaaccuguacgaucauacgcucaugagcauuaucaccacauuucaccuguccauuccgaauuucaaccaguaugaggccaugagcugcgacuuuaauggaggcaagaucucuauucaauacaaccugucccacagcuaugcuggcgaugccgcucagcauugugggaccguggccaauggaguucuccagacauucaugcgcauggcguggggcgggucuuaccuggcccuugacuccggaagacggggcugggauugcaucaucagcucuuaccaguaucugauuauccaaaacaccacgugggacgaucacugucaguuuucccgccccagcccuauuggguaccucggauucgugucccagaagacaagagacaucuauauuucucggcgcagacggggcaccuuuacauggacccugagcgauuccgaaggccaugacaugcccgggggauacugccuuacccgcuggaugcugaucgaggcugaucucaaauguuucggcaacacagccgucgcuaagugcaaugaaaaacacgacgaggaguuuugcgauauguggagacuguucgacuucuguaagcaggccauccaacggcugaaagcgccugcccagaugaacauucagcucaucaauaaggcugugaacgcccugauuaaugaccaacuuaugaugaagaaccaucugcgcgauaucauggggauucccuauugcaauuacagcaaauuuugguaucucaacaauacgaccacaggaagaaccucucugccucgguguuggcuuaucuccaacggcagcuaccugaaugaaacacacuucucugacgauaucgagcagcaggcugacaacaugauuaccgaaaugcuccagaaggaguacauggaucgccaagggaaaacgccgcugggacugguugaccucuuuguguucagcacauccuuuuaucugaucaccauuuuccuucaccuggucaagauccccacccauagacacauugugggcaaaccuugccccaagccucaucggcucaaucacaugggcaucuguucuugcgggcuguacaaacagcccggagugccggucagauggaagcgcugaggacuaguuauaagacugacuagcccgaugggccucccaacgggcccuccuccccuccuugcaccgagauuaaucaaaggcucuuuucagagccaccaaaaaaaaaaaaaaaaaaaaaaaaaaaaaaaaaaaaaaaaaaaaaaaaaaaaaaaaaaaaaaaaagaauu

SEQ ID NO: 24364 - RNA, 1655 nt, Artificial Sequence; identical to SEQ ID NO: 24358
  mRNA product Design i-3 (hSL-A64-N5) comprising derived and/or modified sequence from LASV(Pinneo-NIG-1969;Clade I)__AIT17836__GPCmut2 (opt5)

SEQ ID NO: 24365 - RNA, 1655 nt, Artificial Sequence
  mRNA product Design i-3 (hSL-A64-N5) comprising derived and/or modified sequence from LASV(ISTH0009-NIG-2011;Clade II)__AIT17404__GPCmut2 (opt5)
aggagaaagcuuaccaugggccagaucauuaccuucuuucaagaggugccccacgucaucgaagagguuaugaacauugugcugaucgcccucagccugcuugcuauucugaaggggaucuacaauguggccacaugcggacucuucggccuggucuccuuucuucugcucugugggagaucuugcagcacgaccuauaaaggaguguacgaacugcagacacuggagcucgacauggcgucccugaacauguguaugccucuuucuugcaccaagaauaacagccaucacuauaucaugguuggcaaugaaacagggcuggagcucacccugacaaacaccuccauuaucaaucauaaauucuguaaccuuucugaugcucacaagaaaaaucuguacgaccaugcccucaugagcauuaucuccacguuucaccugagcauuccgaacuucaaucaguaugaggccaugucuugcgauuuuaacggaggcaagaucuccgugcaguacaaucugagccacgcuuaugccgucgacgcugccaaccauuguggcaccauugcgaauggggugcuccaaacauucaugcggauggccuggggaggcucuuacaucgcucuggauuccgggaagggaagcugggacugcaucaugaccucuuaccaguaucuuauuauccagaacacaaccugggaagaucacugucaguuuucccgccccagcccuauuggcuaccuggggcuccugucccaaagaacgcgggacaucuauauuucucgcagacggcgcggaacauucaccuggacacuuagcgauuccgagggcaacgaaacccccggcggguacugccugaccagauggaugcucaucgaggccgagcugaaauguuuuggaaauacagcuguugccaagugcaacgaaaaacaugacgaggaguucugcgauaugcugcggcucuuugacuucuguaagcaggcgauccgcagacugaaaacgccugcccagaugagcauucagcuuaucaauaaggcugugaacgcccugauuaaugaucaacucaucaugaagaaccaucugcgggacauuaugggcauccccuauugcaauuacucuaaauauugguaccuuaaccacaccgucacagggaagaccucccugccucgcuguuggcucgugagcaauggaucuuaccugaacgaaacacacuucagcgacgauaucgaacagcaggcugacaauaugauuaccgagcugcuccaaaaagaguauauggauagacagggcaagacgccgcuggggcuuguggaccuguuugucuucuccacaucuuuuuaccucaucagcauuuuccugcaccugaucaaaauucccacccaucggcacaucaccggaaagccuugccccaaaccucaucgccuuaaccacaugggcauuuguuccugcggccucuauaagcaccccgggguuccggugaaguggaaaagaugaggacuaguuauaagacugacuagcccgaugggccucccaacgggcccuccuccccuccuugcaccgagauuaaucaaaggcucuuuucagagccaccaaaaaaaaaaaaaaaaaaaaaaaaaaaaaaaaaaaaaaaaaaaaaaaaaaaaaaaaaaaaaaaaagaauu

SEQ ID NO: 24366 - RNA, 1655 nt, Artificial Sequence
  mRNA product Design i-3 (hSL-A64-N5) comprising derived and/or modified sequence from LASV(ISTH2010-NIG-2012;Clade II)__AIT17482__GPCmut2 (opt5)
aggagaaagcuuaccaugggccagaucauuaccuucuuucaagaggugccccacgucaucgaagagguuaugaacauugugcugaucgcccucagccugcuugcuauucugaaggggaucuacaauguggccacaugcggacucuucggccuggucuccuuucuucugcucugugggagaucuugcagcacgaccuauaaaggaguguacgaacugcagacacuggagcucgacauggcgucccugaacauguguaugccucuuucuugcaccaagaauaacagccaucacuauaucaugguuggcaaugaaacagggcuggagcucacccugacaaacaccuccauuaucaaucauaaauucuguaaccuuucugaugcucacaagaaaaaucuguacgaccaugcccucaugagcauuaucuccacguuucaccugagcauuccgaacuucaaucaguaugaggccaugucuugcgauuuuaacggaggcaagaucuccgugcaguacaaucugagccacgcuuaugccgucgacgcugccaaccauuguggcaccauugcgaauggggugcuccaaacauucaugcggauggccuggggaggcucuuacaucgcucuggauuccgggaagggaagcugggacugcaucaugaccucuuaccaguaucuuauuauccagaacauuacaugggaagaucacugucaguuuucccgccccagcccuaucggcuaccuggggcuccugucccaaagaacccgggacauuuauaucucucgcagacggcgcggaacguucacauggacccuuagcgauuccgagggcaacgaaacacccggcggguacugccugaccagauggaugcucaucgaggccgagcugaaauguuuuggaaauaccgcuguugccaagugcaacgaaaaacaugacgaggaguucugcgauaugcugcggcucuuugacuucuguaagcaggcgauucgcagacugaaaacgccugcccagaugagcauccagcuuauuaauaaggcugugaacgcccugaucaaugaucaacucauuaugaagaaccaucugcgggacaucaugggcauccccuauugcaauuacucuaaauauugguaccuuaaccacacagucaccgggaagacaucccugccucgcuguuggcucgugagcaauggaucuuaccugaacgaaacccacuucagcgacgauauugaacagcaggcugacaauaugaucacagagcugcuccaaaaagaguauauugauagacagggcaagaccccgcuggggcuuguggaccuguuugucuucuccacgucuuuuuaccucaucagcauuuuccugcaccugguuaaaauccccacacaucggcacguggugggaaagccuugccccaaaccucaucgccuuaaccacaugggcauuuguuccugcggccucuauaagcaccccggggucccggugaaguggaaaagaugaggacuaguuauaagacugacuagcccgaugggccucccaacgggcccuccuccccuccuugcaccgagauuaaucaaaggcucuuuucagagccaccaaaaaaaaaaaaaaaaaaaaaaaaaaaaaaaaaaaaaaaaaaaaaaaaaaaaaaaaaaaaaaaaagaauu

SEQ ID NO: 24367 - RNA, 1655 nt, Artificial Sequence
  mRNA product Design i-3 (hSL-A64-N5) comprising derived and/or modified sequence from LASV(Lassa virus/H.sapiens-wt/NGA/2015/ISTH_0543;Clade II)__AVO03639__GPCmut2 (opt5)
aggagaaagcuuaccaugggccagaucauuaccuucuuucaagaggugccccacgucaucgaagagguuaugaacauugugcugaucgcccucagccugcuugcuauucugaaggggaucuacaauguggccacaugcggacucuucggccuggucuccuuucuucugcucugugggagaucuugcagcacgaccuauaaaggaguguacgaacugcagacacuggagcucgacauggcgaaccugaauauguguaugccucuuuccugcaccaagaacaauucucaucacuauaucaugguuggcaacgaaacagggcuggagcucacccugacaaauaccagcauuaucaaccauaaauucuguaaucuuuccgaugcucacaagaaaaaccuguacgaccaugcccucaugucuauuaucagcacguuucaccuguccauuccgaauuucaaccaguaugaggccaugagcugcgauuuuaauggaggcaagaucucugugcaguacaaccugucccacaccuaugcugucgacgccgcuaaucauuguggcacaauugccaacggggugcuccaaaccuucaugcggauggcguggggaggcagcuacaucgcccuggauucugggaagggauccugggacugcaucaugacaagcuaccaguaucuuguuauucagaacaccacgugggaagaucacugucaguuuucucgccccuccccuaucggcuaccuggggcuccugagccaaagaacacgggacauuuauaucucccgcagacggcgcggaaccuucacauggacccuuucugauagcgagggcaaugaaacccccggcggguacugccugacaagauggaugcucauugaggcugagcugaaauguuuuggaaacacggccguggcuaagugcaaugaaaaacaugacgaggaguucugcgauaugcugcggcucuuugacuucuguaagcaggccauccgcagacugaaaaccccugcgcagauguccauccagcuuauuaacaaggccgucaaugcucugaucaacgaucaacucauuaugaagaaucaucugcgggacaucaugggcauucccuauugcaacuacagcaaauauugguaccuuaaucacacagugaccgggaagacaucucugccucgcuguuggcucguguccaacggaagcuaccugaaugaaacccacuucucugacgauaucgaacagcaggccgacaacaugaucacggagcugcuccaaaaagaguauauugauagacagggcaagacaccgcuggggcuugucgaccuguuuguuuucagcaccuccuuuuaccucaucucuauuuuccugcaccuggugaaaauccccacccaucggcacauuacaggaaagccuugccccaaaccucaucgccuuaaucacaugggcaucuguagcugcggccucuauaagcaccccggggugccggucaaguggaaaagaugaggacuaguuauaagacugacuagcccgaugggccucccaacgggcccuccuccccuccuugcaccgagauuaaucaaaggcucuuuucagagccaccaaaaaaaaaaaaaaaaaaaaaaaaaaaaaaaaaaaaaaaaaaaaaaaaaaaaaaaaaaaaaaaaagaauu

SEQ ID NO: 24368 - RNA, 1655 nt, Artificial Sequence
  mRNA product Design i-3 (hSL-A64-N5) comprising derived and/or modified sequence from LASV(Lassa virus/H.sapiens-wt/NGA/2016/ISTH_0009;Clade II)__AVO03571__GPCmut2 (opt5)
aggagaaagcuuaccaugggccagaucauuaccuucuuucaagaggugccccacgucaucgaagagguuaugaacauugugcugaucgcccucagccugcuugcuauucugaaggggaucuacaauguggccacaugcggacuccugggccuugucuccuuccugcuccugugugggagaucuugcagcacgaccuauaaaggaguguacgaacugcagacacucgagcuggacauggcgucccuuaacauguguaugccucugucuugcaccaagaauaacagccaucacuauaucaugguuggcaaugaaacagggcucgagcugacccuuacaaacaccuccauuaucaaucauaaauuuuguaaccugucugaugcucacaagaaaaaucucuacgaccaugcccugaugagcauuaucuccacguuccaccugagcauuccgaacuuuaaucaguaugaggccaugucuugcgauuucaacggaggccggaucuccgugcaguacaaucucagccacucuuaugcugucgacgccgcuaaccauuguggcaccauugccaauggggugcugcaaacauuuaugcgcauggcguggggaggcuccuacaucgcccuugauagcgggaagggaucuugggacugcaucaugaccuccuaccaguaucugauuauccagaacacaaccugggaagaucacugucaguucagcagacccuccccuauuggcuaccucgggcugcuuucucaacggacgcgcgacaucuauauuagcagacggcgcagaggaacauuuaccuggacacuguccgauagcgagggcaacgaaacccccggcggguacugccucacccgguggaugcugaucgaggcugagcugaaguguuucggaaauacagccguugcuaaaugcaacgaaaagcaugacgaggaauuuugcgauaugcuccgccuguucgacuuuuguaaacaggccaucagacggcuuaagacgccugcgcagaugucuauucagcugaucaauaaagccgugaacgcucucauuaaugaucaacugaucaugaagaaccaccuucgcgacauuaugggcauccccuauugcaauuacuccaaguauugguaccugaaccacaccgucacagggaaaaccagccucccuagauguuggcuggugucuaauggaagcuaccugaacgagacacauuucuccgacgauaucgaacagcaggccgacaauaugauuaccgagcuccugcaaaaggaguauaucgaucggcagggcaaaacgccgcuugggcugguggaccucuucgucuuuucuaccagcuucuaccugauuuccaucuuucugcaccuuguuaagauucccacacaucgccacaucaccggaaaaccuugccccaagccucauagacucaaccacaugggcauuuguagcugcggccuguauaaucaccccggggugccggugaaauggaagcggugaggacuaguuauaagacugacuagcccgaugggccucccaacgggcccuccuccccuccuugcaccgagauuaaucaaaggcucuuuucagagccaccaaaaaaaaaaaaaaaaaaaaaaaaaaaaaaaaaaaaaaaaaaaaaaaaaaaaaaaaaaaaaaaaagaauu

SEQ ID NO: 24369 - RNA, 1655 nt, Artificial Sequence
  mRNA product Design i-3 (hSL-A64-N5) comprising derived and/or modified sequence from LASV(Lassa virus/H.sapiens-wt/NGA/2016/ISTH_0017;Clade II)__AVO03567__GPCmut2 (opt5)
aggagaaagcuuaccaugggccagaucauuaccuucuuucaagaggugccccacgucaucgaagagguuaugaacauugugcugaucgcccucagccugcuugcuauucugaaggggaucuacaauguggccacaugcggacucuucggccuggucuccuuucuucugcucugugggagaucuugcagcacgaccuauaaaggaguguacgaacugcagacacuggagcucgacauggcgucccugaacauguguaugccucuuucuugcaccaagaauaacagccaucacuauaucaugguuggcaaugaaacagggcuggagcucacccugacaaacaccuccauuaucaaucauaaauucuguaaccuuucugaugcucacaagaaaaaucuguacgaccaugcccucaugagcauuaucuccacguuucaccugagcauuccgaacuucaaucaguaugaggccaugucuugcgauuuuaacggaggcaagaucuccgugcaguacaaucugagccacaccuaugcuauugacgccgcuaaccauuguggcacaaucgccaaugggguccuccaaaccuucaugcggauggcguggggaggcucuuacaucgcccuggauuccgggaagggaagcugggacugcauuaugacaucuuaccaguaucuuaucauucagaacaccacgugggaagaucacugucaguuuucccgccccagcccuaucggcuaccuggggcuccugucccaaagaacacgggacauuuauaucucucgcagacggcgcggaaccuucacauggacccuuagcgauuccgagggcaacgaaacccccggcggguacugccugacaagauggaugcucaucgaggcugagcugaaauguuuuggaaauacggccguggcuaagugcaacgaaaaacaugacgaggaguucugcgauaugcugcggcucuuugacuucuguaagcaggccauucgcagacugaaaaccccugcgcagaugagcauccagcuuauuaauaaggccguuaacgcucugaucaaugaucaacucauuaugaagaaccaucugcgggacaucaugggcauccccuauugcaauuacucuaaauauugguaccuuaaccacacagugaccgggaagacaucccugccucgcuguuggcucgucagcaauggaucuuaccugaacgaaacccacuucagcgacgauauugaacagcaggccgacaauaugaucacggagcugcuccaaaaagaguauauggauagacagggcaagacaccgcuggggcuuguggaccuguuuguguucuccaccucuuuuuaccucauuagcaucuuccugcaccugguccggauucccacccaucgccacguuaucggaaaaccuugccccaagccucauagacuuaaccacaugggcauuuguuccugcggccucuauaaacaccccggggugccggugaaguggaagcggugaggacuaguuauaagacugacuagcccgaugggccucccaacgggcccuccuccccuccuugcaccgagauuaaucaaaggcucuuuucagagccaccaaaaaaaaaaaaaaaaaaaaaaaaaaaaaaaaaaaaaaaaaaaaaaaaaaaaaaaaaaaaaaaaagaauu

SEQ ID NO: 24370 - RNA, 1655 nt, Artificial Sequence
  mRNA product Design i-3 (hSL-A64-N5) comprising derived and/or modified sequence from LASV(Lassa virus/H.sapiens-wt/NGA/2018/ISTH_0959;Clade II)__AVV65099__GPCmut2 (opt5)
aggagaaagcuuaccaugggccagaucauuaccuucuuucaagaggugccccacgucaucgaagagguuaugaacauugugcugaucgcccucagccugcuugcuauucugaaggggaucuacaauguggucacaugcggacucuucggccugguguccuuucuucugcucugugggagaucuugcagcacgaccuauaaaggaguuuacgaacugcagacacuggagcucgacauggccucccugaacauguguaugccucuuucuugcaccaagaauaacagccaucacuauaucauggugggcaaugaaacagggcuggagcucacccugacaaacaccuccauuaucaaucauaaauucuguaaccuuucugaugcgcacaagaaaaaucuguacgaccaugcucucaugagcauuaucuccacguuucaccugagcauuccgaacuucaaucaguaugaggccaugucuugcgauuuuaacggaggcaagaucuccguccaguacaaucugagccacgccuaugcuauugacgccgcuaaccauuguggcaccaucgccaauggggugcuccaaacauucaugcggauggcguggggaggcucuuacaucgcccuggauuccgggaagggaagcugggacugcauuaugaccucuuaccaguaucuuaucauucagaacacaaccugggaagaucacugucaguuuucccgccccagcccuaucggcuaccuggggcuccugucccaaagaacgcgggacauuuauaucucucgcagacggcgcggaacauucaccuggacacuuagcgauuccgagggcaacgaaacccccggcggguacugccugaccagauggaugcucaucgaggcugagcugaaauguuuuggaaauacagccguugcuaagugcaacgaaaaacaugacgaggaguucugcgauaugcugcggcucuuugacuucuguaagcaggccauucgcagacugaaaacgccugcgcagaugagcauccagcuuauuaauaaggccgugaacgcucugaucaaugaucaacucauuaugaagaaccaucugcgggacaucaugggcauccccuauugcaauuacucuaaauauugguaccuuaaccacaccgucacagggaagaccucccugccucgcuguuggcucgugagcaauggaucuuaccugaacgaaacacacuucagcgacgauauugaacagcaggccgacaauaugaucaccgagcugcuccaaaaagaguauauugauagacagggcaagacgccgcuggggcuuguggaccuguuugucuucuccacaucuuuuuaccucaucagcauuuuccugcaccugguuaaaauccccacccaucggcacgugauuggaaagccuugccccaaaccucaucgccuuaaccacaugggcaucuguuccugcggccucuauaagcaccccggggugccggucaaguggaaaagaugaggacuaguuauaagacugacuagcccgaugggccucccaacgggcccuccuccccuccuugcaccgagauuaaucaaaggcucuuuucagagccaccaaaaaaaaaaaaaaaaaaaaaaaaaaaaaaaaaaaaaaaaaaaaaaaaaaaaaaaaaaaaaaaaagaauu

SEQ ID NO: 24371 - RNA, 1655 nt, Artificial Sequence
  mRNA product Design i-3 (hSL-A64-N5) comprising derived and/or modified sequence from LASV(LASV003-NIG-2008;Clade II)__AIT17580__GPCmut2 (opt5)
aggagaaagcuuaccaugggccagaucauuaccuucuuucaagaggugccccacgucaucgaagagguuaugaacauugugcugaucgcccucagccugcuugcuauucugaaggggaucuacaauguggccacaugcggacucuucggccuggucuccuuucuucugcucugugggagaucuugcagcacgaccuauaaaggaguguacgaacugcagacacuggagcucgacauggcgucccugaacauguguaugccucuuucuugcaccaagaauaacagccaucacuauaucaugguuggcaaugaaacagggcuggagcucacccugacaaacaccuccauuaucaaucauaaauucuguaaccuuucugaugcucacaagaaaaaucuguacgaccaugcccucaugagcauuaucuccacguuucaccugagcauuccgaacuucaaucaguaugaggccaugucuugcgauuuuaacggaggcaagaucuccgugcaguacaaucugagccacaccuaugcugucgacgccgcuaaccauuguggcacaauugccaauggggugcuccaaaccuucaugcggauggcguggggaggcucuuacaucgcccuggauuccgggaagggaagcugggacugcaucaugacaucuuaccaguaucuuauuauccagaacaccacgugggaagaucacugucaguuuucccgccccagcccuauuggcuaccuggggcuccugucccaaagaacacgggacaucuauauuucucgcagacggcgcggaaccuucacauggacccuuagcgauuccgagagcaacgaaacccccggcggcuacugccugacaagauggaugcucaucgaggcugagcugaaauguuuugggaauacggccguugcuaagugcaacgaaaaacaugacgaggaguucugcgauaugcugcggcucuuugacuucuguaagcaggccauccgcagacugaaagcgccugcccagaugucuauucagcuuaucaauaaggcugugaacgcccugauuaaugaucaacucaucaugaagaaccaucugcgggacauuaugggaauccccuauugcaauuacuccaaauauugguaccuuaaccacaccgucacaggccgcaccagccugccuagauguuggcucgugucuaaugggagcuaccugaacgaaacacacuucuccgacgauaucgaacagcaggcugacaauaugauuaccgagcugcuccaaaaggaguauauggaucggcagggaaaaacgccgcugggccuuguggaccuguuugucuucucuaccagcuuuuaccucaucuccauuuuccugcaccugguuaagauccccacacaucgccacgugauugggaaaccuugccccaagccucauagacuuaaccacaugggaaucuguagcugcggccucuauaaacaccccggcgugccggucaaguggaagcggugaggacuaguuauaagacugacuagcccgaugggccucccaacgggcccuccuccccuccuugcaccgagauuaaucaaaggcucuuuucagagccaccaaaaaaaaaaaaaaaaaaaaaaaaaaaaaaaaaaaaaaaaaaaaaaaaaaaaaaaaaaaaaaaaagaauu

SEQ ID NO: 24372 - RNA, 1655 nt, Artificial Sequence
  mRNA product Design i-3 (hSL-A64-N5) comprising derived and/or modified sequence from LASV(LASV035-NIG-2009;Clade II)__AIT17588__GPCmut2 (opt5)
aggagaaagcuuaccaugggccagaucauuaccuucuuucaagaggugccccacgucaucgaagagguuaugaacauugugcugaucgcccucagccugcuugcuauucugaaggggaucuacaauguggccacaugcggacucuucggccuggucuccuuucuucugcucugugggagaucuugcagcacgaccuauaaaggaguguacgaacugcagacacuggagcucgacauggcgucccugaacauguguaugccucuuucuugcaccaagaauaacagccaucacuauaucaugguuggcaaugaaacagggcuggagcucacccugacaaacaccuccauuaucaaucauaaauucuguaaccuuucugaugcucacaagaaaaaucuguacgaccaugcccucaugagcauuaucuccacguuucaccugagcauuccgaacuucaaucaguaugaggccaugucuugcgauuuuaacggaggcaagaucuccgugcaguacaaucugagccacgcuuaugccgucgacgcugccaaccauuguggcaccauugcgaauggggugcuccaaacauucaugcggauggccuggggaggcucuuacaucgcucuggauuccgggaagggaagcugggacugcaucaugaccucuuaccaguaucuuauuauccagaacacaaccugggaagaucacugucaguuuucccgccccagcccuauuggcuaccuggggcuccugucccaaagaacgcgggacaucuauauuucucgcagacggcgcggaacauucaccuggacacuuagcgauuccgagggcaacgaaacccccggcggguacugccugaccagauggaugcucaucgaggccgagcugaaauguuuuggaaauacagcuguugccaagugcaacgaaaaacaugacgaggaguucugcgauaugcugcggcucuuugacuucuguaagcaggcgauccgcagacugaaagccccugcucagaugagcauucagcuuaucaauaaggccgugaacgcucugauuaaugaucaacucaucaugaagaaccaucugcgggacauuaugggcauccccuauugcaauuacucuaaauauugguaccuuaaccacacggucaccgggaagacaucccugccucgcuguuggcucgugagcaauggaucuuaccugaacgaaacccacuucagcgacgauaucgaacagcaggccgacaauaugauuacagagcugcuccaaaaagaguauaucgauagacagggcaagaccccgcuggggcuuguggaccuguuugucuucuccacgucuuuuuaccucauuagcaucuuccugcaccugguuaaaauucccacacaucggcacgugaucggaaagccuugccccaaaccucaucgccuuaaccacaugggcauuuguuccugcggccucuauaagcaccccggggugccggucaaguggaaaagaugaggacuaguuauaagacugacuagcccgaugggccucccaacgggcccuccuccccuccuugcaccgagauuaaucaaaggcucuuuucagagccaccaaaaaaaaaaaaaaaaaaaaaaaaaaaaaaaaaaaaaaaaaaaaaaaaaaaaaaaaaaaaaaaaagaauu

SEQ ID NO: 24373 - RNA, 1655 nt, Artificial Sequence
  mRNA product Design i-3 (hSL-A64-N5) comprising derived and/or modified sequence from LASV(LASV1000-NIG-2009;Clade II)__AIT17782__GPCmut2 (opt5)
aggagaaagcuuaccaugggccagaucauuaccuucuuucaagaggugccccacgucaucgaagagguuaugaacauugugcugaucgcccucagccugcuugcuauucugaaggggaucuacaauguggccacaugcggacucuucggccuggucuccuuucuucugcucugugggagaucuugcagcacgaccuauaaaggaguguacgaacugcagacacuggagcucgacauggcgucccugaacauguguaugccucuuucuugcaccaagaauaacagccaucacuauaucaugguuggcaaugaaacagggcuggagcucacccugacaaacaccuccauuaucaaucauaaauucuguaaccuuucugaugcucacaagaaaaaucuguacgaccaugcccucaugagcauuaucuccacguuucaccugagcauuccgaacuucaaucaguaugaggccaugucuugcgauuuuaacggaggcaagaucuccgugcaguacaaucugagccacaccuaugcugucgacgccgcuaaccauuguggcacaauugccaauggggugcuccaaaccuucaugcggauggcguggggaggcucuuacaucgcccuggauuccgggaagggaagcugggacugcaucaugacaucuuaccaguaucuuauuauccagaacaccacgugggaagaucacugucaguuuucccgccccagcccuauuggcuaccuggggcuccugucccaaagaacacgggacaucuauauuucucgcagacggcgcggaaccuucacauggacccuuagcgauuccgagggcaacgaaacccccggcggguacugccugacaagauggaugcucaucgaggcugagcugaaauguuuuggaaauacggccguugcuaagugcaacgaaaaacaugacgaggaguucugcgauaugcugcggcucuuugacuucuguaagcaggccaucaaacgccugaagaccccugcgcagaugagcauucagcuuaucaauaaggccgugaacgcucugauuaaugaucaacucaucaugaaaaaccaccugagagacauuaugggcauccccuauugcaauuacucuaaguauugguaccuuaaccacacagucaccgggaaaacaucccugccucgguguuggcucgugagcaauggaucuuaccugaacgaaacccauuucagcgacgauaucgaacagcaggccgacaauaugauuacggagcugcuccaaaaggaguauaucgaucgccagggcaaaacaccgcuggggcuuguggaccuguuugucuucuccaccucuuuuuaccucauuagcaucuuccugcaccugguuaagauucccacccauagacacguggugggaaaaccuugccccaagccucaucggcuuaaccacaugggcaucuguuccugcggccucuauaagcaccccggggucccggugaaauggaagcgcugaggacuaguuauaagacugacuagcccgaugggccucccaacgggcccuccuccccuccuugcaccgagauuaaucaaaggcucuuuucagagccaccaaaaaaaaaaaaaaaaaaaaaaaaaaaaaaaaaaaaaaaaaaaaaaaaaaaaaaaaaaaaaaaaagaauu

SEQ ID NO: 24374 - RNA, 1655 nt, Artificial Sequence
  mRNA product Design i-3 (hSL-A64-N5) comprising derived and/or modified sequence from LASV(LASV221-NIG-2010;Clade II)__AIT17624__GPCmut2 (opt5)
aggagaaagcuuaccaugggccagaucauuaccuucuuucaagaggugccccacgucaucgaagagguuaugaacauugugcugaucgcccucagccugcuugcuauucugaaggggaucuacaauguggccacaugcggacucuucggccuggucuccuuucuucugcucugugggagaucuugcagcacgaccuauaaaggaguguacgaacugcagacacuggagcucgacauggcgucccugaacauguguaugccucuuucuugcaccaagaauaacagccaucacuauaucaugguuggcaaugaaacagggcuggagcucacccugacaaacaccuccauuaucaaucauaaauucuguaaccuuucugaugcucacaagaaaaaucuguacgaccaugcccucaugagcauuaucuccacguuucaccugagcauuccgaacuucaaucaguaugaggccaugucuugcgauuuuaacggaggcaagaucuccgugcaguacaaucugagccacaccuaugcuauugacgccgcuaaccauuguggcacaaucgccaaugggguccuccaaaccuucaugcggauggcguggggaggcucuuacaucgcccuggauuccgggaagggaagcugggacugcauuaugacaucuuaccaguaucuuaucauucagaacaccacgugggaagaucacugucaguuuucccgccccagcccuaucggcuaccuggggcuccugucccaaagaacacgggacauuuauaucucucgcagacggcgcggaaccuucacauggacccuuagcgauuccgagggcaacgaaacccccggcggguacugccugacaagauggaugcucaucgaggcugagcugaaauguuuuggaaauacggccguggcuaagugcaacgaaaaacaugacgaggaguucugcgauaugcugcggcucuuugacuucuguaagcaggccauucgcagacugaaaaccccugcgcagaugagcauccagcuuauuaauaaggccguuaacgcucugaucaaugaucaacucauuaugaagaaccaucugcgggacaucaugggcauccccuauugcaauuacucuaaauauugguaccuuaaccacacagugaccgggaagacaucccugccucgcuguuggcucgucagcaauggaucuuaccugaacgaaacccacuucagcgacgauauugaacagcaggccgacaauaugaucacggagaugcugcaaaaagaguauauggauagacagggcaagacaccgcucgggcugguggaccuuuuuguguucuccaccucuuuuuaccugauuagcaucuuccuccaccuggucaaaauucccacccaucggcacguuaucggaaagccuugccccaaaccucaucgccugaaccacaugggcauuuguuccugcggccuuuauaagcaccccggggugccggugaaguggaaaagaugaggacuaguuauaagacugacuagcccgaugggccucccaacgggcccuccuccccuccuugcaccgagauuaaucaaaggcucuuuucagagccaccaaaaaaaaaaaaaaaaaaaaaaaaaaaaaaaaaaaaaaaaaaaaaaaaaaaaaaaaaaaaaaaaagaauu

SEQ ID NO: 24375 - RNA, 1655 nt, Artificial Sequence
  mRNA product Design i-3 (hSL-A64-N5) comprising derived and/or modified sequence from LASV(LASV237-NIG-2010;Clade II)__AIT17638__GPCmut2 (opt5)
aggagaaagcuuaccaugggccagaucauuaccuucuuucaagaggugccccacgucaucgaagagguuaugaacauugugcugaucgcccucagccugcuugcuauucugaaggggaucuacaauguggccacaugcggacucuucggccuggucuccuuucuucugcucugugggagaucuugcagcacgaccuauaaaggaguguacgaacugcagacacuggagcucgacauggcgucccugaacauguguaugccucuuucuugcaccaagaauaacagccaucacuauaucaugguuggcaaugaaacagggcuggagcucacccugacaaacaccuccauuaucaaucauaaauucuguaaccuuucugaugcucacaagaaagaccuguacgaucaugcccucaugagcauuaucuccacguuucaccugagcauuccgaauuucaaccaguaugaggccaugucuugcgacuuuaauggaggcaagaucuccgugcaguacaaccugagccacaccuaugcugucgaugccgcuaaucauuguggcacaauugccaacggggugcuccaaaccuucaugcggauggcguggggaggcucuuacaucgcccuggacuccgggaagggaagcugggauugcaucaugacaucuuaccaguaucuuauuauccagaauaccacgugggaagaccacugucaguuuucccgccccagcccuauuggcuaccuggggcuccugucccaaagaacacgggauaucuauauuucucgcagacggcgcggaaccuucacauggacccuuagcgacuccgagggcaacgaaacccccggcggguacugccugacaagauggaugcucaucgaggcugagcugaaauguuuuggaaacacggccguugcuaagugcaaugaaaaacaugaugaggaguucugcgacaugcugcggcucuuugauuucuguaagcaggccauccgcagacugaaaaccccugcgcagaugagcauucagcuuaucaacaaggccgugaaugcucugauuaacgaccaacucaucaugaagaaucaucugcgggacauuaugggcauccccuauugcaacuacucuaaauauugguaccuuaaucacacagucaccgggaagacaucccugccucgcuguuggcucgugagcaacggaucuuaccugaaugaaacccacuucagcgaugacaucgaacagcaggccgauaacaugauuacggagcugcuccaaaaagaguauauggacagacagggcaagacaccgcuggggcuuguggaucuguuugucuucuccaccucuuuuuaccucaucagcauuuuccugcaccugaucaaaauucccacccaucggcacaucacaggaaagccuugccccaaaccucaucgccuuaaucacaugggcauuuguuccugcggccucuauaagcaccccgggguuccggugaaguggaaaagaugaggacuaguuauaagacugacuagcccgaugggccucccaacgggcccuccuccccuccuugcaccgagauuaaucaaaggcucuuuucagagccaccaaaaaaaaaaaaaaaaaaaaaaaaaaaaaaaaaaaaaaaaaaaaaaaaaaaaaaaaaaaaaaaaagaauu

SEQ ID NO: 24376 - RNA, 1655 nt, Artificial Sequence
  mRNA product Design i-3 (hSL-A64-N5) comprising derived and/or modified sequence from LASV(LASV253-NIG-2011;Clade II)__AIT17670__GPCmut2 (opt5)
aggagaaagcuuaccaugggccagaucauuaccuucuuucaagaggugccccacgucaucgaagagguuaugaacauugugcugaucgcccucagccugcuugcuauucugaaggggaucuacaauguggccacaugcggacucuucggccuggucuccuuucuucugcucugugggagaucuugcagcacgaccuauaaaggaguguacgaacugcagacacuggagcucgacauggcgucccugaacauguguaugccucuuucuugcaccaagaauaacagccaucacuauaucaugguuggcaaugaaacagggcuggagcucacccugacaaacaccuccauuaucaaucauaaauucuguaaccuuucugaugcucacaagaaaaaucuguacgaccaugcccucaugagcauuaucuccacguuucaccugagcauuccgaacuucaaucaguaugaggccaugucuugcgauuuuaacggaggcaagaucuccgugcaguacaaucugagccacaccuaugcugucgacgccgcuaaccauuguggcacaauugccaauggggugcuccaaaccuucaugcggauggcguggggaggcucuuacaucgcccuggauuccgggaagggaagcugggacugcaucaugacaucuuaccaguaucuuauuauccagaacaccacgugggaagaucacugucaguuuucccgccccagcccuauuggcuaccuggggcuccugucccaaagaacacgggacaucuauauuucucgcagacggcgcggaaccuucacauggacccuuagcgauuccgagggcaacgaaacccccggcggguacugccugacaagauggaugcucaucgaggcugagcugaaauguuuuggaaauacggccguugcuaagugcaacgaaaaacaugacgaggaguucugcgauaugcugcggcucuuugacuucuguaagcaggccauccgcagacugaaagcgccugcccagaugagcauucagcuuaucaauaaggcugugaacgcccugauuaaugaucaacucaucaugaagaaccaucugcgggacauuaugggcauccccuauugcaauuacucuaaauauugguaccuuaaccacaccgucacagggcgcaccucccugccuagauguuggcucgugagcaauggaucuuaccugaacgaaacacacuucagcgacgauaucgaacagcaggcugacaauaugauuaccgagcugcuccaaaaggaguauaucgaucggcagggcaaaacgccgcuggggcuuguggaccuguuugucuucuccacaucuuuuuaccucauuagcaucuuccugcaccugguuaagauucccacccaucgccacaucauuggaaaaccuugccccaagccucauagacuuaaccacaugggcaucuguuccugcggccucuauaaacaccccggggugccggugaaguggaagcggugaggacuaguuauaagacugacuagcccgaugggccucccaacgggcccuccuccccuccuugcaccgagauuaaucaaaggcucuuuucagagccaccaaaaaaaaaaaaaaaaaaaaaaaaaaaaaaaaaaaaaaaaaaaaaaaaaaaaaaaaaaaaaaaaagaauu

SEQ ID NO: 24377 - RNA, 1655 nt, Artificial Sequence
  mRNA product Design i-3 (hSL-A64-N5) comprising derived and/or modified sequence from LASV(LASV254-NIG-2011;Clade II)__AIT17674__GPCmut2 (opt5)
aggagaaagcuuaccaugggccagaucauuaccuucuuucaagaggugccccacgucaucgaagagguuaugaacauugugcugaucgcccucagccugcuugcuauucugaaggggaucuacaauguggccacaugcggacucuucggccuggucuccuuucuucugcucugugggagaucuugcagcacgaccuauaaaggaguguacgaacugcagacacuggagcucgacaugaccaaccugaauauguguaugccucuuuccugcacaaagaacaauucucaucacuauaucaugguuggcaacgaaaccgggcuggagcucacacugaccaauacgagcauuaucaaccauaaauucuguaaucuuuccgaugcgcacaagaaaaaccuguacaaucaugcucucaugucuauuaucagcaccuuucaccuguccauuccgaacuucaaucaguaugaggccaugagcugcgacuuuaacggaggcaagaucucugugcaguacaaucugucccacagcuaugccgucgaugcugccaaccauuguggcacaauugcuaacggggugcuccaaaccuucaugcggauggccuggggaggcucuuacaucgcgcuggacuccgggaagggaaauugggauugcaucaugacaagcuaccaguaucuuauuauccagaacaccacgugggaagaccacugucaguuuucucgccccuccccuauuggcuaccuggggcuccugagccaaagaacacgggauaucuauauuucccgcagacggcgcggaaccuucacauggacccuuucugacagcgagggcaaugaaacccccggcggguacugccugacaagauggaugcucaucgaggccgagcugaaauguuuuggaaacacggcuguugccaagugcaaugaaaaacaugaugaggaguucugcgacaugcugcggcucuuugauuucuguaagcaggcuauccgcagacugaaaaccccugcccaggcgaacauucagcuuaucaauaaggccgugaacgcucugauuaaugaccaacucaucaugaagaaccaucugcgggauauuaugggcauccccuauugcaauuacuccaaauauugguaccuuaaccacacagucaccgggaagacaagccugccucgcuguuggcucgugucuaauggauccuaccugaacgaaacccacuucagcgacgacaucgaacagcaggccgauaauaugauuacggagcugcuccaaaaagaguauauggacagacagggcaagacaccgcuggggcuuguggaucuguuugucuucucuaccagcuuuuaccucaucuccauuuuccugcaccugguuaaaauccccacccaucggcacgugauuggaaagccuugccccaaaccucaucgccuuaaccacaugggcaucuguucuugcggccucuauaagcaccccggggugccggucaaguggaaaagaugaggacuaguuauaagacugacuagcccgaugggccucccaacgggcccuccuccccuccuugcaccgagauuaaucaaaggcucuuuucagagccaccaaaaaaaaaaaaaaaaaaaaaaaaaaaaaaaaaaaaaaaaaaaaaaaaaaaaaaaaaaaaaaaaagaauu

SEQ ID NO: 24378 - RNA, 1655 nt, Artificial Sequence
  mRNA product Design i-3 (hSL-A64-N5) comprising derived and/or modified sequence from LASV(Nig08-A19;Clade III)__ADU56618__GPCmut2 (opt5)
aggagaaagcuuaccaugggccagaucgugaccuucuuucaagaggucccccacguuauugaagaggugaugaacaucgugcugauugcccucagcauccuggcuauucuuaaggggcuguacaauaucgccacaugcggacucaucggccuggucacguuccuucugcucuccgggagaucuuguagcaugaccuauaaaggaguguacgaacugcagacacuggagcucaacaugaauacccugaacaugugcaugccucuuuccuguacaaagaauaacucucaucacuauauuaugguuggcaaugaaaccgggcuggagcucacacugaccaacacgagccuucugcaucacaaauuuugcaaucucuccgacgcgcauaagaaaaaccuguacgaucacacccugaugucuaucauuagcacauuccaccucuccaucccgaauuuuaaccaguaugaggcuaugagcugugacuucaauggaggcaagauuaccgugcaguacaaccugucucauuccuaugccaucgaugccgcuaaucacugcggcacagucgccaacggggugcuucaaaccuuuaugcggauggcuuggggaggcagcuacauugcccuggacucugggcgcggaaagugggauuguaucaugacguccuaccaguaucucaucauucagaacacaaccugggaagaccauugccaguucagcagacccucuccuaucggcuaccuggggcuucugucccaacggacacgcgauauuuauaucagcagacggcgcagaggaaccuuuaccuggacacucuccgacucugagggcaaugaaacgcccggcggguacugucugacccgguggaugcugauugaggcggagcucaaaugcuucggaaacacagccguugcuaaguguaaugaaaaacacgaugaggaauuuugcgacaugcugcgccuuuucgauuuuugcaagcaggccaucagacggcugaaagcuccugcccagaugagcauccagcucauuaacaaggcggugaaugcccugaucaacgaccaacuuauuaugaagaaucaucugcgcgauaucaugggcauucccuauuguaacuacuccaaauauugguaccucaaucacaccagcacagggagaaccucucugccucggugcuggcuggucuccaacggaagcuaccucaaugagacgcacuucucugacgacaucgaacagcaggcugauaacaugaucacagagaugcugcaaaaggaguaucuugaccgccagggcaaaaccccgcuggggcucguggaucuguucguguuuagcaccuccuucuaccugauuucuaucuuucuucaucucgucaagauucccacacacagacauaucguuggaaaaccuugucccaagccucaccggcugaaucacaugggcauuugcagcuguggccuguauaaacagcccggggugccggugagauggaagcgcugaggacuaguuauaagacugacuagcccgaugggccucccaacgggcccuccuccccuccuugcaccgagauuaaucaaaggcucuuuucagagccaccaaaaaaaaaaaaaaaaaaaaaaaaaaaaaaaaaaaaaaaaaaaaaaaaaaaaaaaaaaaaaaaaagaauu

SEQ ID NO: 24379 - RNA, 1658 nt, Artificial Sequence
  mRNA product Design i-3 (hSL-A64-N5) comprising derived and/or modified sequence from LASV(G1180-SLE-2010;Clade IV)__AIT17168__GPCmut2 (opt5)
aggagaaagcuuaccaugggccagaucgugaccuucuuucaagaggucccccacguuauugaagaggugaugaacaucgugcugauugcccucagcauccuggcuguccuuaaggggcuguacaauuucgccacaugcggacucgugggccugcuuacguuucugcuccugugugggagauccugcaccgcgucucgguauaaaggaguuuacgaacugcagacacucgagcugaacauggaaacccuuaauauguguaugccucugagcugcacaaagaacaauucccaucacuauauuauggugggcaacgagaccgggcucgagcugacacuuaccaauacgucuaucaucaaccauaaauucuguaaucugagcgacgcucacaagaaaaaccucuacgaucaugcccugauguccauuaucucuaccuuucaccugagcauuccgaauuucaaccaguaugaagccauguccugcgacuuuaauggaggcaagaucagcguccaguacaaccucucucacuccuaugcuggcgaugccgcuaaucauugugggacaguggccaacggaguucugcaaaccuucaugcgcauggcguggggcgggagcuacauugcccuugacucuggacacggcuccugggauugcaucaugacaagcuaccaguaucugauuauccagaacaccacgugggaggaccauugucaguuuucuagacccuccccuaucggguaccucggacugcuuagccaacggacacgcgauauuuauaucuccagacggcgcagaggcaccuucacauggacccugucugacagcgaaggcaaggauacccccgggggauacugccucacacgguggaugcugauugaggcugagcugaaauguuuuggcaauacggccguggcuaagugcaacgaaaaacacgacgaggaguucugcgauaugcuccgccuguuugacuucuguaagcaggccauccagagacuuaaagcgccugcccagauguccauucaacugaucaauaaggcugucaacgcccucaucaaugaucagcugauuaugaagaaccaccuucgggacaucauggggauucccuauugcaauuacagcaaauauugguaccugaaccauaccacaaccggaaagacaucucucccuaaauguuggcugguguccaauggcagcuaccugaacgaaacccacuucucugacgauaucgaacagcaagcugacaauaugauuacggagaugcuccagaaggaguauauggaacgccaggggaaaacaccgcugggacuuguggaucuguuugucuucagcaccuccuuuuaccucaucucuaucuuccugcaucugguuaagauucccacccacagacauaucgugggcaaaagcugcccuaagccccaccggcuuaaccacaugggcauuuguuccugcgggcucuauaagcagccuggagugcccgucaaauggaagcgcugaggacuaguuauaagacugacuagcccgaugggccucccaacgggcccuccuccccuccuugcaccgagauuaaucaaaggcucuuuucagagccaccaaaaaaaaaaaaaaaaaaaaaaaaaaaaaaaaaaaaaaaaaaaaaaaaaaaaaaaaaaaaaaaaagaauu

SEQ ID NO: 24380 - RNA, 1658 nt, Artificial Sequence
  mRNA product Design i-3 (hSL-A64-N5) comprising derived and/or modified sequence from LASV(G1442-SLE-2011;Clade IV)__AIT17180__GPCmut2 (opt5)
aggagaaagcuuaccaugggccagaucgugaccuucuuucaagaggucccccacguuauugaagaggugaugaacaucgugcugauugcccucagcauccuggcuguccuuaaggggcuguacaauguggccacaugcggacucauuggccugguuacguuccuucugcucugugggagauccugcaccacaacccuguauaaaggaguguacgaacugcagacacucgagcugaacauggaaacccuuaauauguguaugccucugucuugcacaaagaacaauagccaucacuauauccgggucggcaacgagaccgggcucgagcugacgcuuaccaauacauccaucauuaaccauaaauuuuguaaucugucugacgcgcacaagaaaaaccucuacgaucaugcucugaugagcaucauuuccaccuuccaccugucuaucccgaauuuuaaccaguaugaagccaugagcugcgacuucaauggaggcaagauuuccgugcaguacaaccucagccacucuuaugccggcgaugcugccaaucauugugggacaguugcuaacggagugcugcaaaccuuuaugcgcauggccuggggcggguccuacaucgcgcuugacagcggaagaggcaacugggauugcauuaugacgucuuaccaguaucugaucauccagaauacaaccugggacgaucacugucaguucucccggcccagcccuauuggguaccucggacugcuuucucaacgcacaagagacgucuauaucucccggcgcagacggggcaccuuuaccuggacacugagcgauuccgagggcaaggacacgcccgggggauacugccucacccgcuggaugcugauugaagccgagcugaaauguuucggcaacacagcuguggccaagugcaaugagaaacaugaugaagaguuuugcgacaugcucagacuguucgauuuuuguaagcaggcuauccagcggcuuaaagccccugcgcagaugucuauucaacugaucaacaaggccgugaaugcucucaucaacgaccagcugauuaugaagaaucaccuucgcgacaucauggggauucccuauugcaacuacagcaaauauugguaccugaauaacaccgccacaggaaagaccucccucccuaaauguuggcugaucagcaauggcucuuaccugaacgaaacgcacuucuccgaugacauugagcaggaagcugauaauaugaucacagagaugcuccaaaaggaguauauggaaagacaggggaaaaccccgcugggacuugucgaccuguucguuuuuagcaccucuuucuaccucaucagcauuuuucugcaucuggugaagauccccacacaccggcauauugugggcaaauccugcccuaagccccaccgccuuaaccauaugggcaucuguucuugcgggcucuauaagcagccuggaguccccgugagauggaaacggugaggacuaguuauaagacugacuagcccgaugggccucccaacgggcccuccuccccuccuugcaccgagauuaaucaaaggcucuuuucagagccaccaaaaaaaaaaaaaaaaaaaaaaaaaaaaaaaaaaaaaaaaaaaaaaaaaaaaaaaaaaaaaaaaagaauu

SEQ ID NO: 24381 - RNA, 1658 nt, Artificial Sequence
  mRNA product Design i-3 (hSL-A64-N5) comprising derived and/or modified sequence from LASV(G3010-SLE-2013;Clade IV)__AIT17344__GPCmut2 (opt5)
aggagaaagcuuaccaugggccagaucgugaccuucuuucaagaggucccccacguuauugaagaggugaugaacaucgugcugauugcccucagcauccuggcuguccuuaaggggcuguacaauuucgccacaugcggacucgugggccugguuacguuucuucugcucugugggagauccugcaccacaucucuguauaaaggaguguacgaacugcagacccucgagcugaacauggaaacacuuaauauguguaugccucugagcugcaccaagaacaauucccaucacuauauuauggucggcaacgagacagggcucgagcugacccuuacgaauaccucuaucaucaaccauaaauucuguaaucugagcgacgcgcacaagaaaaaccucuacaaucaugcucugauguccauuaucucuacauuucaccugagcauuccgaacuucaaucaguaugaagccauguccugcgauuuuaacggaggcaagaucagcgugcaguacaaucucucucacuccuaugccggcgacgcugccagccauugugggaccguugcuaacggagugcugcaaacauucaugcggauggccuggggcgggucuuacauugcgcuugauuccggauacggcaagugggacugcaucaugaccagcuaucaguaccugauuauccagaacacgacaugggaggaucacugucaguuuucucgccccuccccuaucggguaucucggacugcuuagccaaagaacccgggacauuuacaucucccgcagacggcgcggcacauucaccuggacccugucugauagcgaaggcaaagacacacccgggggauauugccucacgagauggaugcugauugaggccgagcugaaguguuuuggcaauaccgcugucgccaaaugcaacgaaaagcaugaugaggaguucugcgacaugcuccggcuguuugauuucuguaaacaggcuauccagcgccuuaagaccccugcccagauguccauucaacugaucaauaaggcggugaacgcccucaucaaugaccagcugauuaugaaaaaccaccuuagagauaucauggggauucccuacugcaauuauagcaaguacugguaccugaaccacacaacaaccggaaaaacgucucucccuaaguguuggcugguguccaauggcagcuaucugaacgaaacacauuucucugacgacaucgaacagcaagcugauaauaugauuaccgagaugcuccagaaagaguacauggaacggcaggggaagaccccgcugggacuugucgaccuguuuguuuucagcacauccuuuuaucucaucucuaucuuccugcaccuggugaaaauucccacccaucgccacaucgugggcaagagcugcccuaagccccauagacuuaaccacaugggcauuuguuccugcgggcucuacaaacagccuggaguccccgugcgguggaagcgcugaggacuaguuauaagacugacuagcccgaugggccucccaacgggcccuccuccccuccuugcaccgagauuaaucaaaggcucuuuucagagccaccaaaaaaaaaaaaaaaaaaaaaaaaaaaaaaaaaaaaaaaaaaaaaaaaaaaaaaaaaaaaaaaaagaauu

SEQ ID NO: 24382 - RNA, 1658 nt, Artificial Sequence
  mRNA product Design i-3 (hSL-A64-N5) comprising derived and/or modified sequence from LASV(G502-SLE-2009;Clade IV)__AIT17126__GPCmut2 (opt5)
aggagaaagcuuaccaugggccagaucgugaccuucuuucaagaggucccccacguuauugaagaggugaugaacaucgugcugauugcccucagcauccuggcuguccuuaaggggcuguacaauuucgccacaugcggacucgugggccugcuuacguuucugcuccugugugggagauccugcaccacaggacuguauaaaggcguuuacgaacuccagacccuggagcuuaacauggaaacacugaauauguguaugccucucucuugcaccaagaacaauagccaucacuauauuaugguggggaacgagacaggacuggagcuuacccugacgaauaccuccaucaucaaccauaaauucuguaaucucucugacgcgcacaagaaaaaccuguacgaucaugcucugaugagcauuaucuccacauuucaccucucuauuccgaauuucaaccaguaugaagccaugagcugcgacuuuaauggcggcaagaucuccguccaguacaaccugagccacucuuaugccggggaugcugccgaccauuguggaaccguggcuaauggcguucuucaaacauucaugcggauggccuggggaggguccuacauugcgcuggauagcggccgcgggagaugggacugcaucaugaccucuuaccaguaucucauuauccagaacacgacaugggaggaucacugucaguuuucccggcccagcccuaucggauaccugggccuucugucucaacgcaccagagacauuuauaucucccggcgcagacggggcacauucaccuggacccucagcgauuccgaagggaaggacacacccggaggcuacugccugacgcgcuggaugcugauugaggccgagcucaaauguuuugggaacaccgcuguggccaagugcaaugaaaaacaugaugaggaguucugcgacaugcugagacuuuuugauuucuguaagcaggcuauccagcggcugaaagccccugcgcagaugucuauucaacucaucaacaaggccgucaaugcucugaucaacgaccagcuugugaugaagaaucaucugcgcgacauuaugggaauccccuauugcaacuacagcagauauugguaccucaaucacacaaccacaggccggaccucccugccuaaauguuggcuggugagcaacgggucuuaccucaaugaaacgcacuucuccgaugacauugaacagcaagccgauaacaugaucacagagaugcugcagaaggaguauauggaacgccagggaaaaaccccgcuuggccuggucgaccucuuuguuuucagcaccucuuuuuaccugauuagcaucuuccugcaccuugugaagauccccacacauagacacauugugggcaaauccugcccuaagccccaucggcucaaucacauggggaucuguucuugcggacuguauaaacagccuggcguccccgugaaguggaagagaugaggacuaguuauaagacugacuagcccgaugggccucccaacgggcccuccuccccuccuugcaccgagauuaaucaaaggcucuuuucagagccaccaaaaaaaaaaaaaaaaaaaaaaaaaaaaaaaaaaaaaaaaaaaaaaaaaaaaaaaaaaaaaaaaagaauu

SEQ ID NO: 24383 - RNA, 1658 nt, Artificial Sequence
  mRNA product Design i-3 (hSL-A64-N5) comprising derived and/or modified sequence from LASV(G733-SLE-2010;Clade IV)__AIT17154__GPCmut2 (opt5)
aggagaaagcuuaccaugggccagaucgugaccuucuuucaagaggucccccacguuauugaagaggugaugaacaucgugcugauugcccucagcauccuggcuguccuuaaggggcuguacaauuucgccacaugcggaauugugggccucguuuccuuucugcuucugugugggagaucuugcacgaccagccucuauaaaggaguguacgaacugcagacacuggagcucaacauggaaacccugaauauguguaugccucuuuccugcacaaagaacaauucucaucacuauaucauggucggcaacgagaccgggcuggagcucacacugaccaauacgagcaucauuaaccauaaauucuguaaucuuuccgacgcgcacaagaaaaaccuguacgaucaugcucucaugucuaucauuagcaccuuucaccuguccaucccgaauuucaaccaguaugaagccaugagcugcgacuuuaauggaggcaagauuucugugcaguacaaccugucccacagcuaugccggcgaugcugccaaucauugugggacaaucgcuaacggaguucuccaaaccuucaugcggauggccuggggcgggucuuacauugcgcuggacuccggacgcgauagaugggacugcaucaugacaagcuaccaguaucuuaucauucagaacaccacgugggaggaucacugucaguuuucucggcccuccccuaucggcuaccuggggcuccugagccaacgcacaagagacauuuauaucucccggcgcagacggggaaccuucacauggacccuuucugauagcgaaggcaaggacacccccggcggguacugccugacacgcuggaugcucauugaggccgagcugaaauguuuuggaaauacggcuguggccaagugcaacgaaaaacaugaugaggaguucugcgacaugcugagacucuuugauuucuguaagcaggcuauccagcggcugaaagccccugcgcagauguccauccaacuuauuaauaaggccgucaacgcucugaucaaugaccagcucauuaugaagaaccaucugcgcgacaucaugggcauucccuauugcaauuacagcaaauauugguaccuuaaccacaccacaaccgggaagacaucucugccuaaauguuggcucguguccaauggaagcuaccugaacgaaacccacuucucugaugacaucgaacagcaagccgauaauaugaucacggagaugcugcagaaggaguauauggaaagacagggcaaaacaccgcucgggcugguggaccuuuuugucuucagcaccuccuuuuaccugauuucuaucuuccuccaccugguuaagauucccacccaucggcacguggugggaaaaagcugcccuaagccccaucgccugaaccacaugggcaucuguuccugcggccuuuaugggcagccuggaguccccgugaaguggaaaagaugaggacuaguuauaagacugacuagcccgaugggccucccaacgggcccuccuccccuccuugcaccgagauuaaucaaaggcucuuuucagagccaccaaaaaaaaaaaaaaaaaaaaaaaaaaaaaaaaaaaaaaaaaaaaaaaaaaaaaaaaaaaaaaaaagaauu

SEQ ID NO: 24384 - RNA, 1658 nt, Artificial Sequence
  mRNA product Design i-3 (hSL-A64-N5) comprising derived and/or modified sequence from MOPV/LASV reassortant(IGS-1;Clade IV)__AFY05576__GPCmut2 (opt5)
aggagaaagcuuaccaugggccagaucgugaccuucuuucaagaggucccccacguuauugaagaggugaugaacaucgugcugauugcccucagcguccuggcugugcuuaaggggcuguacaauuucgccacaugcggacucguuggccuggugacguuucuucugcucugugggagauccugcaccacaucucuguauaaaggagucuacgaacugcagacccucgagcugaacauggaaacacuuaauauguguaugccucugagcugcaccaagaacaauucccaucacuauaucauggugggcaacgagacagggcucgagcugacccuuacgaauaccucuauuaucaaccauaaauucuguaaucugagcgacgcgcacaagaaaaaccucuacgaucaugcucugauguccaucauuucuacauuucaccugagcaucccgaauuucaaccaguaugaagccauguccugcgacuuuaauggaggcaagauuagcguucaguacaaccucucucacuccuaugccggcgaugcugccaaucauugugggaccguggcuaacggaguccugcaaacauucaugcggauggccuggggcgggagcuacaucgcgcuugacucuggacgcggcaacugggauugcauuaugaccuccuaccaguaucugaucauucagaauacgacaugggaggaccacugucaguuuagcagacccucuccuaucggguaccucggacugcuuucccaacggacccgcgauaucuauauuagcagacggcgcagaggcacauucaccuggacccuguccgacucugaaggcgaggauacacccgggggauacugccucacgcgguggaugcugaucgaggccgaacugaaguguuuuggcaacaccgcuguggccaaaugcaaugagaagcaugacgaagaguucugcgauaugcuccgccuguuugacuucuguaaacaggcuauucagagacuuaaggccccugcgcagaugagcauccaacugauuaacaaagccgugaaugcucucaucaacgaucagcugaucaugaagaaucaccuucgggacauuauggggauccccuauugcaacuacuccaaguauugguaccugaaucacacaaccacaggacgcaccagccucccuaaauguuggcuggucucuaacggcuccuaccugaaugaaacgcauuucagcgacgauauugagcagcaagccgacaacaugaucacagagaugcuccagaaggaauauauggagagacaggggaaaaccccgcugggacuuguugaucuguuuguguucucuaccagcuuuuaccucauuuccaucuuccugcaccuggugaagauccccacacaucggcacauugucggcaaaucuugcccuaagccccaucgccuuaaucacaugggcaucuguagcugcgggcucuauaaacagccuggagugcccguuaaguggaagagaugaggacuaguuauaagacugacuagcccgaugggccucccaacgggcccuccuccccuccuugcaccgagauuaaucaaaggcucuuuucagagccaccaaaaaaaaaaaaaaaaaaaaaaaaaaaaaaaaaaaaaaaaaaaaaaaaaaaaaaaaaaaaaaaaagaauu

SEQ ID NO: 24385 - RNA, 1658 nt, Artificial Sequence
  mRNA product Design i-3 (hSL-A64-N5) comprising derived and/or modified sequence from LASV(LM765-SLE-2012;Clade IV)__AIT17814__GPCmut2 (opt5)
aggagaaagcuuaccaugggccagaucgugaccuucuuucaagaggucccccacguuauugaagaggugaugaacaucgugcugauugcccucagcauccuggcuguccuuaaggggcuguacaauuucgccacaugcggacucgugggccugguuacguuucuucugcucugugggagauccugcaccacaucucuguauaaaggaguguacgaacugcagacccucgagcugaacauggaaacacuuaauauguguaugccucugagcugcaccaagaacaauucccaucacuauauuauggucggcaacgagacagggcucgagcugacccuuacgaauaccucuaucaucgaccauaaauucuguaaccugagcgaugcgcaccggaagaaucucuacgaccaugcucugauguccauuaucucuacauuucaccugagcauuccgaacuucaaucaguaugaagccauguccugcgauuuuaacggaggcaaaaucagcgugcaguacaaucucucucacuccuaugccaaggacgcugccgaucauuguggcaccguugcuaacggggugcugcaaacauucaugcgcauggccuggggaggcagcuacauugcgcuugacucugggagaggacggugggauugcaucaugaccuccuaccaguaucugauuauccagaauacgacaugggaggaccacugucaguuuagccgccccucuccuaucggcuaccucgggcugcuuucccaaagaacccgggauauuuauaucagccgcagacggcgcggaacauucaccuggacccuguccgacucugaaggcaaggauacacccggcggguacugccucacgagauggaugcugauugaggccgagcugaaauguuuuggaaacaccgcugucgccaagugcaacgaaaaacaugacgaggaguucugcgauaugcuccggcuguuugacuucuguaagcaggcuauccagcgccuuaaagccccugcgcagaugagcauucaacugaucaauaaggccgugaacgcucucaucaaugaccagcugauuaugaagaaccaccuuagagauaucaugggcauucccuauugcaauuacuccaaauauugguaccugaaccacacaaccacagggaagaccagccucccuaaauguuggcuggugucuaauggauccuaccugaacgaaacgcauuucagcgacgauaucgaacagcaagccgacaauaugauuacagagaugcuccagaaggaguauauggaacggcagggcaaaaccccgcuggggcuugucgaucuguuuguuuucucuaccagcuuuuaccucaucuccaucuuccugcaccuggugaagauucccacacaucgccacaucgugggaaaaccuugccccaagccucauagacuuaaccacaugggcauuuguucuugcggccucuauaagcagcccggggucccggugaaauggaagcggugaggacuaguuauaagacugacuagcccgaugggccucccaacgggcccuccuccccuccuugcaccgagauuaaucaaaggcucuuuucagagccaccaaaaaaaaaaaaaaaaaaaaaaaaaaaaaaaaaaaaaaaaaaaaaaaaaaaaaaaaaaaaaaaaagaauu

SEQ ID NO: 24386 - RNA, 1658 nt, Artificial Sequence
  mRNA product Design i-3 (hSL-A64-N5) comprising derived and/or modified sequence from LASV(LM776-SLE-2012;Clade IV)__AIT17824__GPCmut2 (opt5)
aggagaaagcuuaccaugggccagaucgugaccuucuuucaagaggucccccacguuauugaagaggugaugaacaucgugcugauugcccucagcauccuggcuguccuuaaggggcuguacaauuucgccacaugcggacucgugggccugguuacguuucuucugcucugugggagauccugcaccacaucuguguauaaaggagucuacgaacugcagacccuggagcucaacauggaaacacugaauauguguaugccucuuagcugcaccaagaacaauucccaucacuauauuauggugggcaacgagacagggcuggagcucacccugacgaauaccucuaucaucaaccauaaauucuguaaucuuagcgacgcgcacaagaaaaaccuguacgaucaugcucucauguccauuaucucuacauuucaccugagcauuccgaauuucaaccaguaugaagccauguccugcgacuuuaauggaggcaagaucagcguucaguacaaccugucucacuccuaugccggcgaugcugccaaucauugugggaccguggcuaacggaguccuccaaacauucaugcggauggccuggggcgggagcuacauugcgcuggacucuggacacggcaagugggauugcaucaugaccuccuaccaguaucuuauuauccagaacacgacaugggaggaccauugucaguuuagccgccccucuccuaucggguaccugggacuccugucccaaagaacccgggauauuuauaucagccgcagacggcgcggcacauucaccuggacccuuuccgacucugaaggcaaagauacacccgggggauacugccugacgagauggaugcucauugaggccgagcugaaguguuuuggcaauaccgcuguggccaaaugcaacgaaaagcacgacgaggaguucugcgauaugcugcggcucuuugacuucuguaaacaggcuauccagcgccugaaggccccugcgcagaugagcauucaacuuaucaauaaggccgugaacgcucugaucaaugaucagcucauuaugaaaaaccaccugagagacaucauggggauucccuauugcaauuacuccaaguauugguaccuuaaccauacaaccacaggaaaaaccagccugccuaaguguuggcucgucucuaauggcuccuaccugaacgaaacgcacuucagcgacgauaucgaacagcaagccgacaauaugauuacagagaugcugcagaaagaguauauggaacggcaggggaagaccccgcucggacugguugaucuuuuuguguucucuaccagcuuuuaccugaucuccaucuuccuccaucuggugaaaauucccacacaccgccauaucgucggcaagucuugcccuaagccccacagacugaaccacaugggcauuuguagcugcgggcuuuauaaacagccuggagugcccguucgguggaagcgcugaggacuaguuauaagacugacuagcccgaugggccucccaacgggcccuccuccccuccuugcaccgagauuaaucaaaggcucuuuucagagccaccaaaaaaaaaaaaaaaaaaaaaaaaaaaaaaaaaaaaaaaaaaaaaaaaaaaaaaaaaaaaaaaaagaauu

SEQ ID NO: 24387 - RNA, 1658 nt, Artificial Sequence
  mRNA product Design i-3 (hSL-A64-N5) comprising derived and/or modified sequence from LASV(Mad39;Clade IV)__ANH09722__GPCmut2 (opt5)
aggagaaagcuuaccaugggccagaucgugaccuucuuucaagaggucccccacguuauugaagaggugaugaacaucgugcugauugcccucagcauccuggcuguccuuaaggggcuguacaauguggccacaugcggacucauuggccugguuacguuccuucugcucugugggagauccugcaccacaacccuguauaaaggaguguacgaacugcaggcgcucgagcugaacauggaaacacuuaauauguguaugccucugucuugcaccaagaacaauagccaucacuauauccgggucggcaacgagacagggcucgagcugacccuuacgaauaccucccugaucaaccauaaauuuuguaaucucucugacgcucacaagaaaaaccuguacgaucaugcccugaugagcauuaucuccacauuccaccucucuauuccgaauuuuaaccaguaugaagccaugagcugcgacuucaaugauggaaagaucuccgugcaguacaaccugagccacaccuaugcuggcgacacagccaaucauuguggcaccguugcuaacggggugcuucaaacguuuaugcgcauggccuggggaggcucuuacauugcgcuggauuccgggagaggaggcugggacugcaucaugacaagcuaccaguaucucauuauccagaacaccacaugggaggaucacugucaguucucucggcccuccccuaucggguaccugggacuucugagccaacgcaccagagacauuuauaucucucggcgcagacggggcaccuuuacauggacgcucuccgauagcgaaggcaaggacacccccgggggauacugccugacacgcuggaugcugauugaggccgagcucaaauguuucggcaauaccgcugucgccaagugcaacgaaaaacaugaugaggaauuuugcgacaugcugagacuuuucgauuuuuguaagcaggcuauccagcggcugaaagccccugcgcagauguccauucaacucaucaauaaggccgugaacgcucugaucaaugaccagcuuauuaugaagaaccaucugcgcgacaucauggggauucccuauugcaauuacucuaaauauugguaccucaaccacacagugaccggaaagacgagccugccuaaauguuggcuggucuccaauggcagcuaccucaacgagacacacuucucugaugacaucgaacagcaagccgauaauaugauuaccgagaugcugcagaaggaguauauggaaagacaggggaaaaccccgcuuggacugguugaccucuucguguuuuccaccagcuucuaccugaucucuaucuuucugcaccuugugaagauucccacacaucggcacgucgugggcaaaccuugccccaagccucaucgccucaaccacaugggcaucuguagcugcggguucuauaagcagcccggaguuccggugagauggaaacggugaggacuaguuauaagacugacuagcccgaugggccucccaacgggcccuccuccccuccuugcaccgagauuaaucaaaggcucuuuucagagccaccaaaaaaaaaaaaaaaaaaaaaaaaaaaaaaaaaaaaaaaaaaaaaaaaaaaaaaaaaaaaaaaaagaauu

SEQ ID NO: 24388 - RNA, 1658 nt, Artificial Sequence
  mRNA product Design i-3 (hSL-A64-N5) comprising derived and/or modified sequence from LASV(Z0947-SLE-2011;Clade IV)__AIT17840__GPCmut2 (opt5)
aggagaaagcuuaccaugggccagaucgugaccuucuuucaagaggucccccacguuauugaagaggugaugaacaucgugcugauugcccucagcauccuggcuguccuuaaggggcuguacaauuucgccacaugcggacucgugggccugguuacguuucuucugcucugugggagauccugcaccauuucucuguauaaaggaguguacgaacugcagacacucgagcugaacauggaaacccuuaauauguguaugccucugagcugcacaaagaacaauucccaucacuauaucauggucggcaacgagaccgggcucgagcugacacuuaccaauacgucuaucauuaaccauaaauucuguaaucugagcgacgcgcacaagaaaaaccucuacgaucaugcucugauguccaucauuucuaccuuucaccugagcaucccgaauuucaaccaguaugaagccauguccugcgacuuuaauggaggcaagauuagcgugcaguacaaccucucucacuccuaugccggcgaugcugccaaucauugugggacaguugcuaacggagugcugcaaaccuucaugcggauggccuggggcgggagcuacaucgcgcuugacucuggacgcgauagaugggacugcauuaugacauccuaccaguaucugaucauccagaacaccacgugggaggaucacugucaguuuagccggcccucuccuauuggcuaccucgggcugcuuucccaacgcacaagagacaucuauauuagccggcgcagacggggaaccuucacauggacccuguccgauucugaaggcaaggacacccccggcggguacugccucacacgcuggaugcugaucgaggccgagcugaaauguuuuggaaauacggcugucgccaagugcaacgaaaaacaugaugaggaguucugcgacaugcucagacuguuugauuucuguaagcaggcuauucagcggcuuaaagccccugcgcagaugagcauccaacugaucaauaaggccgugaacgcucucauuaaugaccagcugaucaugaagaaccaccuucgcgacauuaugggcauccccuauugcaauuacuccaaauauugguaccugaaccacaccacaaccgggaagacaagccucccuaaauguuggcuggugucuaauggauccuaccugaacgaaacccauuucagcgaugacauugaacagcaagccgauaauaugaucacggagaugcuccagaaggaguauauggaaagacagggcaaaacaccgcuggggcuugucgaccuguuuguuuucucuaccagcuuuuaccucaucuccauuuuccugcaccuggugaagauccccacccaucggcacauugugggaaaaccuugccccaagccucaucgccuuaaccacaugggcaucuguucuugcggccucuauaagcagcccggggucccggugaaauggaagagaugaggacuaguuauaagacugacuagcccgaugggccucccaacgggcccuccuccccuccuugcaccgagauuaaucaaaggcucuuuucagagccaccaaaaaaaaaaaaaaaaaaaaaaaaaaaaaaaaaaaaaaaaaaaaaaaaaaaaaaaaaaaaaaaaagaauu

SEQ ID NO: 24389 - RNA, 1689 nt, Artificial Sequence
  mRNA product Design i-3 (hSL-A100) comprising derived and/or modified sequence from LASV(Josiah;Clade IV)__NP_694870__GPCmut2 (opt1)
aggagaaagcuuaccaugggccagaucgugaccuucuuccaggaggucccccacgugaucgaggaggugaugaacaucguccugaucgcccucagcgugcuggccgugcugaaggggcucuacaacuucgcgaccugcggccuggucgggcuggugacguuccuccugcugugcggccgcuccugcaccaccagccucuacaaggggguguacgagcugcagacccuggagcucaacauggagacgcugaacaugugcaugccgcuguccugcaccaagaacaacagccaccacuacaucauggucggcaacgagaccggccucgagcugacgcugaccaacaccuccaucaucaaccacaaguucugcaaccucagcgacgcccacaagaagaaccuguacgaccacgcccugauguccaucaucagcaccuuccaccucuccauccccaacuucaaccaguacgaggccaugagcugcgacuucaacgggggcaagaucuccgugcaguacaaccugagccacuccuacgccggggacgcggccaaccacugcggcacgguggccaacgggguccugcagaccuucaugcggauggccuggggcggcagcuacaucgcgcucgacuccgggcgcggcaacugggacugcaucaugaccagcuaccaguaccugaucauccagaacaccacgugggaggaccacugccaguucucccggcccagccccaucggguaccugggccuccugucccagcgcacccgggacaucuacaucagccgccggcgccggggcaccuucaccuggacgcugagcgacuccgaggggaaggacaccccgggcggguacugccugacccgcuggaugcucaucgaggccgagcugaagugcuucggcaacaccgccguggccaagugcaacgagaagcacgacgaggaguucugcgacaugcugcggcuguucgacuucugcaagcaggccauccagcgccugaaggcgcccgcccagaugagcauccagcugaucaacaaggccgugaacgcccucaucaacgaccagcugaucaugaagaaccaccuccgggacaucauggggauccccuacugcaacuacuccaaguacugguaccucaaccacacgaccaccggccgcaccagccugcccaagugcuggcuggucuccaacggcagcuaccucaacgagacgcacuucuccgacgacaucgagcagcaggccgacaacaugaucaccgagaugcugcagaaggaguacauggagcggcaggggaagacgccccugggccucguggaccuguucguguucagcaccuccuucuaccugaucagcaucuuccugcaccucgucaagaucccgacccaccgccacaucguggggaaguccugccccaagccccaccggcugaaccacaugggcaucugcagcugcgggcuguacaagcagcccggcgugccggucaaguggaagcgcugaggacuaguuauaagacugacuagcccgaugggccucccaacgggcccuccuccccuccuugcaccgagauuaaucaaaggcucuuuucagagccaccaaaaaaaaaaaaaaaaaaaaaaaaaaaaaaaaaaaaaaaaaaaaaaaaaaaaaaaaaaaaaaaaaaaaaaaaaaaaaaaaaaaaaaaaaaaaaaaaaaaaa

SEQ ID NO: 24390 - RNA, 1686 nt, Artificial Sequence
  mRNA product Design i-3 (hSL-A100) comprising derived and/or modified sequence from LASV(LP;Clade I)__AAF86701__GPCmut2 (opt1)
aggagaaagcuuaccaugggccagaucaucaccuucuuccaggaggugccccacgucaucgaggaggugaugaacaucgugcugaucgcccucagccugcuggccauccucaaggggcuguacaacaucgcgaccugcggcaucaucgggcuggucgccuuccucuuccugugcggcaaguccugcagccugacgcucaagggcggguacgagcugcagacccuggagcucaacauggagacccugaacaugugcaugccgcuguccugcacgaagaacagcucccaccacuacauccgcgugggcaacgagaccgggcucgagcugacccugaccaacacgagcaucaucaaccacaaguucugcaaccucuccgacgcccacaagaagaaccuguacgaccacgcccugaugagcaucaucuccaccuuccaccucagcauccccaacuucaaccaguacgaggccauguccugcgacuucaacggcgggaagaucagcgugcaguacaaccugucccacagcuacgcgggcgacgccgccgagcacugcgggaccgucgccaacggcgugcugcagaccuucaugcggauggcguggggcgggcgcuacaucgcccucgacuccggcaaggggaacugggacugcaucaugacgagcuaccaguaccugaucauccagaacaccaccugggaggaccacugccaguucucccggcccagccccaucggcuaccugggccuccugucccagcgcacccgggacaucuacaucagccgccggcgccgggggacguucaccuggacccugagcgacuccgagggcaacgagacccccgggggcuacugccugacgcgcuggaugcucaucgaggccgagcugaagugcuucgggaacaccgccguggccaagugcaacgagaagcacgacgaggaguucugcgacaugcugcggcuguucgacuucugcaagcaggcgauccgccggcugaaggcccccgcccagaugagcauccagcugaucaacaaggccgucaacgcccucaucaacgaccagcugaucaugaagaaccaccuccgcgacaucaugggcauccccuacugcaacuacuccaaguacugguaccucaaccacaccagcuccggccggaccagccugcccaagugcuggcugaucuccaacgggagcuaccucaacgagacgcaguucuccgacgacaucgagcagcaggcggacaacaugaucaccgagaugcugcagaaggaguacaucgagcgccagggcaagaccccgcuggggcucguggacaucuucaucuucagcaccuccuucuaccugaucagcaucuuccugcaccugaucaagaucccgacgcaccggcacaucgugggcaagcccugccccaagccccaccgccucaaccacaugggggucugcuccugcggccuguacaagcacccgggcgugcccaccaaguggaagcggugaggacuaguuauaagacugacuagcccgaugggccucccaacgggcccuccuccccuccuugcaccgagauuaaucaaaggcucuuuucagagccaccaaaaaaaaaaaaaaaaaaaaaaaaaaaaaaaaaaaaaaaaaaaaaaaaaaaaaaaaaaaaaaaaaaaaaaaaaaaaaaaaaaaaaaaaaaaaaaaaaaaaa

SEQ ID NO: 24391 - RNA, 1686 nt, Artificial Sequence
  mRNA product Design i-3 (hSL-A100) comprising derived and/or modified sequence from LASV(803213;Clade II)__AAF86703__GPCmut2 (opt1)
aggagaaagcuuaccaugggccagaucaucaccuucuuccaggaggugccccacgucaucgaggaggugaugaacaucgugcugaucgcccucagccugcuggccauccucaaggggaucuacaacgucgcgaccugcggccuguucgggcugaucuccuuccuccugcugugcggccgcagcugcuccgugacguacaaggggguguacgagcuccagacccuggagcugaacauggccaaccucaacaugugcaugccgcugagcugcaccaagaacaacucccaccacuacaucauggucggcaacgagacgggccuggagcucacccugaccaacaccagcaucaucaaccacaaguucugcaaccuguccgacgcccacaagaagaaccucuacgaccacgcccugaugagcaucaucuccacguuccaccugagcauccccaacuucaaccaguacgaggccauguccugcgacuucaacgggggcaagaucagcgugcaguacaaccucucccacagcuucgcgguggacgccgccaaccacugcgggaccaucgccaacggcguccugcagaccuucaugcggauggcguggggcggguccuacaucgcccuggacagcggcaaggggaacugggacugcaucaugaccuccuaccaguaccucaucauccagaacacgaccugggaggaccacugccaguucagccgccccucccccaucggcuaccuggggcugcucagccagcggacccgcgacaucuacaucagccggcgccgccggggcaccuucacguggacccucuccgacagcgagggcaacgaggcccccgggggcuacugccugacccgguggaugcugaucgaggccgagcucaagugcuucgggaacaccgccguggcgaagugcaacgagaagcacgacgaggaguucugcgacaugcugcgccuguucgacuucugcaagcaggccaucaagcggcucaagacgcccgcccagauguccauccagcugaucaacaaggccgugaacgcccugaucaacgaccagcucaucaugaagaaccaccuccgcgacaucaugggcauccccuacugcaacuacagccgguacugguaccugaaccacaccgucaccgggaagaccucccugccccgcugcuggcuggugagcaacggcuccuaccugaacgagacgcacuucagcgacgacaucgagcagcaggcggacaacaugaucaccgagaugcuccagaaggaguacauggaccggcagggcaagaccccgcuggggcugguggaccucuucgucuucuccaccagcuucuaccugaucuccaucuuccugcaccuggugaagaucccgacgcaccgccacaucgugggcaagcccugccccaagccccaccggcucaaccacauggggaucugcagcugcggccuguacaagcacccggggguccccgugaaguggaagcgcugaggacuaguuauaagacugacuagcccgaugggccucccaacgggcccuccuccccuccuugcaccgagauuaaucaaaggcucuuuucagagccaccaaaaaaaaaaaaaaaaaaaaaaaaaaaaaaaaaaaaaaaaaaaaaaaaaaaaaaaaaaaaaaaaaaaaaaaaaaaaaaaaaaaaaaaaaaaaaaaaaaaaa

SEQ ID NO: 24392 - RNA, 1686 nt, Artificial Sequence
  mRNA product Design i-3 (hSL-A100) comprising derived and/or modified sequence from LASV(GA391;Clade III)__CAA36645__GPCmut2 (opt1)
aggagaaagcuuaccaugggccagaucgugaccuucuuccaggaggucccccacgugaucgaggaggugaugaacaucguccugaucgcccucagcauccuggccauccugaaggggcucuacaacguggcgaccugcggccugaucgggcuggugacguuccuccugcuguccggccgcagcugcucccucaucuacaaggggaccuacgagcugcagacccuggagcucaacauggagacccugaacaugugcaugccgcugagcugcaccaagaacaacucccaccacuacauccgggucggcaacgagaccggccucgagcugacccugacgaacaccagcauccucaaccacaaguucugcaaccuguccgacgcccacaagcgcaaccuguacgaccacagccucauguccaucaucagcaccuuccaccuguccauccccaacuucaaccaguacgaggccaugagcugcgacuucaacgggggcaagaucaccgugcaguacaaccugucccacagcuucgccguggacgccgcggggcacugcggcacgcucgccaacgggguccugcagaccuucaugcggauggccuggggcggcuccuacaucgcccuggacagcgggcgcggcaacugggacugcaucaugaccuccuaccaguaccucaucauccagaacaccacgugggacgaccacugccaguucagccggcccucccccaucggguaccugggccugcucagccagcgcacccgggacaucuacaucagccgccggcgccggggcaccuucaccuggacgcucuccgacagcgaggggaacgagaccccgggcggguacugccugacccgcuggaugcugaucgaggcggagcucaagugcuucggcaacaccgccguggccaagugcaacgagaagcacgacgaggaguucugcgacaugcugcggcuguucgacuucugcaagcaggccauccgccggcucaagacgcccgcccagauguccauccagcugaucaacaaggcggugaacgcccugaucaacgaccagcucaucaugaagaaccaccuccgcgacaucauggggauccccuacugcaacuacagccgguacugguaccugaaccacaccuccaccggcaagaccagccugccccgcugcuggcugaucuccaacggcagcuaccugaacgagacgaaguucuccgacgacaucgagcagcaggccgacaacaugaucaccgagaugcuccagaaggaguacaucgaccggcaggggaagacgccccugggccuggucgaccuguucguguucagcaccuccuucuaccucaucagcaucuuccugcaccuggugaagaucccgacccaccgccacaucgucgggaagcccugccccaagccccaccggcucaaccacaugggcaucugcuccugcgggcuguacaagcagccgggcgugcccgugcgcuggaagcggugaggacuaguuauaagacugacuagcccgaugggccucccaacgggcccuccuccccuccuugcaccgagauuaaucaaaggcucuuuucagagccaccaaaaaaaaaaaaaaaaaaaaaaaaaaaaaaaaaaaaaaaaaaaaaaaaaaaaaaaaaaaaaaaaaaaaaaaaaaaaaaaaaaaaaaaaaaaaaaaaaaaaa

SEQ ID NO: 24393 - RNA, 1689 nt, Artificial Sequence
  mRNA product Design i-3 (hSL-A100) comprising derived and/or modified sequence from LASV(AV;Clade V)__CCA30314__GPCmut2 (opt1)
aggagaaagcuuaccaugggccagaucgugaccuucuuccaggaggucccccacgugaucgaggaggugaugaacaucguccugaucgcccucagcauccuggccgugcugaaggggcucuacaacaucgcgaccugcggccugaucgggcugaucacguuccuccugcugugcggccgcuccugcagcuccaaccucuacaaggggguguacgagcugcagagccuggaccucaacauggagacccugaacaugugcaugccgcuguccugcaccaagaacaacagccaccacuacauccgggucggcaacgacacgggccucgagcugacccugaccaacaccuccauccucaaccacaaguucugcaaccugagcgacgcccacaagaaggaccuguacgaccacgcccucauguccaucaucagcacguuccaccuguccauccccaacuucaaccaguacgaggccaugagcugcgacuucaacgggggcaagaucuccgugcaguacaaccugagccacuccuacgccaucgacgcggccaaccacugcgggaccguggccaacggcauccuccagaccuucaugcgcauggccuggggcgggagcuacaucgcgcuggacuccggccgggggaacugggacugcaucaugaccagcuaccaguaccugaucauccagaacacgaccugggagaaccacugccaguucucccgccccagccccaucggcuaccucgggcugcugagccagcggacccgcgacaucuacaucucccggcgccgccggggcaccuucacguggacccugagcgacuccgagggcaacgccacccccgggggcuacugccucacccgguggaugcugaucgaggccgagcugaagugcuucgggaacacggccgucgccaagugcaacgagaagcacgacgaggaguucugcgacaugcuccgccuguucgacuucugcaagcaggcgaucagccggcugaagucccccgcccagaugagcauccagcucaucaacaaggccgugaacgcccugaucaacgaccagcugaucaugaagaaccaccuccgcgacaucaugggcauccccuacugcaacuacuccaaguacugguaccugaaccacaccaucaccgggaagaccagccugcccaagugcuggcucguguccaacggcagcuaccugaacgagacgcacuucuccgacgacaucgagcagcaggccgacaacaugaucaccgagaugcugcagaaggaguacauggagcggcagggcaagaccccgcucgggcuggucgaccuguucguguucagcaccuccuucuaccugaucagcaucuuccuccgccuggugaagaucccgacgcaccggcacaucgucggcaagcccugccccaagccccaccgccugaaccacauggggaucugcuccugcggccucuacaagcagccgggggugcccgugcgguggaagcgcugaggacuaguuauaagacugacuagcccgaugggccucccaacgggcccuccuccccuccuugcaccgagauuaaucaaaggcucuuuucagagccaccaaaaaaaaaaaaaaaaaaaaaaaaaaaaaaaaaaaaaaaaaaaaaaaaaaaaaaaaaaaaaaaaaaaaaaaaaaaaaaaaaaaaaaaaaaaaaaaaaaaaa

SEQ ID NO: 24394 - RNA, 1686 nt, Artificial Sequence
  mRNA product Design i-3 (hSL-A100) comprising derived and/or modified sequence from LASV(Togo/2016/7082;Clade VI)__AMR44577__GPCmut2 (opt1)
aggagaaagcuuaccaugggccagaucaucaccuucuuccaggaggugccccacgucaucgaggaggugaugaacaucgugcugaucgcccucagccugcuggccauccucaagggggucuacaacguggcgaccugcggcaucaucgggcuggugacguuccuguuccucugcggccgcuccugcagccugaucuacaagggguccuacgagcugcagacccucgagcugaacauggagacccugaacaugugcaugccgcucagcugcacgaagaacuccagccaccacuacauccgggucggcaacgagaccggccuggagcugacccucaccaacacguccaucaucaaccacaaguucugcaaccugagcgacgcccacaagcgcaaccuguacgaccacgcccucauguccauccugagcaccuuccaccuguccauccccaacuucaaccaguacgaggccaugagcugcgacuucaacgggggcaagaucuccgugcaguacaaccucagccacgccuacgcgguggacgccgccgagcacugcgggaccgucgccaacggcgugcugcagaccuucaugcggauggcguggggcggguccuacaucgcccuggacagcggccgcgggaacugggacugcaucaugacguccuaccaguaccucaucauccagaacaccaccugggaggaccacugccaguucagccggcccucccccaucggcuaccuggggcugcucagccagcgcacccgggacaucuacaucagccgccggcgccggggcacguucaccuggacccucuccgacagcgagggcaacgagacccccgggggcuacugccugacgcgcuggaugcugaucgaggccgagcucaagugcuucgggaacaccgccguggccaagugcaacgagaagcacgacgaggaguucugcgacaugcugcggcuguucgacuucugcaagcaggcgauccagcgccucaagucccccgcccagaugagcauccagcugaucaacaaggccgucaacgcccugaucaacgaccagcucaucaugaagaaccaccuccgggacaugaugggcauccccuacugcaacuacuccaaguacugguaccugaaccacaccagcuccgggcgcaccagccugcccaagugcuggcugguguccaacggcagcuaccugaacgagacgcacuucuccgacgacaucgagcagcaggccgacaacaugaucaccgagaugcuccagaaggaguacaucgaccggcagggcaagaccccgcuggggcugguggaccucuucgucuucagcaccuccuucuaccugaucagcaucuuccugcaccugaucaagaucccgacgcaccgccacaucgugggcaagcccugccccaagccccaccggcucaaccacauggggaucugcuccugcggccuguacaagcagccgggggugcccacccgcuggaagcggugaggacuaguuauaagacugacuagcccgaugggccucccaacgggcccuccuccccuccuugcaccgagauuaaucaaaggcucuuuucagagccaccaaaaaaaaaaaaaaaaaaaaaaaaaaaaaaaaaaaaaaaaaaaaaaaaaaaaaaaaaaaaaaaaaaaaaaaaaaaaaaaaaaaaaaaaaaaaaaaaaaaaa

SEQ ID NO: 24395 - RNA, 1686 nt, Artificial Sequence
  mRNA product Design i-3 (hSL-A100) comprising derived and/or modified sequence from LASV(KAK-428;Clade n.d. (VII))__ANH09740__GPCmut2 (opt1)
aggagaaagcuuaccaugggccagaucgugaccuucuuccaggaggucccccacgugaucgaggaggugaugaacaucguccugaucgcccucagccugcuggccauccucaaggggcuguacaacuucgcgaccugcggcgugaucgggcugaucacguuccuccugcugugcggccgcuccugcagcgccaccuacaaggggcaguacgagcuccagacccuggagcugaacauggagucccucaacaugugcaugccgcugagcugcacgaagaacaacucccaccacuacauccgggccggcaacaacaccggccuggagcucacccugaccaacacgagcaucaucucccacaaguucugcaaccugagcgacgcccacaagaagaaccucuacgaccacacccugauguccaucaucaccaccuuccaccugagcauccccaacuucaaccaguacgaggccauguccugcgacuucaacgggggcaagaucagcauccaguacaaccucucccacagcuacgcgggggacgccgcccagcacugcggcacgguggccaacgggguccugcagaccuucaugcgcauggcguggggcggcuccuaccuggcccucgacagcgggcggcgcggcugggacugcaucaucuccagcuaccaguaccugaucauccagaacaccaccugggacgaccacugccaguucucccggcccagccccaucggguaccugggcuucgugagccagaagacgcgcgacaucuacaucucccggcgccgccggggcaccuucaccuggacccugagcgacuccgaggggcacgacaugccgggcggguacugccucacgcgguggaugcugaucgaggccgaccugaagugcuucggcaacaccgccguggccaagugcaacgagaagcacgacgaggaguucugcgacauguggcgccucuucgacuucugcaagcaggcgauccagcggcugaaggcccccgcccagaugaacauccagcugaucaacaaggccgucaacgcccucaucaacgaccagcugaugaugaagaaccaccuccgcgacaucauggggauccccuacugcaacuacagcaaguucugguaccugaacaacaccaccacgggccggaccucccugccccgcugcuggcugaucagcaacggcuccuaccucaacgagacccacuucagcgacgacaucgagcagcaggcggacaacaugaucaccgagaugcugcagaaggaguacauggaccggcaggggaagacgccccugggccucguggaccuguucguguucuccaccagcuucuaccugaucaccaucuuccuccaccuggucaagaucccgacccaccgccacaucguggggaagcccugccccaagccccaccggcugaaccacaugggcaucugcuccugcgggcuguacaagcagccgggcgugcccguccgcuggaagcggugaggacuaguuauaagacugacuagcccgaugggccucccaacgggcccuccuccccuccuugcaccgagauuaaucaaaggcucuuuucagagccaccaaaaaaaaaaaaaaaaaaaaaaaaaaaaaaaaaaaaaaaaaaaaaaaaaaaaaaaaaaaaaaaaaaaaaaaaaaaaaaaaaaaaaaaaaaaaaaaaaaaaa

SEQ ID NO: 24396 - RNA, 1686 nt, Artificial Sequence; identical to SEQ ID NO: 24390
  mRNA product Design i-3 (hSL-A100) comprising derived and/or modified sequence from LASV(Pinneo-NIG-1969;Clade I)__AIT17836__GPCmut2 (opt1)

SEQ ID NO: 24397 - RNA, 1686 nt, Artificial Sequence
  mRNA product Design i-3 (hSL-A100) comprising derived and/or modified sequence from LASV(ISTH0009-NIG-2011;Clade II)__AIT17404__GPCmut2 (opt1)
aggagaaagcuuaccaugggccagaucaucaccuucuuccaggaggugccccacgucaucgaggaggugaugaacaucgugcugaucgcccucagccugcuggccauccucaaggggaucuacaacgucgcgaccugcggccuguucgggcugguguccuuccuccugcugugcggccgcagcugcuccacgaccuacaaggggguguacgagcuccagacccuggagcuggacauggccagccucaacaugugcaugccgcuguccugcacgaagaacaacagccaccacuacaucauggucggcaacgagaccggccuggagcucacccugaccaacacguccaucaucaaccacaaguucugcaaccugagcgacgcccacaagaagaaccucuacgaccacgcccugauguccaucaucagcaccuuccaccuguccauccccaacuucaaccaguacgaggccaugagcugcgacuucaacgggggcaagaucuccgugcaguacaaccucagccacgcguacgccguggacgccgccaaccacugcgggaccaucgcgaacggcguccugcagaccuucaugcggauggccuggggcggguccuacaucgcccuggacagcggcaagggguccugggacugcaucaugacgagcuaccaguaccucaucauccagaacaccaccugggaggaccacugccaguucucccgccccagccccaucggcuaccuggggcugcucagccagcggacccgcgacaucuacaucucccggcgccgccggggcacguucaccuggacccucagcgacuccgagggcaacgagacccccgggggcuacugccugacgcgguggaugcugaucgaggccgagcucaagugcuucgggaacaccgccguggcgaagugcaacgagaagcacgacgaggaguucugcgacaugcugcgccuguucgacuucugcaagcaggccauccggcgccucaagacccccgcccagaugagcauccagcugaucaacaaggccgugaacgcccugaucaacgaccagcucaucaugaagaaccaccuccgggacaucaugggcaucccguacugcaacuacuccaaguacugguaccugaaccacaccgucacggggaagaccagccugccccgcugcuggcugguguccaacggcagcuaccugaacgagacccacuucuccgacgacaucgagcagcaggcggacaacaugaucaccgagcuccugcagaaggaguacauggaccggcagggcaagacgccccuggggcucguggaccuguucgucuucagcaccuccuucuaccugaucagcaucuuccugcaccucaucaagaucccgacccaccgccacaucaccggcaagcccugccccaagccccaccggcugaaccacauggggaucugcuccugcggccuguacaagcacccgggggugcccgugaaguggaagcgcugaggacuaguuauaagacugacuagcccgaugggccucccaacgggcccuccuccccuccuugcaccgagauuaaucaaaggcucuuuucagagccaccaaaaaaaaaaaaaaaaaaaaaaaaaaaaaaaaaaaaaaaaaaaaaaaaaaaaaaaaaaaaaaaaaaaaaaaaaaaaaaaaaaaaaaaaaaaaaaaaaaaaa

SEQ ID NO: 24398 - RNA, 1686 nt, Artificial Sequence
  mRNA product Design i-3 (hSL-A100) comprising derived and/or modified sequence from LASV(ISTH2010-NIG-2012;Clade II)__AIT17482__GPCmut2 (opt1)
aggagaaagcuuaccaugggccagaucaucaccuucuuccaggaggugccccacgucaucgaggaggugaugaacaucgugcugaucgcccucagccugcuggccauccucaaggggaucuacaacgucgcgaccugcggccuguucgggcugguguccuuccuccugcugugcggccgcagcugcuccacgaccuacaaggggguguacgagcuccagacccuggagcuggacauggccagccucaacaugugcaugccgcuguccugcacgaagaacaacagccaccacuacaucauggucggcaacgagaccggccuggagcucacccugaccaacacguccaucaucaaccacaaguucugcaaccugagcgacgcccacaagaagaaccucuacgaccacgcccugauguccaucaucagcaccuuccaccuguccauccccaacuucaaccaguacgaggccaugagcugcgacuucaacgggggcaagaucuccgugcaguacaaccucagccacgcguacgccguggacgccgccaaccacugcgggaccaucgcgaacggcguccugcagaccuucaugcggauggccuggggcggguccuacaucgcccuggacagcggcaagggguccugggacugcaucaugacgagcuaccaguaccucaucauccagaacaucaccugggaggaccacugccaguucucccgccccagccccaucggcuaccuggggcugcucagccagcggacccgcgacaucuacaucucccggcgccgccggggcaccuucacguggacccucagcgacuccgagggcaacgagacccccgggggcuacugccugacccgguggaugcugaucgaggccgagcucaagugcuucgggaacacggccguggcgaagugcaacgagaagcacgacgaggaguucugcgacaugcugcgccuguucgacuucugcaagcaggccauccggcgccucaagacccccgcccagaugagcauccagcugaucaacaaggccgugaacgcccugaucaacgaccagcucaucaugaagaaccaccuccgggacaucaugggcauccccuacugcaacuacuccaaguacugguaccugaaccacaccgucaccgggaagacgagccugccccgcugcuggcugguguccaacggcagcuaccugaacgagacccacuucuccgacgacaucgagcagcaggcggacaacaugaucaccgagcuccugcagaaggaguacaucgaccggcagggcaagaccccgcuggggcucguggaccuguucgucuucagcacguccuucuaccugaucagcaucuuccugcaccucgugaagaucccgacccaccgccacguggucggcaagcccugccccaagccccaccggcugaaccacauggggaucugcuccugcggccuguacaagcacccgggggugcccgugaaguggaagcgcugaggacuaguuauaagacugacuagcccgaugggccucccaacgggcccuccuccccuccuugcaccgagauuaaucaaaggcucuuuucagagccaccaaaaaaaaaaaaaaaaaaaaaaaaaaaaaaaaaaaaaaaaaaaaaaaaaaaaaaaaaaaaaaaaaaaaaaaaaaaaaaaaaaaaaaaaaaaaaaaaaaaaa

SEQ ID NO: 24399 - RNA, 1686 nt, Artificial Sequence
  mRNA product Design i-3 (hSL-A100) comprising derived and/or modified sequence from LASV(Lassa virus/H.sapiens-wt/NGA/2015/ISTH_0543;Clade II)__AVO03639__GPCmut2 (opt1)
aggagaaagcuuaccaugggccagaucaucaccuucuuccaggaggugccccacgucaucgaggaggugaugaacaucgugcugaucgcccucagccugcuggccauccucaaggggaucuacaacgucgcgaccugcggccuguucgggcugguguccuuccuccugcugugcggccgcagcugcuccacgaccuacaaggggguguacgagcuccagacccuggagcuggacauggccaaccucaacaugugcaugccgcugagcugcacgaagaacaacucccaccacuacaucauggucggcaacgagaccggccuggagcucacccugaccaacacgagcaucaucaaccacaaguucugcaaccuguccgacgcccacaagaagaaccucuacgaccacgcccugaugagcaucaucuccaccuuccaccugagcauccccaacuucaaccaguacgaggccauguccugcgacuucaacgggggcaagaucagcgugcaguacaaccucucccacaccuacgcgguggacgccgccaaccacugcgggaccaucgccaacggcguccugcagacguucaugcggauggcguggggcgggagcuacaucgcccuggacuccggcaaggggagcugggacugcaucaugaccuccuaccaguaccucgugauccagaacaccaccugggaggaccacugccaguucagccgccccucccccaucggcuaccuggggcugcucagccagcggacgcgcgacaucuacaucagccggcgccgccggggcaccuucaccuggacccucuccgacagcgagggcaacgagacgcccgggggcuacugccugacccgguggaugcugaucgaggccgagcucaagugcuucgggaacaccgccguggccaagugcaacgagaagcacgacgaggaguucugcgacaugcugcgccuguucgacuucugcaagcaggcgauccggcgccucaagacccccgcccagauguccauccagcugaucaacaaggccgucaacgcccugaucaacgaccagcucaucaugaagaaccaccuccgggacaucaugggcauccccuacugcaacuacagcaaguacugguaccugaaccacacggugaccgggaagaccucccugccccgcugcuggcuggugagcaacggcuccuaccugaacgagacccacuucagcgacgacaucgagcagcaggccgacaacaugaucacggagcuccugcagaaggaguacaucgaccggcagggcaagaccccgcuggggcucgucgaccuguucguguucuccaccagcuucuaccugaucuccaucuuccugcaccucgugaagaucccgacccaccgccacaucacgggcaagcccugccccaagccccaccggcugaaccacauggggaucugcagcugcggccuguacaagcacccggggguccccgugaaguggaagcgcugaggacuaguuauaagacugacuagcccgaugggccucccaacgggcccuccuccccuccuugcaccgagauuaaucaaaggcucuuuucagagccaccaaaaaaaaaaaaaaaaaaaaaaaaaaaaaaaaaaaaaaaaaaaaaaaaaaaaaaaaaaaaaaaaaaaaaaaaaaaaaaaaaaaaaaaaaaaaaaaaaaaaa

SEQ ID NO: 24400 - RNA, 1686 nt, Artificial Sequence
  mRNA product Design i-3 (hSL-A100) comprising derived and/or modified sequence from LASV(Lassa virus/H.sapiens-wt/NGA/2016/ISTH_0009;Clade II)__AVO03571__GPCmut2 (opt1)
aggagaaagcuuaccaugggccagaucaucaccuucuuccaggaggugccccacgucaucgaggaggugaugaacaucgugcugaucgcccucagccugcuggccauccucaaggggaucuacaacgucgcgaccugcggccugcuggggcucguguccuuccugcugcucugcggccgcagcugcuccacgaccuacaaggggguguacgagcugcagacccuggagcucgacauggccagccugaacaugugcaugccgcuguccugcacgaagaacaacagccaccacuacaucauggucggcaacgagaccggccucgagcugacccugaccaacacguccaucaucaaccacaaguucugcaaccucagcgacgcccacaagaagaaccuguacgaccacgcccugauguccaucaucagcaccuuccaccucuccauccccaacuucaaccaguacgaggccaugagcugcgacuucaacgggggccggaucuccgugcaguacaaccugagccacuccuacgcgguggacgccgccaaccacugcgggaccaucgccaacggcguccugcagaccuucaugcgcauggcguggggcgggagcuacaucgcccucgacuccggcaaggggagcugggacugcaucaugacguccuaccaguaccugaucauccagaacaccaccugggaggaccacugccaguucagccggcccagccccaucggcuaccuggggcuccugucccagcgcacccgggacaucuacaucagccgccggcgccggggcacguucaccuggacccuguccgacagcgagggcaacgagacccccgggggcuacugccugacgcgcuggaugcucaucgaggccgagcugaagugcuucgggaacaccgccguggccaagugcaacgagaagcacgacgaggaguucugcgacaugcugcggcuguucgacuucugcaagcaggcgauccgccggcugaagacccccgcccagauguccauccagcugaucaacaaggccgugaacgcccucaucaacgaccagcugaucaugaagaaccaccuccgcgacaucaugggcaucccguacugcaacuacagcaaguacugguaccucaaccacaccgucacggggaagaccucccugccccggugcuggcuggugagcaacggcuccuaccucaacgagacccacuucagcgacgacaucgagcagcaggccgacaacaugaucaccgagcugcugcagaaggaguacaucgaccgccagggcaagacgccccucgggcugguggaccuguucgucuucuccaccagcuucuaccugaucuccaucuuccuccaccuggugaagaucccgacccaccggcacaucaccggcaagcccugccccaagccccaccgccugaaccacauggggaucugcagcugcggccucuacaaccacccgggggugcccgucaaguggaagcggugaggacuaguuauaagacugacuagcccgaugggccucccaacgggcccuccuccccuccuugcaccgagauuaaucaaaggcucuuuucagagccaccaaaaaaaaaaaaaaaaaaaaaaaaaaaaaaaaaaaaaaaaaaaaaaaaaaaaaaaaaaaaaaaaaaaaaaaaaaaaaaaaaaaaaaaaaaaaaaaaaaaaa

SEQ ID NO: 24401 - RNA, 1686 nt, Artificial Sequence
  mRNA product Design i-3 (hSL-A100) comprising derived and/or modified sequence from LASV(Lassa virus/H.sapiens-wt/NGA/2016/ISTH_0017;Clade II)__AVO03567__GPCmut2 (opt1)
aggagaaagcuuaccaugggccagaucaucaccuucuuccaggaggugccccacgucaucgaggaggugaugaacaucgugcugaucgcccucagccugcuggccauccucaaggggaucuacaacgucgcgaccugcggccuguucgggcugguguccuuccuccugcugugcggccgcagcugcuccacgaccuacaaggggguguacgagcuccagacccuggagcuggacauggccagccucaacaugugcaugccgcuguccugcacgaagaacaacagccaccacuacaucauggucggcaacgagaccggccuggagcucacccugaccaacacguccaucaucaaccacaaguucugcaaccugagcgacgcccacaagaagaaccucuacgaccacgcccugauguccaucaucagcaccuuccaccuguccauccccaacuucaaccaguacgaggccaugagcugcgacuucaacgggggcaagaucuccgugcaguacaaccucagccacaccuacgcgaucgacgccgccaaccacugcgggaccaucgccaacggcgugcugcagacguucaugcggauggcguggggcggguccuacaucgcccuggacagcggcaagggguccugggacugcaucaugaccagcuaccaguaccucaucauccagaacaccaccugggaggaccacugccaguucucccgccccagccccaucggcuaccuggggcugcucagccagcggacgcgcgacaucuacaucucccggcgccgccggggcaccuucaccuggacccucagcgacuccgagggcaacgagacgcccgggggcuacugccugacccgguggaugcugaucgaggccgagcucaagugcuucgggaacaccgccgucgccaagugcaacgagaagcacgacgaggaguucugcgacaugcugcgccuguucgacuucugcaagcaggcgauccggcgccucaagacccccgcccagaugagcauccagcugaucaacaaggccgugaacgcccugaucaacgaccagcucaucaugaagaaccaccuccgggacaucaugggcauccccuacugcaacuacuccaaguacugguaccugaaccacacggugaccgggaagaccagccugccccgcugcuggcuggucuccaacggcagcuaccugaacgagacccacuucuccgacgacaucgagcagcaggccgacaacaugaucacggagcuccugcagaaggaguacauggaccggcagggcaagaccccgcuggggcucguggaccuguucguguucagcaccuccuucuaccugaucagcaucuuccugcaccucguccgcaucccgacccaccggcacgugaucggcaagcccugccccaagccccaccgccugaaccacauggggaucugcuccugcggccuguacaagcacccgggggugcccgucaaguggaagcggugaggacuaguuauaagacugacuagcccgaugggccucccaacgggcccuccuccccuccuugcaccgagauuaaucaaaggcucuuuucagagccaccaaaaaaaaaaaaaaaaaaaaaaaaaaaaaaaaaaaaaaaaaaaaaaaaaaaaaaaaaaaaaaaaaaaaaaaaaaaaaaaaaaaaaaaaaaaaaaaaaaaaa

SEQ ID NO: 24402 - RNA, 1686 nt, Artificial Sequence
  mRNA product Design i-3 (hSL-A100) comprising derived and/or modified sequence from LASV(Lassa virus/H.sapiens-wt/NGA/2018/ISTH_0959;Clade II)__AVV65099__GPCmut2 (opt1)
aggagaaagcuuaccaugggccagaucaucaccuucuuccaggaggugccccacgucaucgaggaggugaugaacaucgugcugaucgcccucagccugcuggccauccucaaggggaucuacaacgucgugaccugcggccuguucgggcugguguccuuccuccugcugugcggccgcagcugcuccacgaccuacaagggggucuacgagcuccagacccuggagcuggacauggcgagccucaacaugugcaugccgcuguccugcacgaagaacaacagccaccacuacaucauggugggcaacgagaccggccuggagcucacccugaccaacacguccaucaucaaccacaaguucugcaaccugagcgacgcccacaagaagaaccucuacgaccacgcccugauguccaucaucagcaccuuccaccuguccauccccaacuucaaccaguacgaggccaugagcugcgacuucaacgggggcaagaucuccgugcaguacaaccucagccacgccuacgcgaucgacgccgccaaccacugcgggaccaucgccaacggcguccugcagaccuucaugcggauggcguggggcggguccuacaucgcccuggacagcggcaagggguccugggacugcaucaugacgagcuaccaguaccucaucauccagaacaccaccugggaggaccacugccaguucucccgccccagccccaucggcuaccuggggcugcucagccagcggacccgcgacaucuacaucucccggcgccgccggggcacguucaccuggacccucagcgacuccgagggcaacgagacccccgggggcuacugccugacgcgguggaugcugaucgaggccgagcucaagugcuucgggaacaccgccguggccaagugcaacgagaagcacgacgaggaguucugcgacaugcugcgccuguucgacuucugcaagcaggcgauccggcgccucaagacccccgcccagaugagcauccagcugaucaacaaggccgugaacgcccugaucaacgaccagcucaucaugaagaaccaccuccgggacaucaugggcaucccguacugcaacuacuccaaguacugguaccugaaccacaccgucacggggaagaccagccugccccgcugcuggcugguguccaacggcagcuaccugaacgagacccacuucuccgacgacaucgagcagcaggccgacaacaugaucaccgagcuccugcagaaggaguacaucgaccggcagggcaagacgccccuggggcucguggaccuguucgucuucagcaccuccuucuaccugaucagcaucuuccugcaccucgugaagaucccgacccaccgccacgugaucggcaagcccugccccaagccccaccggcugaaccacauggggaucugcuccugcggccuguacaagcacccggggguccccgugaaguggaagcgcugaggacuaguuauaagacugacuagcccgaugggccucccaacgggcccuccuccccuccuugcaccgagauuaaucaaaggcucuuuucagagccaccaaaaaaaaaaaaaaaaaaaaaaaaaaaaaaaaaaaaaaaaaaaaaaaaaaaaaaaaaaaaaaaaaaaaaaaaaaaaaaaaaaaaaaaaaaaaaaaaaaaaa

SEQ ID NO: 24403 - RNA, 1686 nt, Artificial Sequence
  mRNA product Design i-3 (hSL-A100) comprising derived and/or modified sequence from LASV(LASV003-NIG-2008;Clade II)__AIT17580__GPCmut2 (opt1)
aggagaaagcuuaccaugggccagaucaucaccuucuuccaggaggugccccacgucaucgaggaggugaugaacaucgugcugaucgcccucagccugcuggccauccucaaggggaucuacaacgucgcgaccugcggccuguucgggcugguguccuuccuccugcugugcggccgcagcugcuccacgaccuacaaggggguguacgagcuccagacccuggagcuggacauggccagccucaacaugugcaugccgcuguccugcacgaagaacaacagccaccacuacaucauggucggcaacgagaccggccuggagcucacccugaccaacacguccaucaucaaccacaaguucugcaaccugagcgacgcccacaagaagaaccucuacgaccacgcccugauguccaucaucagcaccuuccaccuguccauccccaacuucaaccaguacgaggccaugagcugcgacuucaacgggggcaagaucuccgugcaguacaaccucagccacaccuacgcgguggacgccgccaaccacugcgggaccaucgccaacggcguccugcagacguucaugcggauggcguggggcggguccuacaucgcccuggacagcggcaagggguccugggacugcaucaugaccagcuaccaguaccucaucauccagaacaccaccugggaggaccacugccaguucucccgccccagccccaucggcuaccuggggcugcucagccagcggacgcgcgacaucuacaucucccggcgccgccggggcaccuucaccuggacccucagcgacuccgagagcaacgagacgccgggcggguacugccugacccgguggaugcugaucgaggccgagcucaagugcuucggcaacaccgccguggccaagugcaacgagaagcacgacgaggaguucugcgacaugcugcgccuguucgacuucugcaagcaggcgauccggcgccucaaggcccccgcccagauguccauccagcugaucaacaaggccgugaacgcccugaucaacgaccagcucaucaugaagaaccaccuccgggacaucauggggauccccuacugcaacuacagcaaguacugguaccugaaccacaccgucacgggccgcaccucccugccccggugcuggcuggugagcaacggguccuaccugaacgagacccacuucagcgacgacaucgagcagcaggcggacaacaugaucaccgagcuccugcagaaggaguacauggaccgccagggcaagacgccccugggccucguggaccuguucgucuucuccaccagcuucuaccugaucuccaucuuccugcaccucgugaagaucccgacccaccggcacgugaucgggaagcccugccccaagccccaccgccugaaccacaugggcaucugcagcugcgggcuguacaagcacccgggcguccccgugaaguggaagcggugaggacuaguuauaagacugacuagcccgaugggccucccaacgggcccuccuccccuccuugcaccgagauuaaucaaaggcucuuuucagagccaccaaaaaaaaaaaaaaaaaaaaaaaaaaaaaaaaaaaaaaaaaaaaaaaaaaaaaaaaaaaaaaaaaaaaaaaaaaaaaaaaaaaaaaaaaaaaaaaaaaaaa

SEQ ID NO: 24404 - RNA, 1686 nt, Artificial Sequence
  mRNA product Design i-3 (hSL-A100) comprising derived and/or modified sequence from LASV(LASV035-NIG-2009;Clade II)__AIT17588__GPCmut2 (opt1)
aggagaaagcuuaccaugggccagaucaucaccuucuuccaggaggugccccacgucaucgaggaggugaugaacaucgugcugaucgcccucagccugcuggccauccucaaggggaucuacaacgucgcgaccugcggccuguucgggcugguguccuuccuccugcugugcggccgcagcugcuccacgaccuacaaggggguguacgagcuccagacccuggagcuggacauggccagccucaacaugugcaugccgcuguccugcacgaagaacaacagccaccacuacaucauggucggcaacgagaccggccuggagcucacccugaccaacacguccaucaucaaccacaaguucugcaaccugagcgacgcccacaagaagaaccucuacgaccacgcccugauguccaucaucagcaccuuccaccuguccauccccaacuucaaccaguacgaggccaugagcugcgacuucaacgggggcaagaucuccgugcaguacaaccucagccacgcguacgccguggacgccgccaaccacugcgggaccaucgcgaacggcguccugcagaccuucaugcggauggccuggggcggguccuacaucgcccuggacagcggcaagggguccugggacugcaucaugacgagcuaccaguaccucaucauccagaacaccaccugggaggaccacugccaguucucccgccccagccccaucggcuaccuggggcugcucagccagcggacccgcgacaucuacaucucccggcgccgccggggcacguucaccuggacccucagcgacuccgagggcaacgagacccccgggggcuacugccugacgcgguggaugcugaucgaggccgagcucaagugcuucgggaacaccgccguggcgaagugcaacgagaagcacgacgaggaguucugcgacaugcugcgccuguucgacuucugcaagcaggccauccggcgccucaaggcccccgcccagaugagcauccagcugaucaacaaggccgugaacgcgcugaucaacgaccagcucaucaugaagaaccaccuccgggacaucaugggcauccccuacugcaacuacuccaaguacugguaccugaaccacaccgucaccgggaagacgagccugccccgcugcuggcugguguccaacggcagcuaccugaacgagacccacuucuccgacgacaucgagcagcaggccgacaacaugaucaccgagcuccugcagaaggaguacaucgaccggcagggcaagaccccgcuggggcucguggaccuguucgucuucagcacguccuucuaccugaucagcaucuuccugcaccucgugaagaucccgacccaccgccacgugaucggcaagcccugccccaagccccaccggcugaaccacauggggaucugcuccugcggccuguacaagcacccggggguccccgugaaguggaagcgcugaggacuaguuauaagacugacuagcccgaugggccucccaacgggcccuccuccccuccuugcaccgagauuaaucaaaggcucuuuucagagccaccaaaaaaaaaaaaaaaaaaaaaaaaaaaaaaaaaaaaaaaaaaaaaaaaaaaaaaaaaaaaaaaaaaaaaaaaaaaaaaaaaaaaaaaaaaaaaaaaaaaaa

SEQ ID NO: 24405 - RNA, 1686 nt, Artificial Sequence
  mRNA product Design i-3 (hSL-A100) comprising derived and/or modified sequence from LASV(LASV1000-NIG-2009;Clade II)__AIT17782__GPCmut2 (opt1)
aggagaaagcuuaccaugggccagaucaucaccuucuuccaggaggugccccacgucaucgaggaggugaugaacaucgugcugaucgcccucagccugcuggccauccucaaggggaucuacaacgucgcgaccugcggccuguucgggcugguguccuuccuccugcugugcggccgcagcugcuccacgaccuacaaggggguguacgagcuccagacccuggagcuggacauggccagccucaacaugugcaugccgcuguccugcacgaagaacaacagccaccacuacaucauggucggcaacgagaccggccuggagcucacccugaccaacacguccaucaucaaccacaaguucugcaaccugagcgacgcccacaagaagaaccucuacgaccacgcccugauguccaucaucagcaccuuccaccuguccauccccaacuucaaccaguacgaggccaugagcugcgacuucaacgggggcaagaucuccgugcaguacaaccucagccacaccuacgcgguggacgccgccaaccacugcgggaccaucgccaacggcguccugcagacguucaugcggauggcguggggcggguccuacaucgcccuggacagcggcaagggguccugggacugcaucaugaccagcuaccaguaccucaucauccagaacaccaccugggaggaccacugccaguucucccgccccagccccaucggcuaccuggggcugcucagccagcggacgcgcgacaucuacaucucccggcgccgccggggcaccuucaccuggacccucagcgacuccgagggcaacgagacgcccgggggcuacugccugacccgguggaugcugaucgaggccgagcucaagugcuucgggaacaccgccguggccaagugcaacgagaagcacgacgaggaguucugcgacaugcugcgccuguucgacuucugcaagcaggcgaucaagcggcucaagacccccgcccagaugagcauccagcugaucaacaaggccgugaacgcccugaucaacgaccagcucaucaugaagaaccaccuccgcgacaucaugggcauccccuacugcaacuacuccaaguacugguaccugaaccacacggucaccgggaagaccagccugccccggugcuggcugguguccaacggcagcuaccugaacgagacccacuucuccgacgacaucgagcagcaggccgacaacaugaucacggagcuccugcagaaggaguacaucgaccgccagggcaagaccccgcuggggcucguggaccuguucgucuucagcaccuccuucuaccugaucagcaucuuccugcaccucgugaagaucccgacccaccggcacguggucggcaagcccugccccaagccccaccgccugaaccacauggggaucugcuccugcggccuguacaagcacccgggggugcccgugaaguggaagcggugaggacuaguuauaagacugacuagcccgaugggccucccaacgggcccuccuccccuccuugcaccgagauuaaucaaaggcucuuuucagagccaccaaaaaaaaaaaaaaaaaaaaaaaaaaaaaaaaaaaaaaaaaaaaaaaaaaaaaaaaaaaaaaaaaaaaaaaaaaaaaaaaaaaaaaaaaaaaaaaaaaaaa

SEQ ID NO: 24406 - RNA, 1686 nt, Artificial Sequence
  mRNA product Design i-3 (hSL-A100) comprising derived and/or modified sequence from LASV(LASV221-NIG-2010;Clade II)__AIT17624__GPCmut2 (opt1)
aggagaaagcuuaccaugggccagaucaucaccuucuuccaggaggugccccacgucaucgaggaggugaugaacaucgugcugaucgcccucagccugcuggccauccucaaggggaucuacaacgucgcgaccugcggccuguucgggcugguguccuuccuccugcugugcggccgcagcugcuccacgaccuacaaggggguguacgagcuccagacccuggagcuggacauggccagccucaacaugugcaugccgcuguccugcacgaagaacaacagccaccacuacaucauggucggcaacgagaccggccuggagcucacccugaccaacacguccaucaucaaccacaaguucugcaaccugagcgacgcccacaagaagaaccucuacgaccacgcccugauguccaucaucagcaccuuccaccuguccauccccaacuucaaccaguacgaggccaugagcugcgacuucaacgggggcaagaucuccgugcaguacaaccucagccacaccuacgcgaucgacgccgccaaccacugcgggaccaucgccaacggcgugcugcagacguucaugcggauggcguggggcggguccuacaucgcccuggacagcggcaagggguccugggacugcaucaugaccagcuaccaguaccucaucauccagaacaccaccugggaggaccacugccaguucucccgccccagccccaucggcuaccuggggcugcucagccagcggacgcgcgacaucuacaucucccggcgccgccggggcaccuucaccuggacccucagcgacuccgagggcaacgagacgcccgggggcuacugccugacccgguggaugcugaucgaggccgagcucaagugcuucgggaacaccgccgucgccaagugcaacgagaagcacgacgaggaguucugcgacaugcugcgccuguucgacuucugcaagcaggcgauccggcgccucaagacccccgcccagaugagcauccagcugaucaacaaggccgugaacgcccugaucaacgaccagcucaucaugaagaaccaccuccgggacaucaugggcauccccuacugcaacuacuccaaguacugguaccugaaccacacggugaccgggaagaccagccugccccgcugcuggcuggucuccaacggcagcuaccugaacgagacccacuucuccgacgacaucgagcagcaggccgacaacaugaucacggagaugcuccagaaggaguacauggaccggcagggcaagaccccgcuggggcugguggaccucuucguguucagcaccuccuucuaccugaucagcaucuuccugcaccuggucaagaucccgacccaccgccacgugaucggcaagcccugccccaagccccaccggcucaaccacauggggaucugcuccugcggccuguacaagcacccgggggugcccgucaaguggaagcgcugaggacuaguuauaagacugacuagcccgaugggccucccaacgggcccuccuccccuccuugcaccgagauuaaucaaaggcucuuuucagagccaccaaaaaaaaaaaaaaaaaaaaaaaaaaaaaaaaaaaaaaaaaaaaaaaaaaaaaaaaaaaaaaaaaaaaaaaaaaaaaaaaaaaaaaaaaaaaaaaaaaaaa

SEQ ID NO: 24407 - RNA, 1686 nt, Artificial Sequence
  mRNA product Design i-3 (hSL-A100) comprising derived and/or modified sequence from LASV(LASV237-NIG-2010;Clade II)__AIT17638__GPCmut2 (opt1)
aggagaaagcuuaccaugggccagaucaucaccuucuuccaggaggugccccacgucaucgaggaggugaugaacaucgugcugaucgcccucagccugcuggccauccucaaggggaucuacaacgucgcgaccugcggccuguucgggcugguguccuuccuccugcugugcggccgcagcugcuccacgaccuacaaggggguguacgagcuccagacccuggagcuggacauggccagccucaacaugugcaugccgcuguccugcacgaagaacaacagccaccacuacaucauggucggcaacgagaccggccuggagcucacccugaccaacacguccaucaucaaccacaaguucugcaaccugagcgacgcccacaagaaggaccucuacgaccacgcccugauguccaucaucagcaccuuccaccuguccauccccaacuucaaccaguacgaggccaugagcugcgacuucaacgggggcaagaucuccgugcaguacaaccucagccacaccuacgcgguggacgccgccaaccacugcgggaccaucgccaacggcguccugcagacguucaugcggauggcguggggcggguccuacaucgcccuggacagcggcaagggguccugggacugcaucaugaccagcuaccaguaccucaucauccagaacaccaccugggaggaccacugccaguucucccgccccagccccaucggcuaccuggggcugcucagccagcggacgcgcgacaucuacaucucccggcgccgccggggcaccuucaccuggacccucagcgacuccgagggcaacgagacgcccgggggcuacugccugacccgguggaugcugaucgaggccgagcucaagugcuucgggaacaccgccguggccaagugcaacgagaagcacgacgaggaguucugcgacaugcugcgccuguucgacuucugcaagcaggcgauccggcgccucaagacccccgcccagaugagcauccagcugaucaacaaggccgugaacgcccugaucaacgaccagcucaucaugaagaaccaccuccgggacaucaugggcauccccuacugcaacuacuccaaguacugguaccugaaccacacggucaccgggaagaccagccugccccgcugcuggcugguguccaacggcagcuaccugaacgagacccacuucuccgacgacaucgagcagcaggccgacaacaugaucacggagcuccugcagaaggaguacauggaccggcagggcaagaccccgcuggggcucguggaccuguucgucuucagcaccuccuucuaccugaucagcaucuuccugcaccucaucaagaucccgacccaccgccacaucacgggcaagcccugccccaagccccaccggcugaaccacauggggaucugcuccugcggccuguacaagcacccgggggugcccgugaaguggaagcgcugaggacuaguuauaagacugacuagcccgaugggccucccaacgggcccuccuccccuccuugcaccgagauuaaucaaaggcucuuuucagagccaccaaaaaaaaaaaaaaaaaaaaaaaaaaaaaaaaaaaaaaaaaaaaaaaaaaaaaaaaaaaaaaaaaaaaaaaaaaaaaaaaaaaaaaaaaaaaaaaaaaaaa

SEQ ID NO: 24408 - RNA, 1686 nt, Artificial Sequence
  mRNA product Design i-3 (hSL-A100) comprising derived and/or modified sequence from LASV(LASV253-NIG-2011;Clade II)__AIT17670__GPCmut2 (opt1)
aggagaaagcuuaccaugggccagaucaucaccuucuuccaggaggugccccacgucaucgaggaggugaugaacaucgugcugaucgcccucagccugcuggccauccucaaggggaucuacaacgucgcgaccugcggccuguucgggcugguguccuuccuccugcugugcggccgcagcugcuccacgaccuacaaggggguguacgagcuccagacccuggagcuggacauggccagccucaacaugugcaugccgcuguccugcacgaagaacaacagccaccacuacaucauggucggcaacgagaccggccuggagcucacccugaccaacacguccaucaucaaccacaaguucugcaaccugagcgacgcccacaagaagaaccucuacgaccacgcccugauguccaucaucagcaccuuccaccuguccauccccaacuucaaccaguacgaggccaugagcugcgacuucaacgggggcaagaucuccgugcaguacaaccucagccacaccuacgcgguggacgccgccaaccacugcgggaccaucgccaacggcguccugcagacguucaugcggauggcguggggcggguccuacaucgcccuggacagcggcaagggguccugggacugcaucaugaccagcuaccaguaccucaucauccagaacaccaccugggaggaccacugccaguucucccgccccagccccaucggcuaccuggggcugcucagccagcggacgcgcgacaucuacaucucccggcgccgccggggcaccuucaccuggacccucagcgacuccgagggcaacgagacgcccgggggcuacugccugacccgguggaugcugaucgaggccgagcucaagugcuucgggaacaccgccguggccaagugcaacgagaagcacgacgaggaguucugcgacaugcugcgccuguucgacuucugcaagcaggcgauccggcgccucaaggcccccgcccagaugagcauccagcugaucaacaaggccgugaacgcccugaucaacgaccagcucaucaugaagaaccaccuccgggacaucaugggcaucccguacugcaacuacuccaaguacugguaccugaaccacaccgucacggggcgcaccagccugccccggugcuggcugguguccaacggcagcuaccugaacgagacccacuucuccgacgacaucgagcagcaggcggacaacaugaucaccgagcuccugcagaaggaguacaucgaccgccagggcaagacgccccuggggcucguggaccuguucgucuucagcaccuccuucuaccugaucagcaucuuccugcaccucgugaagaucccgacccaccggcacaucaucggcaagcccugccccaagccccaccgccugaaccacauggggaucugcuccugcggccuguacaagcacccgggggugcccgucaaguggaagcggugaggacuaguuauaagacugacuagcccgaugggccucccaacgggcccuccuccccuccuugcaccgagauuaaucaaaggcucuuuucagagccaccaaaaaaaaaaaaaaaaaaaaaaaaaaaaaaaaaaaaaaaaaaaaaaaaaaaaaaaaaaaaaaaaaaaaaaaaaaaaaaaaaaaaaaaaaaaaaaaaaaaaa

SEQ ID NO: 24409 - RNA, 1686 nt, Artificial Sequence
  mRNA product Design i-3 (hSL-A100) comprising derived and/or modified sequence from LASV(LASV254-NIG-2011;Clade II)__AIT17674__GPCmut2 (opt1)
aggagaaagcuuaccaugggccagaucaucaccuucuuccaggaggugccccacgucaucgaggaggugaugaacaucgugcugaucgcccucagccugcuggccauccucaaggggaucuacaacgucgcgaccugcggccuguucgggcugguguccuuccuccugcugugcggccgcagcugcuccacgaccuacaaggggguguacgagcuccagacccuggagcuggacaugaccaaccucaacaugugcaugccgcugagcugcaccaagaacaacucccaccacuacaucauggucggcaacgagaccggccuggagcucacccugacgaacaccagcaucaucaaccacaaguucugcaaccuguccgacgcccacaagaagaaccucuacaaccacgcccugaugagcaucaucuccaccuuccaccugagcauccccaacuucaaccaguacgaggccauguccugcgacuucaacgggggcaagaucagcgugcaguacaaccucucccacagcuacgccguggacgcggccaaccacugcgggaccaucgccaacggcguccugcagacguucaugcggauggccuggggcggguccuacaucgcgcuggacagcggcaaggggaacugggacugcaucaugaccuccuaccaguaccucaucauccagaacaccaccugggaggaccacugccaguucagccgccccucccccaucggcuaccuggggcugcucagccagcggacgcgcgacaucuacaucagccggcgccgccggggcaccuucaccuggacccucuccgacagcgagggcaacgagacgcccgggggcuacugccugacccgguggaugcugaucgaggccgagcucaagugcuucgggaacaccgccguggccaagugcaacgagaagcacgacgaggaguucugcgacaugcugcgccuguucgacuucugcaagcaggccauccggcgccucaagacccccgcgcaggccaacauccagcugaucaacaaggccgugaacgcccugaucaacgaccagcucaucaugaagaaccaccuccgggacaucaugggcauccccuacugcaacuacuccaaguacugguaccugaaccacacggucaccgggaagaccagccugccccgcugcuggcugguguccaacggcagcuaccugaacgagacccacuucuccgacgacaucgagcagcaggccgacaacaugaucacggagcuccugcagaaggaguacauggaccggcagggcaagaccccgcuggggcucguggaccuguucgucuucagcaccuccuucuaccugaucagcaucuuccugcaccucgugaagaucccgacccaccgccacgugaucggcaagcccugccccaagccccaccggcugaaccacauggggaucugcuccugcggccuguacaagcacccggggguccccgugaaguggaagcgcugaggacuaguuauaagacugacuagcccgaugggccucccaacgggcccuccuccccuccuugcaccgagauuaaucaaaggcucuuuucagagccaccaaaaaaaaaaaaaaaaaaaaaaaaaaaaaaaaaaaaaaaaaaaaaaaaaaaaaaaaaaaaaaaaaaaaaaaaaaaaaaaaaaaaaaaaaaaaaaaaaaaaa

SEQ ID NO: 24410 - RNA, 1686 nt, Artificial Sequence
  mRNA product Design i-3 (hSL-A100) comprising derived and/or modified sequence from LASV(Nig08-A19;Clade III)__ADU56618__GPCmut2 (opt1)
aggagaaagcuuaccaugggccagaucgugaccuucuuccaggaggucccccacgugaucgaggaggugaugaacaucguccugaucgcccucagcauccuggccauccugaaggggcucuacaacaucgcgaccugcggccugaucgggcuggugacguuccuccugcuguccggccgcagcugcuccaugaccuacaaggggguguacgagcuccagacccuggagcugaacaugaacacccucaacaugugcaugccgcugagcugcaccaagaacaacucccaccacuacaucauggucggcaacgagaccggccuggagcucacccugacgaacaccagccugcuccaccacaaguucugcaaccuguccgacgcccacaagaagaaccuguacgaccacacccucaugagcaucaucuccaccuuccaccugagcauccccaacuucaaccaguacgaggccauguccugcgacuucaacgggggcaagaucacggugcaguacaaccugagccacuccuacgccaucgacgccgcgaaccacugcgggaccguggccaacggcguccuccagaccuucaugcggauggccuggggcgggagcuacaucgcccuggacuccggccgcgggaagugggacugcaucaugaccagcuaccaguaccugaucauccagaacacgaccugggaggaccacugccaguucucccggcccagccccaucggcuaccucgggcugcugucccagcgcacccgggacaucuacaucagccgccggcgccggggcaccuucacguggacccugagcgacuccgagggcaacgagacccccgggggcuacugccucacccgcuggaugcugaucgaggcggagcugaagugcuucgggaacacggccguggccaagugcaacgagaagcacgacgaggaguucugcgacaugcuccggcuguucgacuucugcaagcaggccauccgccggcugaaggcccccgcgcagaugagcauccagcucaucaacaaggccgugaacgcccugaucaacgaccagcugaucaugaagaaccaccuccgcgacaucaugggcauccccuacugcaacuacuccaaguacugguaccugaaccacaccagcaccgggcggaccucccugccccgcugcuggcucgucagcaacggcuccuaccugaacgagacgcacuucagcgacgacaucgagcagcaggccgacaacaugaucaccgagaugcugcagaaggaguaccucgaccggcagggcaagaccccgcuggggcugguggaccuguucguguucuccaccagcuucuaccucaucuccaucuuccugcaccuggucaagaucccgacgcaccgccacaucgugggcaagcccugccccaagccccaccggcucaaccacauggggaucugcagcugcggccuguacaagcagccgggggugcccguccgcuggaagcggugaggacuaguuauaagacugacuagcccgaugggccucccaacgggcccuccuccccuccuugcaccgagauuaaucaaaggcucuuuucagagccaccaaaaaaaaaaaaaaaaaaaaaaaaaaaaaaaaaaaaaaaaaaaaaaaaaaaaaaaaaaaaaaaaaaaaaaaaaaaaaaaaaaaaaaaaaaaaaaaaaaaaa

SEQ ID NO: 24411 - RNA, 1689 nt, Artificial Sequence
  mRNA product Design i-3 (hSL-A100) comprising derived and/or modified sequence from LASV(G1180-SLE-2010;Clade IV)__AIT17168__GPCmut2 (opt1)
aggagaaagcuuaccaugggccagaucgugaccuucuuccaggaggucccccacgugaucgaggaggugaugaacaucguccugaucgcccucagcauccuggccgugcugaaggggcucuacaacuucgcgaccugcggccugguggggcugcucaccuuccugcugcucugcggccgcuccugcaccgccagccgguacaagggggucuacgagcugcagacccuggagcucaacauggagacccugaacaugugcaugccgcuguccugcaccaagaacaacagccaccacuacaucauggugggcaacgagaccggccucgagcugacccugacgaacaccuccaucaucaaccacaaguucugcaaccucagcgacgcccacaagaagaaccuguacgaccacgcccugauguccaucaucagcaccuuccaccucuccauccccaacuucaaccaguacgaggccaugagcugcgacuucaacgggggcaagaucuccgugcaguacaaccugagccacuccuacgcgggggacgccgccaaccacugcggcaccgucgccaacggggugcugcagacguucaugcgcauggcguggggcggcagcuacaucgcccucgacuccgggcacggcagcugggacugcaucaugaccuccuaccaguaccugaucauccagaacaccaccugggaggaccacugccaguucagccggcccucccccaucggguaccugggccuccugagccagcgcacgcgggacaucuacaucagccgccggcgccggggcaccuucaccuggacccuguccgacagcgaggggaaggacacgccgggcggguacugccugacccgcuggaugcucaucgaggccgagcugaagugcuucggcaacaccgccguggccaagugcaacgagaagcacgacgaggaguucugcgacaugcugcggcuguucgacuucugcaagcaggcgauccagcgccugaaggcccccgcccagauguccauccagcugaucaacaaggccgucaacgcccucaucaacgaccagcugaucaugaagaaccaccuccgggacaucauggggauccccuacugcaacuacagcaaguacugguaccucaaccacaccacgaccggcaagaccucccugcccaagugcuggcuggugagcaacggcuccuaccucaacgagacccacuucagcgacgacaucgagcagcaggcggacaacaugaucacggagaugcugcagaaggaguacauggagcgccaggggaagacgccccugggccucguggaccuguucgucuucuccaccagcuucuaccugaucuccaucuuccugcaccucgugaagaucccgacccaccggcacaucgugggcaagagcugccccaagccccaccgccugaaccacauggggaucugcuccugcgggcuguacaagcagcccggcgucccggugaaguggaagcggugaggacuaguuauaagacugacuagcccgaugggccucccaacgggcccuccuccccuccuugcaccgagauuaaucaaaggcucuuuucagagccaccaaaaaaaaaaaaaaaaaaaaaaaaaaaaaaaaaaaaaaaaaaaaaaaaaaaaaaaaaaaaaaaaaaaaaaaaaaaaaaaaaaaaaaaaaaaaaaaaaaaaa

SEQ ID NO: 24412 - RNA, 1689 nt, Artificial Sequence
  mRNA product Design i-3 (hSL-A100) comprising derived and/or modified sequence from LASV(G1442-SLE-2011;Clade IV)__AIT17180__GPCmut2 (opt1)
aggagaaagcuuaccaugggccagaucgugaccuucuuccaggaggucccccacgugaucgaggaggugaugaacaucguccugaucgcccucagcauccuggccgugcugaaggggcucuacaacguggcgaccugcggccugaucgggcuggucacguuccuccugcugugcggccgcuccugcaccaccacccucuacaaggggguguacgagcugcagacgcuggagcucaacauggagacccugaacaugugcaugccgcugagcugcaccaagaacaacucccaccacuacauccgggugggcaacgagacgggccucgagcugacccugaccaacaccagcaucaucaaccacaaguucugcaaccucuccgacgcccacaagaagaaccuguacgaccacgcccugaugagcaucaucuccacguuccaccucagcauccccaacuucaaccaguacgaggccauguccugcgacuucaacgggggcaagaucagcguccaguacaaccugucccacagcuacgccggggacgcggccaaccacugcggcaccguggccaacggggugcugcagaccuucaugcgcauggccuggggcggcuccuacaucgcgcucgacagcgggcggggcaacugggacugcaucaugaccuccuaccaguaccugaucauccagaacacgaccugggacgaccacugccaguucagccgccccucccccaucggguaccugggccuccugagccagcggacccgcgacgucuacaucucccggcgccgccggggcaccuucacguggacccugagcgacagcgaggggaaggacaccccgggcggguacugccugacccgguggaugcucaucgaggccgagcugaagugcuucggcaacacggccguggccaagugcaacgagaagcacgacgaggaguucugcgacaugcugcgccucuucgacuucugcaagcaggccauccagcggcugaaggcgcccgcccagauguccauccagcugaucaacaaggccgugaacgcccucaucaacgaccagcugaucaugaagaaccaccuccgcgacaucauggggauccccuacugcaacuacagcaaguacugguaccugaacaacaccgccaccggcaagaccucccugcccaagugcuggcugaucagcaacggcuccuaccucaacgagacgcacuucagcgacgacaucgagcaggaggcggacaacaugaucaccgagaugcugcagaaggaguacauggagcggcaggggaagacgccccugggccucgucgaccuguucguguucuccaccagcuucuaccugaucuccaucuuccugcaccucgugaagaucccgacccaccgccacaucgucggcaagagcugccccaagccccaccggcugaaccacauggggaucugcuccugcgggcuguacaagcagcccggcgugccggugcgcuggaagcggugaggacuaguuauaagacugacuagcccgaugggccucccaacgggcccuccuccccuccuugcaccgagauuaaucaaaggcucuuuucagagccaccaaaaaaaaaaaaaaaaaaaaaaaaaaaaaaaaaaaaaaaaaaaaaaaaaaaaaaaaaaaaaaaaaaaaaaaaaaaaaaaaaaaaaaaaaaaaaaaaaaaaa

SEQ ID NO: 24413 - RNA, 1689 nt, Artificial Sequence
  mRNA product Design i-3 (hSL-A100) comprising derived and/or modified sequence from LASV(G3010-SLE-2013;Clade IV)__AIT17344__GPCmut2 (opt1)
aggagaaagcuuaccaugggccagaucgugaccuucuuccaggaggucccccacgugaucgaggaggugaugaacaucguccugaucgcccucagcauccuggccgugcugaaggggcucuacaacuucgcgaccugcggccugguggggcuggucacguuccuccugcugugcggccgcuccugcaccaccagccucuacaaggggguguacgagcugcagacccuggagcucaacauggagacgcugaacaugugcaugccgcuguccugcaccaagaacaacagccaccacuacaucauggugggcaacgagaccggccucgagcugacgcugaccaacaccuccaucaucaaccacaaguucugcaaccucagcgacgcccacaagaagaaccuguacaaccacgcccugauguccaucaucagcaccuuccaccucuccauccccaacuucaaccaguacgaggccaugagcugcgacuucaacgggggcaagaucuccguccaguacaaccugagccacuccuacgccggggacgcggccagccacugcggcacgguggccaacggggugcugcagaccuucaugcggauggccuggggcggcuccuacaucgcgcucgacagcggguacggcaagugggacugcaucaugaccuccuaccaguaccugaucauccagaacaccacgugggaggaccacugccaguucagccgccccucccccaucggguaccugggccuccugagccagcggacccgcgacaucuacaucagccggcgccgccggggcaccuucaccuggacgcuguccgacagcgaggggaaggacaccccgggcggguacugccugacccgguggaugcucaucgaggccgagcugaagugcuucggcaacaccgccgucgccaagugcaacgagaagcacgacgaggaguucugcgacaugcugcgccucuucgacuucugcaagcaggccauccagcggcugaagacgcccgcgcagauguccauccagcugaucaacaaggccgugaacgcccucaucaacgaccagcugaucaugaagaaccaccuccgcgacaucauggggauccccuacugcaacuacagcaaguacugguaccugaaccacaccaccaccggcaagacgucccugcccaagugcuggcuggugagcaacggcuccuaccucaacgagacccacuucagcgacgacaucgagcagcaggccgacaacaugaucaccgagaugcugcagaaggaguacauggagcggcaggggaagacgccccugggccucgucgaccuguucguguucuccaccagcuucuaccugaucuccaucuuccugcaccucgugaagaucccgacccaccgccacaucgucggcaagagcugccccaagccccaccggcugaaccacauggggaucugcuccugcgggcuguacaagcagcccggcgugccggugcgcuggaagcggugaggacuaguuauaagacugacuagcccgaugggccucccaacgggcccuccuccccuccuugcaccgagauuaaucaaaggcucuuuucagagccaccaaaaaaaaaaaaaaaaaaaaaaaaaaaaaaaaaaaaaaaaaaaaaaaaaaaaaaaaaaaaaaaaaaaaaaaaaaaaaaaaaaaaaaaaaaaaaaaaaaaaa

SEQ ID NO: 24414 - RNA, 1689 nt, Artificial Sequence
  mRNA product Design i-3 (hSL-A100) comprising derived and/or modified sequence from LASV(G502-SLE-2009;Clade IV)__AIT17126__GPCmut2 (opt1)
aggagaaagcuuaccaugggccagaucgugaccuucuuccaggaggucccccacgugaucgaggaggugaugaacaucguccugaucgcccucagcauccuggccgugcugaaggggcucuacaacuucgcgaccugcggccugguggggcugcucacguuccugcugcucugcggccgcuccugcaccaccgggcuguacaagggcgucuacgagcugcagacccucgagcugaacauggagacgcugaacaugugcaugccgcucagcugcaccaagaacaacucccaccacuacaucauggugggcaacgagaccgggcuggagcugacgcucaccaacaccagcaucaucaaccacaaguucugcaaccuguccgacgcccacaagaagaaccuguacgaccacgcccucaugagcaucaucuccaccuuccaccugagcauccccaacuucaaccaguacgaggccauguccugcgacuucaacggcgggaagaucagcgugcaguacaaccugucccacagcuacgccggcgacgcggccgaccacugcgggacggucgccaacggcgugcuccagaccuucaugcggauggccuggggcggguccuacaucgcgcuggacagcggccgcgggcggugggacugcaucaugaccuccuaccaguaccugaucauccagaacaccacgugggaggaccacugccaguucagccgccccucccccaucggcuaccucggccugcugagccagcggacccgcgacaucuacaucucccggcgccgccgggggaccuucaccuggacgcugagcgacagcgagggcaaggacacccccgggggcuacugccucacccgguggaugcugaucgaggccgagcugaagugcuucgggaacaccgccguggccaagugcaacgagaagcacgacgaggaguucugcgacaugcuccgccuguucgacuucugcaagcaggccauccagcggcugaaggcgcccgcccagauguccauccagcucaucaacaaggccgucaacgcccugaucaacgaccagcuggugaugaagaaccaccuccgcgacaucaugggcauccccuacugcaacuacagccgguacugguaccugaaccacacgaccaccggccgcaccucccugcccaagugcuggcucgugagcaacggguccuaccugaacgagacgcacuucagcgacgacaucgagcagcaggccgacaacaugaucaccgagaugcugcagaaggaguacauggagcggcagggcaagaccccgcucgggcuggucgaccuguucguguucuccaccagcuucuaccugaucuccaucuuccuccaccuggugaagaucccgacgcaccgccacaucgucggcaagagcugccccaagccccaccggcugaaccacauggggaucugcuccugcggccucuacaagcagcccggcgugccggugaaguggaagcgcugaggacuaguuauaagacugacuagcccgaugggccucccaacgggcccuccuccccuccuugcaccgagauuaaucaaaggcucuuuucagagccaccaaaaaaaaaaaaaaaaaaaaaaaaaaaaaaaaaaaaaaaaaaaaaaaaaaaaaaaaaaaaaaaaaaaaaaaaaaaaaaaaaaaaaaaaaaaaaaaaaaaaa

SEQ ID NO: 24415 - RNA, 1689 nt, Artificial Sequence
  mRNA product Design i-3 (hSL-A100) comprising derived and/or modified sequence from LASV(G733-SLE-2010;Clade IV)__AIT17154__GPCmut2 (opt1)
aggagaaagcuuaccaugggccagaucgugaccuucuuccaggaggucccccacgugaucgaggaggugaugaacaucguccugaucgcccucagcauccuggccgugcugaaggggcucuacaacuucgcgaccugcggcaucguggggcuggucuccuuccugcuccugugcggccgcagcugcacgaccucccuguacaaggggguguacgagcuccagacccuggagcugaacauggagacccucaacaugugcaugccgcugagcugcaccaagaacaacucccaccacuacaucauggugggcaacgagaccggccuggagcucacccugacgaacaccagcaucaucaaccacaaguucugcaaccuguccgacgcccacaagaagaaccucuacgaccacgcccugaugagcaucaucuccaccuuccaccugagcauccccaacuucaaccaguacgaggccauguccugcgacuucaacgggggcaagaucagcguccaguacaaccucucccacagcuacgccggggacgcggccaaccacugcggcaccaucgccaacggggugcugcagacguucaugcggauggccuggggcggcuccuacaucgcgcuggacagcgggcgcgaccggugggacugcaucaugaccuccuaccaguaccucaucauccagaacaccaccugggaggaccacugccaguucagccgccccucccccaucggcuaccuggggcugcucagccagcggacgcgcgacaucuacaucagccggcgccgccggggcaccuucaccuggacccucuccgacagcgagggcaaggacacgcccgggggcuacugccugacccgguggaugcugaucgaggccgagcucaagugcuucgggaacaccgccguggccaagugcaacgagaagcacgacgaggaguucugcgacaugcugcgccuguucgacuucugcaagcaggccauccagcggcucaaggcgcccgcccagauguccauccagcugaucaacaaggccgucaacgcccugaucaacgaccagcucaucaugaagaaccaccuccgcgacaucaugggcauccccuacugcaacuacagcaaguacugguaccugaaccacaccacgaccgggaagaccucccugcccaagugcuggcuggugagcaacggcuccuaccugaacgagacccacuucagcgacgacaucgagcagcaggccgacaacaugaucacggagaugcuccagaaggaguacauggagcggcagggcaagaccccgcuggggcugguggaccucuucgucuucuccaccagcuucuaccugaucuccaucuuccugcaccuggugaagaucccgacccaccgccacguggucggcaagagcugccccaagccccaccggcucaaccacauggggaucugcuccugcggccuguacgggcagcccggcgugccggugaaguggaagcgcugaggacuaguuauaagacugacuagcccgaugggccucccaacgggcccuccuccccuccuugcaccgagauuaaucaaaggcucuuuucagagccaccaaaaaaaaaaaaaaaaaaaaaaaaaaaaaaaaaaaaaaaaaaaaaaaaaaaaaaaaaaaaaaaaaaaaaaaaaaaaaaaaaaaaaaaaaaaaaaaaaaaaa

SEQ ID NO: 24416 - RNA, 1689 nt, Artificial Sequence
  mRNA product Design i-3 (hSL-A100) comprising derived and/or modified sequence from MOPV/LASV reassortant(IGS-1;Clade IV)__AFY05576__GPCmut2 (opt1)
aggagaaagcuuaccaugggccagaucgugaccuucuuccaggaggucccccacgugaucgaggaggugaugaacaucguccugaucgcccucagcgugcuggccgugcugaaggggcucuacaacuucgcgaccugcggccuggucgggcuggugacguuccuccugcugugcggccgcuccugcaccaccagccucuacaaggggguguacgagcugcagacccuggagcucaacauggagacgcugaacaugugcaugccgcuguccugcaccaagaacaacagccaccacuacaucauggucggcaacgagaccggccucgagcugacgcugaccaacaccuccaucaucaaccacaaguucugcaaccucagcgacgcccacaagaagaaccuguacgaccacgcccugauguccaucaucagcaccuuccaccucuccauccccaacuucaaccaguacgaggccaugagcugcgacuucaacgggggcaagaucuccgugcaguacaaccugagccacuccuacgccggggacgcggccaaccacugcggcacgguggccaacgggguccugcagaccuucaugcggauggccuggggcggcagcuacaucgcgcucgacuccgggcgcggcaacugggacugcaucaugaccagcuaccaguaccugaucauccagaacaccacgugggaggaccacugccaguucucccggcccagccccaucggguaccugggccuccugucccagcgcacccgggacaucuacaucagccgccggcgccggggcaccuucaccuggacgcugagcgacuccgagggggaggacaccccgggcggguacugccugacccgcuggaugcucaucgaggccgagcugaagugcuucggcaacaccgccguggccaagugcaacgagaagcacgacgaggaguucugcgacaugcugcggcuguucgacuucugcaagcaggccauccagcgccugaaggcgcccgcccagaugagcauccagcugaucaacaaggccgugaacgcccucaucaacgaccagcugaucaugaagaaccaccuccgggacaucauggggauccccuacugcaacuacuccaaguacugguaccucaaccacacgaccaccggccgcaccagccugcccaagugcuggcuggucuccaacggcagcuaccucaacgagacgcacuucuccgacgacaucgagcagcaggccgacaacaugaucaccgagaugcugcagaaggaguacauggagcggcaggggaagacgccccugggccucguggaccuguucguguucagcaccuccuucuaccugaucagcaucuuccugcaccucgucaagaucccgacccaccgccacaucguggggaaguccugccccaagccccaccggcugaaccacaugggcaucugcagcugcgggcuguacaagcagcccggcgugccggucaaguggaagcgcugaggacuaguuauaagacugacuagcccgaugggccucccaacgggcccuccuccccuccuugcaccgagauuaaucaaaggcucuuuucagagccaccaaaaaaaaaaaaaaaaaaaaaaaaaaaaaaaaaaaaaaaaaaaaaaaaaaaaaaaaaaaaaaaaaaaaaaaaaaaaaaaaaaaaaaaaaaaaaaaaaaaaa

SEQ ID NO: 24417 - RNA, 1689 nt, Artificial Sequence
  mRNA product Design i-3 (hSL-A100) comprising derived and/or modified sequence from LASV(LM765-SLE-2012;Clade IV)__AIT17814__GPCmut2 (opt1)
aggagaaagcuuaccaugggccagaucgugaccuucuuccaggaggucccccacgugaucgaggaggugaugaacaucguccugaucgcccucagcauccuggccgugcugaaggggcucuacaacuucgcgaccugcggccugguggggcuggucacguuccuccugcugugcggccgcuccugcaccaccagccucuacaaggggguguacgagcugcagacccuggagcucaacauggagacgcugaacaugugcaugccgcuguccugcaccaagaacaacagccaccacuacaucauggugggcaacgagaccggccucgagcugacgcugaccaacaccuccaucaucgaccacaaguucugcaaccucagcgacgcccaccggaagaaccuguacgaccacgcccugauguccaucaucagcaccuuccaccucuccauccccaacuucaaccaguacgaggccaugagcugcgacuucaacgggggcaagaucuccguccaguacaaccugagccacuccuacgccaaggacgcggccgaccacugcgggacgguggccaacggcgugcugcagaccuucaugcgcauggccuggggcgggagcuacaucgcgcucgacuccggccgggggcgcugggacugcaucaugaccagcuaccaguaccugaucauccagaacaccacgugggaggaccacugccaguucucccggcccagccccaucggcuaccuggggcuccugucccagcgcacccgggacaucuacaucagccgccggcgccggggcaccuucaccuggacgcugagcgacuccgagggcaaggacacccccgggggcuacugccugacccgcuggaugcucaucgaggccgagcugaagugcuucgggaacaccgccgucgccaagugcaacgagaagcacgacgaggaguucugcgacaugcugcggcuguucgacuucugcaagcaggccauccagcgccugaaggcgcccgcccagaugagcauccagcugaucaacaaggccgugaacgcccucaucaacgaccagcugaucaugaagaaccaccuccgggacaucaugggcauccccuacugcaacuacuccaaguacugguaccucaaccacacgaccaccgggaagaccagccugcccaagugcuggcugguguccaacggcagcuaccucaacgagacgcacuucuccgacgacaucgagcagcaggccgacaacaugaucaccgagaugcugcagaaggaguacauggagcgccagggcaagaccccgcuggggcucgucgaccuguucguguucagcaccuccuucuaccugaucagcaucuuccugcaccucgugaagaucccgacgcaccggcacaucgucggcaagcccugccccaagccccaccgccugaaccacauggggaucugcuccugcggccuguacaagcagccgggggugcccgugaaguggaagcggugaggacuaguuauaagacugacuagcccgaugggccucccaacgggcccuccuccccuccuugcaccgagauuaaucaaaggcucuuuucagagccaccaaaaaaaaaaaaaaaaaaaaaaaaaaaaaaaaaaaaaaaaaaaaaaaaaaaaaaaaaaaaaaaaaaaaaaaaaaaaaaaaaaaaaaaaaaaaaaaaaaaaa

SEQ ID NO: 24418 - RNA, 1689 nt, Artificial Sequence
  mRNA product Design i-3 (hSL-A100) comprising derived and/or modified sequence from LASV(LM776-SLE-2012;Clade IV)__AIT17824__GPCmut2 (opt1)
aggagaaagcuuaccaugggccagaucgugaccuucuuccaggaggucccccacgugaucgaggaggugaugaacaucguccugaucgcccucagcauccuggccgugcugaaggggcucuacaacuucgcgaccugcggccugguggggcuggucacguuccuccugcugugcggccgcuccugcaccaccagcguguacaaggggguguacgagcuccagacccuggagcugaacauggagacgcucaacaugugcaugccgcuguccugcaccaagaacaacagccaccacuacaucauggucggcaacgagaccggccuggagcucacgcugaccaacaccuccaucaucaaccacaaguucugcaaccugagcgacgcccacaagaagaaccucuacgaccacgcccugauguccaucaucagcaccuuccaccuguccauccccaacuucaaccaguacgaggccaugagcugcgacuucaacgggggcaagaucuccgugcaguacaaccucagccacuccuacgccggggacgcggccaaccacugcggcacgguggccaacgggguccugcagaccuucaugcggauggccuggggcggcagcuacaucgcgcuggacuccgggcacggcaagugggacugcaucaugaccagcuaccaguaccucaucauccagaacaccacgugggaggaccacugccaguucucccgccccagccccaucggguaccugggccugcucucccagcggacccgcgacaucuacaucagccggcgccgccggggcaccuucaccuggacgcucagcgacuccgaggggaaggacaccccgggcggguacugccugacccgguggaugcugaucgaggccgagcucaagugcuucggcaacaccgccguggccaagugcaacgagaagcacgacgaggaguucugcgacaugcugcgccuguucgacuucugcaagcaggccauccagcggcucaaggcgcccgcccagaugagcauccagcugaucaacaaggccgugaacgcccugaucaacgaccagcucaucaugaagaaccaccuccgcgacaucauggggauccccuacugcaacuacuccaaguacugguaccugaaccacacgaccaccggcaagaccagccugcccaagugcuggcuggucuccaacggcagcuaccugaacgagacgcacuucuccgacgacaucgagcagcaggccgacaacaugaucaccgagaugcuccagaaggaguacauggagcggcaggggaagacgccccugggccugguggaccucuucguguucagcaccuccuucuaccugaucagcaucuuccugcaccuggucaagaucccgacccaccgccacaucguggggaaguccugccccaagccccaccggcucaaccacaugggcaucugcagcugcgggcuguacaagcagcccggcgugccgguccgcuggaagcggugaggacuaguuauaagacugacuagcccgaugggccucccaacgggcccuccuccccuccuugcaccgagauuaaucaaaggcucuuuucagagccaccaaaaaaaaaaaaaaaaaaaaaaaaaaaaaaaaaaaaaaaaaaaaaaaaaaaaaaaaaaaaaaaaaaaaaaaaaaaaaaaaaaaaaaaaaaaaaaaaaaaaa

SEQ ID NO: 24419 - RNA, 1689 nt, Artificial Sequence
  mRNA product Design i-3 (hSL-A100) comprising derived and/or modified sequence from LASV(Mad39;Clade IV)__ANH09722__GPCmut2 (opt1)
aggagaaagcuuaccaugggccagaucgugaccuucuuccaggaggucccccacgugaucgaggaggugaugaacaucguccugaucgcccucagcauccuggccgugcugaaggggcucuacaacguggcgaccugcggccugaucgggcuggucacguuccuccugcugugcggccgcuccugcaccaccacccucuacaaggggguguacgagcugcaggcccuggagcucaacauggagacgcugaacaugugcaugccgcugagcugcaccaagaacaacucccaccacuacauccgggugggcaacgagaccggccucgagcugacgcugaccaacaccagccucaucaaccacaaguucugcaaccuguccgacgcccacaagaagaaccuguacgaccacgcccucaugagcaucaucuccaccuuccaccugagcauccccaacuucaaccaguacgaggccauguccugcgacuucaacgacgggaagaucagcguccaguacaaccugucccacacguacgcgggcgacaccgccaaccacugcgggaccguggccaacggcgugcuccagaccuucaugcgcauggccuggggcgggagcuacaucgcgcuggacuccggccgcgggggcugggacugcaucaugacgagcuaccaguaccugaucauccagaacaccaccugggaggaccacugccaguucucccggcccagccccaucggguaccucggccugcugucccagcggacccgcgacaucuacaucagccggcgccgccggggcacguucaccuggacccuguccgacagcgaggggaaggacaccccgggcggguacugccucacgcgguggaugcugaucgaggccgagcugaagugcuucggcaacaccgccgucgccaagugcaacgagaagcacgacgaggaguucugcgacaugcuccgccuguucgacuucugcaagcaggccauccagcggcugaaggcgcccgcccagaugagcauccagcucaucaacaaggccgugaacgcccugaucaacgaccagcugaucaugaagaaccaccuccgcgacaucauggggauccccuacugcaacuacuccaaguacugguaccugaaccacaccgugaccggcaagacgagccugcccaagugcuggcucgucuccaacggcagcuaccugaacgagacccacuucuccgacgacaucgagcagcaggccgacaacaugaucaccgagaugcugcagaaggaguacauggagcggcaggggaagacgccccucggccugguggaccuguucguguucagcaccuccuucuaccugaucagcaucuuccuccaccuggucaagaucccgacccaccgccacgugguggggaagcccugccccaagccccaccggcugaaccacaugggcaucugcuccugcggguucuacaagcagccgggcguccccgugcgcuggaagcggugaggacuaguuauaagacugacuagcccgaugggccucccaacgggcccuccuccccuccuugcaccgagauuaaucaaaggcucuuuucagagccaccaaaaaaaaaaaaaaaaaaaaaaaaaaaaaaaaaaaaaaaaaaaaaaaaaaaaaaaaaaaaaaaaaaaaaaaaaaaaaaaaaaaaaaaaaaaaaaaaaaaaa

SEQ ID NO: 24420 - RNA, 1689 nt, Artificial Sequence
  mRNA product Design i-3 (hSL-A100) comprising derived and/or modified sequence from LASV(Z0947-SLE-2011;Clade IV)__AIT17840__GPCmut2 (opt1)
aggagaaagcuuaccaugggccagaucgugaccuucuuccaggaggucccccacgugaucgaggaggugaugaacaucguccugaucgcccucagcauccuggccgugcugaaggggcucuacaacuucgcgaccugcggccugguggggcuggucacguuccuccugcugugcggccgcuccugcaccaucagccucuacaaggggguguacgagcugcagacccuggagcucaacauggagacccugaacaugugcaugccgcuguccugcaccaagaacaacagccaccacuacaucauggugggcaacgagaccggccucgagcugacccugacgaacaccuccaucaucaaccacaaguucugcaaccucagcgacgcccacaagaagaaccuguacgaccacgcccugauguccaucaucagcaccuuccaccucuccauccccaacuucaaccaguacgaggccaugagcugcgacuucaacgggggcaagaucuccguccaguacaaccugagccacuccuacgccggggacgcggccaaccacugcggcaccguggccaacggggugcugcagacguucaugcggauggccuggggcggcagcuacaucgcgcucgacuccgggcgcgaccggugggacugcaucaugaccagcuaccaguaccugaucauccagaacaccaccugggaggaccacugccaguucucccgccccagccccaucggcuaccuggggcuccugucccagcggacgcgcgacaucuacaucagccggcgccgccggggcaccuucaccuggacccugagcgacuccgagggcaaggacacgcccgggggcuacugccugacccgguggaugcucaucgaggccgagcugaagugcuucgggaacaccgccgucgccaagugcaacgagaagcacgacgaggaguucugcgacaugcugcgccucuucgacuucugcaagcaggccauccagcggcugaaggcgcccgcccagaugagcauccagcugaucaacaaggccgugaacgcccucaucaacgaccagcugaucaugaagaaccaccuccgcgacaucaugggcauccccuacugcaacuacuccaaguacugguaccugaaccacaccacgaccgggaagaccagccugcccaagugcuggcugguguccaacggcagcuaccucaacgagacccacuucuccgacgacaucgagcagcaggccgacaacaugaucacggagaugcugcagaaggaguacauggagcggcagggcaagaccccgcuggggcucgucgaccuguucguguucagcaccuccuucuaccugaucagcaucuuccugcaccucgugaagaucccgacccaccgccacaucgucggcaagcccugccccaagccccaccggcugaaccacauggggaucugcuccugcggccuguacaagcagccgggggugcccgugaaguggaagcgcugaggacuaguuauaagacugacuagcccgaugggccucccaacgggcccuccuccccuccuugcaccgagauuaaucaaaggcucuuuucagagccaccaaaaaaaaaaaaaaaaaaaaaaaaaaaaaaaaaaaaaaaaaaaaaaaaaaaaaaaaaaaaaaaaaaaaaaaaaaaaaaaaaaaaaaaaaaaaaaaaaaaaa

SEQ ID NO: 24421 - RNA, 1689 nt, Artificial Sequence
  mRNA product Design i-3 (hSL-A100) comprising derived and/or modified sequence from LASV(Josiah;Clade IV)__NP_694870__GPCmut2 (opt1)
aggagaaagcuuaccaugggccagaucgugaccuucuuccaggaggucccccacgugaucgaggaggugaugaacaucguccugaucgcccucagcgugcuggccgugcugaaggggcucuacaacuucgcgaccugcggccuggucgggcuggugacguuccuccugcugugcggccgcuccugcaccaccagccucuacaaggggguguacgagcugcagacccuggagcucaacauggagacgcugaacaugugcaugccgcuguccugcaccaagaacaacagccaccacuacaucauggucggcaacgagaccggccucgagcugacccugacgaacaccuccaucaucaaccacaaguucugcaaccucagcgacgcccacaagaagaaccuguacgaccacgcccugauguccaucaucagcaccuuccaccucuccauccccaacuucaaccaguacgaggccaugagcugcgacuucaacgggggcaagaucuccgugcaguacaaccugagccacuccuacgccggggacgcggccaaccacugcggcaccguggccaacgggguccugcagacguucaugcggauggccuggggcggcagcuacaucgcgcucgacuccgggcgcggcaacugggacugcaucaugaccagcuaccaguaccugaucauccagaacaccaccugggaggaccacugccaguucucccggcccagccccaucggguaccugggccuccugucccagcgcacgcgggacaucuacaucagccgccggcgccggggcaccuucaccuggacccugagcgacuccgaggggaaggacacgccgggcggguacugccucacccgcuggaugcugaucgaggccgagcugaagugcuucggcaacaccgccguggccaagugcaacgagaagcacgacgaggaguucugcgacaugcuccggcuguucgacuucugcaagcaggccauccagcgccugaaggcgcccgcccagaugagcauccagcucaucaacaaggccgugaacgcccugaucaacgaccagcugaucaugaagaaccaccuccgggacaucauggggauccccuacugcaacuacuccaaguacugguaccugaaccacaccacgaccggccgcaccagccugcccaagugcuggcucgucuccaacggcagcuaccugaacgagacccacuucuccgacgacaucgagcagcaggccgacaacaugaucacggagaugcugcagaaggaguacauggagcggcaggggaagaccccgcucggccugguggaccuguucguguucagcaccuccuucuaccugaucagcaucuuccuccaccuggucaagauccccacccaccgccacaucguggggaaguccugccccaagccccaccggcugaaccacaugggcaucugcagcugcgggcucuacaagcagccgggcgugcccgucaaguggaagcgcugaggacuaguuauaagacugacuagcccgaugggccucccaacgggcccuccuccccuccuugcaccgagauuaaucaaaggcucuuuucagagccaccaaaaaaaaaaaaaaaaaaaaaaaaaaaaaaaaaaaaaaaaaaaaaaaaaaaaaaaaaaaaaaaaaaaaaaaaaaaaaaaaaaaaaaaaaaaaaaaaaaaaa

SEQ ID NO: 24422 - RNA, 1686 nt, Artificial Sequence
  mRNA product Design i-3 (hSL-A100) comprising derived and/or modified sequence from LASV(LP;Clade I)__AAF86701__GPCmut2 (opt1)
aggagaaagcuuaccaugggccagaucaucaccuucuuccaggaggugccccacgucaucgaggaggugaugaacaucgugcugaucgcccucagccugcuggccauccucaaggggcuguacaacaucgcgaccugcggcaucaucgggcuggucgccuuccucuuccugugcggcaaguccugcagccugacgcucaagggcggguacgagcugcagacccuggagcucaacauggagacccugaacaugugcaugccgcuguccugcaccaagaacagcucccaccacuacauccgcgugggcaacgagacggggcucgagcugacccugaccaacaccagcaucaucaaccacaaguucugcaaccucuccgacgcccacaagaagaaccuguacgaccacgcccugaugagcaucaucuccacguuccaccucagcauccccaacuucaaccaguacgaggccauguccugcgacuucaacggcgggaagaucagcgugcaguacaaccugucccacagcuacgcgggcgacgccgccgagcacugcgggaccgucgccaacggcgugcugcagaccuucaugcggauggcguggggcgggcgcuacaucgcccucgacuccggcaaggggaacugggacugcaucaugaccagcuaccaguaccugaucauccagaacacgaccugggaggaccacugccaguucucccggcccagccccaucggcuaccugggccuccugucccagcgcacccgggacaucuacaucagccgccggcgccgggggaccuucacguggacccugagcgacuccgagggcaacgagacccccgggggcuacugccucacccgcuggaugcugaucgaggccgagcugaagugcuucgggaacacggccguggccaagugcaacgagaagcacgacgaggaguucugcgacaugcuccggcuguucgacuucugcaagcaggcgauccgccggcugaaggccccggcccagaugagcauccagcucaucaacaaggccgucaacgcccugaucaacgaccagcugaucaugaagaaccaccuccgcgacaucaugggcauccccuacugcaacuacuccaaguacugguaccugaaccacaccagcuccggccggaccagccugcccaagugcuggcucaucuccaacgggagcuaccugaacgagacccaguucuccgacgacaucgagcagcaggcggacaacaugaucacggagaugcugcagaaggaguacaucgagcgccagggcaagaccccgcucgggcugguggacaucuucaucuucagcaccuccuucuaccugaucagcaucuuccugcaccucaucaagauccccacccaccggcacaucgugggcaagcccugccccaagccgcaccgccugaaccacaugggggucugcuccugcggccuguacaagcaccccggcgugcccacgaaguggaagcggugaggacuaguuauaagacugacuagcccgaugggccucccaacgggcccuccuccccuccuugcaccgagauuaaucaaaggcucuuuucagagccaccaaaaaaaaaaaaaaaaaaaaaaaaaaaaaaaaaaaaaaaaaaaaaaaaaaaaaaaaaaaaaaaaaaaaaaaaaaaaaaaaaaaaaaaaaaaaaaaaaaaaa

SEQ ID NO: 24423 - RNA, 1686 nt, Artificial Sequence
  mRNA product Design i-3 (hSL-A100) comprising derived and/or modified sequence from LASV(803213;Clade II)__AAF86703__GPCmut2 (opt1)
aggagaaagcuuaccaugggccagaucaucaccuucuuccaggaggugccccacgucaucgaggaggugaugaacaucgugcugaucgcccucagccugcuggccauccucaaggggaucuacaacgucgcgaccugcggccuguucgggcugaucuccuuccuccugcugugcggccgcagcugcuccgugacguacaaggggguguacgagcuccagacccuggagcugaacauggccaaccucaacaugugcaugccgcugagcugcaccaagaacaacucccaccacuacaucauggucggcaacgagaccggccuggagcucacgcugaccaacaccagcaucaucaaccacaaguucugcaaccuguccgacgcccacaagaagaaccucuacgaccacgcccugaugagcaucaucuccaccuuccaccugagcauccccaacuucaaccaguacgaggccauguccugcgacuucaacgggggcaagaucagcgugcaguacaaccucucccacagcuucgcgguggacgccgccaaccacugcgggacgaucgccaacggcguccugcagaccuucaugcggauggcguggggcggguccuacaucgcccuggacagcggcaaggggaacugggacugcaucaugaccuccuaccaguaccucaucauccagaacaccacgugggaggaccacugccaguucagccgccccucccccaucggcuaccuggggcugcucagccagcggacccgcgacaucuacaucagccggcgccggcgcggcaccuucaccuggacgcuguccgacagcgagggcaacgaggcccccgggggcuacugccugacccgguggaugcucaucgaggccgagcugaagugcuucgggaacaccgccguggcgaagugcaacgagaagcacgacgaggaguucugcgacaugcugcgccucuucgacuucugcaagcaggccaucaagcggcugaagaccccggcccagauguccauccagcugaucaacaaggccgugaacgcccucaucaacgaccagcugaucaugaagaaccaccuccgcgacaucaugggcauccccuacugcaacuacagccgguacugguaccugaaccacacggucaccgggaagaccucccugccccgcugcuggcuggugagcaacggcuccuaccucaacgagacccacuucagcgacgacaucgagcagcaggcggacaacaugaucacggagaugcugcagaaggaguacauggaccggcagggcaagaccccgcuggggcucguggaccuguucgucuucuccaccagcuucuaccugaucuccaucuuccugcaccucgugaagauccccacccaccgccacaucgugggcaagcccugccccaagccgcaccggcugaaccacauggggaucugcagcugcggccuguacaagcaccccgggguccccgugaaguggaagcgcugaggacuaguuauaagacugacuagcccgaugggccucccaacgggcccuccuccccuccuugcaccgagauuaaucaaaggcucuuuucagagccaccaaaaaaaaaaaaaaaaaaaaaaaaaaaaaaaaaaaaaaaaaaaaaaaaaaaaaaaaaaaaaaaaaaaaaaaaaaaaaaaaaaaaaaaaaaaaaaaaaaaaa

SEQ ID NO: 24424 - RNA, 1686 nt, Artificial Sequence
  mRNA product Design i-3 (hSL-A100) comprising derived and/or modified sequence from LASV(GA391;Clade III)__CAA36645__GPCmut2 (opt1)
aggagaaagcuuaccaugggccagaucgugaccuucuuccaggaggucccccacgugaucgaggaggugaugaacaucguccugaucgcccucagcauccuggccauccugaaggggcucuacaacguggcgaccugcggccugaucgggcuggugacguuccuccugcuguccggccgcagcugcucccucaucuacaaggggaccuacgagcugcagacccuggagcucaacauggagacccugaacaugugcaugccgcugagcugcacgaagaacaacucccaccacuacauccgggucggcaacgagaccggccucgagcugacccugaccaacacgagcauccucaaccacaaguucugcaaccuguccgacgcccacaagcgcaaccuguacgaccacagccucauguccaucaucagcaccuuccaccuguccauccccaacuucaaccaguacgaggccaugagcugcgacuucaacgggggcaagaucaccgugcaguacaaccugucccacagcuucgccguggacgccgcggggcacugcggcacccucgccaacgggguccugcagacguucaugcggauggccuggggcggcuccuacaucgcccuggacagcgggcgcggcaacugggacugcaucaugaccuccuaccaguaccucaucauccagaacaccaccugggacgaccacugccaguucagccggcccucccccaucggguaccugggccugcucagccagcgcacgcgggacaucuacaucagccgccggcgccggggcaccuucaccuggacccuguccgacagcgaggggaacgagacgccgggcggguacugccugacccgcuggaugcucaucgaggcggagcugaagugcuucggcaacaccgccguggccaagugcaacgagaagcacgacgaggaguucugcgacaugcugcggcuguucgacuucugcaagcaggccauccgccggcugaagacccccgcccagauguccauccagcugaucaacaaggcggugaacgcccucaucaacgaccagcugaucaugaagaaccaccuccgcgacaucauggggauccccuacugcaacuacagccgguacugguaccucaaccacacguccaccggcaagaccagccugccccgcugcuggcugaucuccaacggcagcuaccucaacgagaccaaguucuccgacgacaucgagcagcaggccgacaacaugaucacggagaugcugcagaaggaguacaucgaccggcaggggaagaccccgcugggccuggucgaccucuucguguucagcaccuccuucuaccugaucagcaucuuccugcaccucgugaagauccccacccaccgccacaucgucgggaagcccugccccaagccgcaccggcugaaccacaugggcaucugcuccugcgggcuguacaagcagcccggcgugcccgugcgcuggaagcgcugaggacuaguuauaagacugacuagcccgaugggccucccaacgggcccuccuccccuccuugcaccgagauuaaucaaaggcucuuuucagagccaccaaaaaaaaaaaaaaaaaaaaaaaaaaaaaaaaaaaaaaaaaaaaaaaaaaaaaaaaaaaaaaaaaaaaaaaaaaaaaaaaaaaaaaaaaaaaaaaaaaaaa

SEQ ID NO: 24425 - RNA, 1689 nt, Artificial Sequence
  mRNA product Design i-3 (hSL-A100) comprising derived and/or modified sequence from LASV(AV;Clade V)__CCA30314__GPCmut2 (opt1)
aggagaaagcuuaccaugggccagaucgugaccuucuuccaggaggucccccacgugaucgaggaggugaugaacaucguccugaucgcccucagcauccuggccgugcugaaggggcucuacaacaucgcgaccugcggccugaucgggcugaucacguuccuccugcugugcggccgcuccugcagcuccaaccucuacaaggggguguacgagcugcagagccuggaccucaacauggagacccugaacaugugcaugccgcuguccugcaccaagaacaacagccaccacuacauccgggucggcaacgacaccggccucgagcugacgcugaccaacaccuccauccucaaccacaaguucugcaaccugagcgacgcccacaagaaggaccuguacgaccacgcccucauguccaucaucagcaccuuccaccuguccauccccaacuucaaccaguacgaggccaugagcugcgacuucaacgggggcaagaucuccgugcaguacaaccugagccacuccuacgccaucgacgcggccaaccacugcgggacgguggccaacggcauccuccagaccuucaugcgcauggccuggggcgggagcuacaucgcgcuggacuccggccgggggaacugggacugcaucaugaccagcuaccaguaccugaucauccagaacaccacgugggagaaccacugccaguucucccgccccagccccaucggcuaccucgggcugcugagccagcggacccgcgacaucuacaucucccggcgccggcgcggcaccuucaccuggacgcucagcgacuccgagggcaacgccacccccgggggcuacugccugacccgguggaugcugaucgaggccgagcucaagugcuucgggaacaccgccgucgccaagugcaacgagaagcacgacgaggaguucugcgacaugcugcgccuguucgacuucugcaagcaggcgaucagccggcucaaguccccggcccagaugagcauccagcugaucaacaaggccgugaacgcccugaucaacgaccagcucaucaugaagaaccaccuccgcgacaucaugggcauccccuacugcaacuacuccaaguacugguaccugaaccacacgaucaccgggaagaccagccugcccaagugcuggcugguguccaacggcagcuaccugaacgagacccacuucuccgacgacaucgagcagcaggccgacaacaugaucacggagaugcuccagaaggaguacauggagcggcagggcaagaccccgcuggggcuggucgaccuguucguguucagcaccuccuucuaccucaucagcaucuuccugcgccuggugaagauccccacccaccggcacaucgucggcaagcccugccccaagccgcaccgccucaaccacauggggaucugcuccugcggccuguacaagcagcccggggugcccgugcgguggaagcgcugaggacuaguuauaagacugacuagcccgaugggccucccaacgggcccuccuccccuccuugcaccgagauuaaucaaaggcucuuuucagagccaccaaaaaaaaaaaaaaaaaaaaaaaaaaaaaaaaaaaaaaaaaaaaaaaaaaaaaaaaaaaaaaaaaaaaaaaaaaaaaaaaaaaaaaaaaaaaaaaaaaaaa

SEQ ID NO: 24426 - RNA, 1686 nt, Artificial Sequence
  mRNA product Design i-3 (hSL-A100) comprising derived and/or modified sequence from LASV(Togo/2016/7082;Clade VI)__AMR44577__GPCmut2 (opt1)
aggagaaagcuuaccaugggccagaucaucaccuucuuccaggaggugccccacgucaucgaggaggugaugaacaucgugcugaucgcccucagccugcuggccauccucaagggggucuacaacguggcgaccugcggcaucaucgggcuggugacguuccuguuccucugcggccgcuccugcagccugaucuacaagggguccuacgagcugcagacccucgagcugaacauggagacccugaacaugugcaugccgcucagcugcaccaagaacuccagccaccacuacauccgggucggcaacgagacgggccuggagcugacccucaccaacaccuccaucaucaaccacaaguucugcaaccugagcgacgcccacaagcgcaaccuguacgaccacgcccucauguccauccugagcacguuccaccuguccauccccaacuucaaccaguacgaggccaugagcugcgacuucaacgggggcaagaucuccgugcaguacaaccucagccacgccuacgcgguggacgccgccgagcacugcgggaccgucgccaacggcgugcugcagaccuucaugcggauggcguggggcggguccuacaucgcccuggacagcggccgcgggaacugggacugcaucaugaccuccuaccaguaccucaucauccagaacacgaccugggaggaccacugccaguucagccggcccucccccaucggcuaccuggggcugcucagccagcgcacccgggacaucuacaucagccgccggcgccggggcaccuucacguggacccuguccgacagcgagggcaacgagacccccgggggcuacugccugacccgcuggaugcucaucgaggccgagcugaagugcuucgggaacacggccguggccaagugcaacgagaagcacgacgaggaguucugcgacaugcugcggcuguucgacuucugcaagcaggcgauccagcgccugaaguccccggcccagaugagcauccagcugaucaacaaggccgucaacgcccucaucaacgaccagcugaucaugaagaaccaccuccgggacaugaugggcauccccuacugcaacuacuccaaguacugguaccucaaccacaccagcuccgggcgcaccagccugcccaagugcuggcugguguccaacggcagcuaccucaacgagacccacuucuccgacgacaucgagcagcaggccgacaacaugaucacggagaugcugcagaaggaguacaucgaccggcagggcaagaccccgcuggggcucguggaccuguucgucuucagcaccuccuucuaccugaucagcaucuuccugcaccucaucaagauccccacccaccgccacaucgugggcaagcccugccccaagccgcaccggcugaaccacauggggaucugcuccugcggccuguacaagcagcccggggugcccacgcgcuggaagcggugaggacuaguuauaagacugacuagcccgaugggccucccaacgggcccuccuccccuccuugcaccgagauuaaucaaaggcucuuuucagagccaccaaaaaaaaaaaaaaaaaaaaaaaaaaaaaaaaaaaaaaaaaaaaaaaaaaaaaaaaaaaaaaaaaaaaaaaaaaaaaaaaaaaaaaaaaaaaaaaaaaaaa

SEQ ID NO: 24427 - RNA, 1686 nt, Artificial Sequence
  mRNA product Design i-3 (hSL-A100) comprising derived and/or modified sequence from LASV(KAK-428;Clade n.d. (VII))__ANH09740__GPCmut2 (opt1)
aggagaaagcuuaccaugggccagaucgugaccuucuuccaggaggucccccacgugaucgaggaggugaugaacaucguccugaucgcccucagccugcuggccauccucaaggggcuguacaacuucgcgaccugcggcgugaucgggcugaucacguuccuccugcugugcggccgcuccugcagcgccaccuacaaggggcaguacgagcuccagacccuggagcugaacauggagucccucaacaugugcaugccgcugagcugcaccaagaacaacucccaccacuacauccgggccggcaacaacacgggccuggagcucacccugaccaacaccagcaucaucucccacaaguucugcaaccugagcgacgcccacaagaagaaccucuacgaccacacgcugauguccaucaucaccaccuuccaccugagcauccccaacuucaaccaguacgaggccauguccugcgacuucaacgggggcaagaucagcauccaguacaaccucucccacagcuacgcgggggacgccgcccagcacugcggcaccguggccaacgggguccugcagacguucaugcgcauggcguggggcggcuccuaccuggcccucgacagcgggcggcgcggcugggacugcaucaucuccagcuaccaguaccugaucauccagaacaccaccugggacgaccacugccaguucucccggcccagccccaucggguaccugggcuucgugagccagaagacccgcgacaucuacaucucccggcgccggcgcggcacguucaccuggacccucagcgacuccgaggggcacgacaugccgggcggguacugccugacccgguggaugcugaucgaggccgaccucaagugcuucggcaacacggccguggccaagugcaacgagaagcacgacgaggaguucugcgacauguggcgccuguucgacuucugcaagcaggcgauccagcggcugaaggcccccgcccagaugaacauccagcucaucaacaaggccgucaacgcccugaucaacgaccagcugaugaugaagaaccaccuccgcgacaucauggggauccccuacugcaacuacagcaaguucugguaccugaacaacaccaccaccggccggacgucccugccccgcugcuggcucaucagcaacggcuccuaccugaacgagacccacuucagcgacgacaucgagcagcaggcggacaacaugaucaccgagaugcugcagaaggaguacauggaccggcaggggaagaccccgcucggccugguggaccuguucguguucuccacgagcuucuaccucaucaccaucuuccugcaccuggucaagauccccacccaccgccacaucguggggaagcccugccccaagccgcaccggcugaaccacaugggcaucugcuccugcgggcucuacaagcagcccggcgugcccguccgcuggaagcggugaggacuaguuauaagacugacuagcccgaugggccucccaacgggcccuccuccccuccuugcaccgagauuaaucaaaggcucuuuucagagccaccaaaaaaaaaaaaaaaaaaaaaaaaaaaaaaaaaaaaaaaaaaaaaaaaaaaaaaaaaaaaaaaaaaaaaaaaaaaaaaaaaaaaaaaaaaaaaaaaaaaaa

SEQ ID NO: 24428 - RNA, 1686 nt, Artificial Sequence; identical to SEQ ID NO: 24422
  mRNA product Design i-3 (hSL-A100) comprising derived and/or modified sequence from LASV(Pinneo-NIG-1969;Clade I)__AIT17836__GPCmut2 (opt1)

SEQ ID NO: 24429 - RNA, 1686 nt, Artificial Sequence
  mRNA product Design i-3 (hSL-A100) comprising derived and/or modified sequence from LASV(ISTH0009-NIG-2011;Clade II)__AIT17404__GPCmut2 (opt1)
aggagaaagcuuaccaugggccagaucaucaccuucuuccaggaggugccccacgucaucgaggaggugaugaacaucgugcugaucgcccucagccugcuggccauccucaaggggaucuacaacgucgcgaccugcggccuguucgggcugguguccuuccuccugcugugcggccgcagcugcuccacgaccuacaaggggguguacgagcuccagacccuggagcuggacauggccagccucaacaugugcaugccgcuguccugcaccaagaacaacagccaccacuacaucauggucggcaacgagacgggccuggagcucacccugaccaacaccuccaucaucaaccacaaguucugcaaccugagcgacgcccacaagaagaaccucuacgaccacgcccugauguccaucaucagcacguuccaccuguccauccccaacuucaaccaguacgaggccaugagcugcgacuucaacgggggcaagaucuccgugcaguacaaccucagccacgcguacgccguggacgccgccaaccacugcgggaccaucgcgaacggcguccugcagaccuucaugcggauggccuggggcggguccuacaucgcccuggacagcggcaagggguccugggacugcaucaugaccagcuaccaguaccucaucauccagaacacgaccugggaggaccacugccaguucucccgccccagccccaucggcuaccuggggcugcucagccagcggacccgcgacaucuacaucucccggcgccggcgcggcaccuucacguggacccugagcgacuccgagggcaacgagacccccgggggcuacugccugacccgguggaugcucaucgaggccgagcugaagugcuucgggaacacggccguggcgaagugcaacgagaagcacgacgaggaguucugcgacaugcugcgccucuucgacuucugcaagcaggccauccggcgccugaagaccccggcccagaugagcauccagcugaucaacaaggccgugaacgcccucaucaacgaccagcugaucaugaagaaccaccuccgggacaucaugggcauccccuacugcaacuacuccaaguacugguaccugaaccacaccgucaccgggaagacgagccugccccgcugcuggcugguguccaacggcagcuaccucaacgagacccacuucuccgacgacaucgagcagcaggcggacaacaugaucaccgagcugcugcagaaggaguacauggaccggcagggcaagaccccgcucgggcugguggaccuguucgucuucagcacguccuucuaccugaucagcaucuuccuccaccugaucaagauccccacccaccgccacaucaccggcaagcccugccccaagccgcaccggcugaaccacauggggaucugcuccugcggccucuacaagcaccccggggugcccgugaaguggaagcgcugaggacuaguuauaagacugacuagcccgaugggccucccaacgggcccuccuccccuccuugcaccgagauuaaucaaaggcucuuuucagagccaccaaaaaaaaaaaaaaaaaaaaaaaaaaaaaaaaaaaaaaaaaaaaaaaaaaaaaaaaaaaaaaaaaaaaaaaaaaaaaaaaaaaaaaaaaaaaaaaaaaaaa

SEQ ID NO: 24430 - RNA, 1686 nt, Artificial Sequence
  mRNA product Design i-3 (hSL-A100) comprising derived and/or modified sequence from LASV(ISTH2010-NIG-2012;Clade II)__AIT17482__GPCmut2 (opt1)
aggagaaagcuuaccaugggccagaucaucaccuucuuccaggaggugccccacgucaucgaggaggugaugaacaucgugcugaucgcccucagccugcuggccauccucaaggggaucuacaacgucgcgaccugcggccuguucgggcugguguccuuccuccugcugugcggccgcagcugcuccacgaccuacaaggggguguacgagcuccagacccuggagcuggacauggccagccucaacaugugcaugccgcuguccugcaccaagaacaacagccaccacuacaucauggucggcaacgagacgggccuggagcucacccugaccaacaccuccaucaucaaccacaaguucugcaaccugagcgacgcccacaagaagaaccucuacgaccacgcccugauguccaucaucagcacguuccaccuguccauccccaacuucaaccaguacgaggccaugagcugcgacuucaacgggggcaagaucuccgugcaguacaaccucagccacgcguacgccguggacgccgccaaccacugcgggaccaucgcgaacggcguccugcagaccuucaugcggauggccuggggcggguccuacaucgcccuggacagcggcaagggguccugggacugcaucaugaccagcuaccaguaccucaucauccagaacaucacgugggaggaccacugccaguucucccgccccagccccaucggcuaccuggggcugcucagccagcggacccgcgacaucuacaucucccggcgccggcgcggcaccuucaccuggacgcugagcgacuccgagggcaacgagacccccgggggcuacugccugacccgguggaugcucaucgaggccgagcugaagugcuucgggaacaccgccguggcgaagugcaacgagaagcacgacgaggaguucugcgacaugcugcgccucuucgacuucugcaagcaggccauccggcgccugaagacgccggcccagaugagcauccagcugaucaacaaggccgugaacgcccucaucaacgaccagcugaucaugaagaaccaccuccgggacaucaugggcauccccuacugcaacuacuccaaguacugguaccugaaccacaccgucaccgggaagaccagccugccccgcugcuggcugguguccaacggcagcuaccucaacgagacgcacuucuccgacgacaucgagcagcaggcggacaacaugaucaccgagcugcugcagaaggaguacaucgaccggcagggcaagaccccgcucgggcugguggaccuguucgucuucagcaccuccuucuaccugaucagcaucuuccuccaccuggugaagauccccacgcaccgccacguggucggcaagcccugccccaagccgcaccggcugaaccacauggggaucugcuccugcggccucuacaagcaccccggggugcccgugaaguggaagcgcugaggacuaguuauaagacugacuagcccgaugggccucccaacgggcccuccuccccuccuugcaccgagauuaaucaaaggcucuuuucagagccaccaaaaaaaaaaaaaaaaaaaaaaaaaaaaaaaaaaaaaaaaaaaaaaaaaaaaaaaaaaaaaaaaaaaaaaaaaaaaaaaaaaaaaaaaaaaaaaaaaaaaa

SEQ ID NO: 24431 - RNA, 1686 nt, Artificial Sequence
  mRNA product Design i-3 (hSL-A100) comprising derived and/or modified sequence from LASV(Lassa virus/H.sapiens-wt/NGA/2015/ISTH_0543;Clade II)__AVO03639__GPCmut2 (opt1)
aggagaaagcuuaccaugggccagaucaucaccuucuuccaggaggugccccacgucaucgaggaggugaugaacaucgugcugaucgcccucagccugcuggccauccucaaggggaucuacaacgucgcgaccugcggccuguucgggcugguguccuuccuccugcugugcggccgcagcugcuccacgaccuacaaggggguguacgagcuccagacccuggagcuggacauggccaaccucaacaugugcaugccgcugagcugcaccaagaacaacucccaccacuacaucauggucggcaacgagacgggccuggagcucacccugaccaacaccagcaucaucaaccacaaguucugcaaccuguccgacgcccacaagaagaaccucuacgaccacgcccugaugagcaucaucuccacguuccaccugagcauccccaacuucaaccaguacgaggccauguccugcgacuucaacgggggcaagaucagcgugcaguacaaccucucccacaccuacgcgguggacgccgccaaccacugcgggaccaucgccaacggcguccugcagaccuucaugcggauggcguggggcgggagcuacaucgcccuggacuccggcaaggggagcugggacugcaucaugacguccuaccaguaccucgugauccagaacaccaccugggaggaccacugccaguucagccgccccucccccaucggcuaccuggggcugcucagccagcggacccgcgacaucuacaucagccggcgccggcgcggcacguucaccuggacccuguccgacagcgagggcaacgagacccccgggggcuacugccugacgcgguggaugcucaucgaggccgagcugaagugcuucgggaacaccgccguggccaagugcaacgagaagcacgacgaggaguucugcgacaugcugcgccucuucgacuucugcaagcaggcgauccggcgccugaagaccccggcccagauguccauccagcugaucaacaaggccgucaacgcccucaucaacgaccagcugaucaugaagaaccaccuccgggacaucaugggcauccccuacugcaacuacagcaaguacugguaccugaaccacaccgugacggggaagaccucccugccccgcugcuggcuggugagcaacggcuccuaccucaacgagacccacuucagcgacgacaucgagcagcaggccgacaacaugaucaccgagcugcugcagaaggaguacaucgaccggcagggcaagacgccgcucgggcuggucgaccuguucguguucuccaccagcuucuaccugaucuccaucuuccuccaccuggugaagauccccacccaccgccacaucaccggcaagcccugccccaagccgcaccggcugaaccacauggggaucugcagcugcggccucuacaagcaccccgggguccccgugaaguggaagcgcugaggacuaguuauaagacugacuagcccgaugggccucccaacgggcccuccuccccuccuugcaccgagauuaaucaaaggcucuuuucagagccaccaaaaaaaaaaaaaaaaaaaaaaaaaaaaaaaaaaaaaaaaaaaaaaaaaaaaaaaaaaaaaaaaaaaaaaaaaaaaaaaaaaaaaaaaaaaaaaaaaaaaa

SEQ ID NO: 24432 - RNA, 1686 nt, Artificial Sequence
  mRNA product Design i-3 (hSL-A100) comprising derived and/or modified sequence from LASV(Lassa virus/H.sapiens-wt/NGA/2016/ISTH_0009;Clade II)__AVO03571__GPCmut2 (opt1)
aggagaaagcuuaccaugggccagaucaucaccuucuuccaggaggugccccacgucaucgaggaggugaugaacaucgugcugaucgcccucagccugcuggccauccucaaggggaucuacaacgucgcgaccugcggccugcuggggcucguguccuuccugcugcucugcggccgcagcugcuccacgaccuacaaggggguguacgagcugcagacccuggagcucgacauggccagccugaacaugugcaugccgcuguccugcaccaagaacaacagccaccacuacaucauggucggcaacgagacgggccucgagcugacccugaccaacaccuccaucaucaaccacaaguucugcaaccucagcgacgcccacaagaagaaccuguacgaccacgcccugauguccaucaucagcacguuccaccucuccauccccaacuucaaccaguacgaggccaugagcugcgacuucaacgggggccggaucuccgugcaguacaaccugagccacuccuacgcgguggacgccgccaaccacugcgggaccaucgccaacggcguccugcagaccuucaugcgcauggcguggggcgggagcuacaucgcccucgacuccggcaaggggagcugggacugcaucaugaccuccuaccaguaccugaucauccagaacacgaccugggaggaccacugccaguucagccggcccagccccaucggcuaccuggggcuccugucccagcgcacccgggacaucuacaucagccgccggcgccggggcaccuucacguggacccuguccgacagcgagggcaacgagacccccgggggcuacugccucacccgcuggaugcugaucgaggccgagcugaagugcuucgggaacacggccguggccaagugcaacgagaagcacgacgaggaguucugcgacaugcuccggcuguucgacuucugcaagcaggcgauccgccggcugaagaccccggcccagauguccauccagcucaucaacaaggccgugaacgcccugaucaacgaccagcugaucaugaagaaccaccuccgcgacaucaugggcauccccuacugcaacuacagcaaguacugguaccugaaccacaccgucaccgggaagacgucccugccccggugcuggcucgugagcaacggcuccuaccugaacgagacccacuucagcgacgacaucgagcagcaggccgacaacaugaucaccgagcugcuccagaaggaguacaucgaccgccagggcaagaccccgcuggggcugguggaccuguucgucuucuccacgagcuucuaccucaucuccaucuuccugcaccuggugaagauccccacccaccggcacaucaccggcaagcccugccccaagccgcaccgccucaaccacauggggaucugcagcugcggccuguacaaccaccccggggugcccgucaaguggaagcggugaggacuaguuauaagacugacuagcccgaugggccucccaacgggcccuccuccccuccuugcaccgagauuaaucaaaggcucuuuucagagccaccaaaaaaaaaaaaaaaaaaaaaaaaaaaaaaaaaaaaaaaaaaaaaaaaaaaaaaaaaaaaaaaaaaaaaaaaaaaaaaaaaaaaaaaaaaaaaaaaaaaaa

SEQ ID NO: 24433 - RNA, 1686 nt, Artificial Sequence
  mRNA product Design i-3 (hSL-A100) comprising derived and/or modified sequence from LASV(Lassa virus/H.sapiens-wt/NGA/2016/ISTH_0017;Clade II)__AVO03567__GPCmut2 (opt1)
aggagaaagcuuaccaugggccagaucaucaccuucuuccaggaggugccccacgucaucgaggaggugaugaacaucgugcugaucgcccucagccugcuggccauccucaaggggaucuacaacgucgcgaccugcggccuguucgggcugguguccuuccuccugcugugcggccgcagcugcuccacgaccuacaaggggguguacgagcuccagacccuggagcuggacauggccagccucaacaugugcaugccgcuguccugcaccaagaacaacagccaccacuacaucauggucggcaacgagacgggccuggagcucacccugaccaacaccuccaucaucaaccacaaguucugcaaccugagcgacgcccacaagaagaaccucuacgaccacgcccugauguccaucaucagcacguuccaccuguccauccccaacuucaaccaguacgaggccaugagcugcgacuucaacgggggcaagaucuccgugcaguacaaccucagccacaccuacgcgaucgacgccgccaaccacugcgggaccaucgccaacggcgugcugcagaccuucaugcggauggcguggggcggguccuacaucgcccuggacagcggcaagggguccugggacugcaucaugacgagcuaccaguaccucaucauccagaacaccaccugggaggaccacugccaguucucccgccccagccccaucggcuaccuggggcugcucagccagcggacccgcgacaucuacaucucccggcgccggcgcggcacguucaccuggacccugagcgacuccgagggcaacgagacccccgggggcuacugccugacgcgguggaugcucaucgaggccgagcugaagugcuucgggaacaccgccgucgccaagugcaacgagaagcacgacgaggaguucugcgacaugcugcgccucuucgacuucugcaagcaggcgauccggcgccugaagaccccggcccagaugagcauccagcugaucaacaaggccgugaacgcccucaucaacgaccagcugaucaugaagaaccaccuccgggacaucaugggcauccccuacugcaacuacuccaaguacugguaccugaaccacaccgugacggggaagaccagccugccccgcugcuggcuggucuccaacggcagcuaccucaacgagacccacuucuccgacgacaucgagcagcaggccgacaacaugaucaccgagcugcugcagaaggaguacauggaccggcagggcaagacgccgcucgggcugguggaccuguucguguucagcaccuccuucuaccugaucagcaucuuccuccaccugguccgcauccccacccaccggcacgugaucggcaagcccugccccaagccgcaccgccugaaccacauggggaucugcuccugcggccucuacaagcaccccggggugcccgucaaguggaagcggugaggacuaguuauaagacugacuagcccgaugggccucccaacgggcccuccuccccuccuugcaccgagauuaaucaaaggcucuuuucagagccaccaaaaaaaaaaaaaaaaaaaaaaaaaaaaaaaaaaaaaaaaaaaaaaaaaaaaaaaaaaaaaaaaaaaaaaaaaaaaaaaaaaaaaaaaaaaaaaaaaaaaa

SEQ ID NO: 24434 - RNA, 1686 nt, Artificial Sequence
  mRNA product Design i-3 (hSL-A100) comprising derived and/or modified sequence from LASV(Lassa virus/H.sapiens-wt/NGA/2018/ISTH_0959;Clade II)__AVV65099__GPCmut2 (opt1)
aggagaaagcuuaccaugggccagaucaucaccuucuuccaggaggugccccacgucaucgaggaggugaugaacaucgugcugaucgcccucagccugcuggccauccucaaggggaucuacaacgucgugaccugcggccuguucgggcugguguccuuccuccugcugugcggccgcagcugcuccacgaccuacaagggggucuacgagcuccagacccuggagcuggacauggcgagccucaacaugugcaugccgcuguccugcaccaagaacaacagccaccacuacaucauggugggcaacgagacgggccuggagcucacccugaccaacaccuccaucaucaaccacaaguucugcaaccugagcgacgcccacaagaagaaccucuacgaccacgcccugauguccaucaucagcacguuccaccuguccauccccaacuucaaccaguacgaggccaugagcugcgacuucaacgggggcaagaucuccgugcaguacaaccucagccacgccuacgcgaucgacgccgccaaccacugcgggaccaucgccaacggcguccugcagaccuucaugcggauggcguggggcggguccuacaucgcccuggacagcggcaagggguccugggacugcaucaugaccagcuaccaguaccucaucauccagaacacgaccugggaggaccacugccaguucucccgccccagccccaucggcuaccuggggcugcucagccagcggacccgcgacaucuacaucucccggcgccggcgcggcaccuucacguggacccugagcgacuccgagggcaacgagacccccgggggcuacugccugacccgguggaugcucaucgaggccgagcugaagugcuucgggaacacggccguggccaagugcaacgagaagcacgacgaggaguucugcgacaugcugcgccucuucgacuucugcaagcaggcgauccggcgccugaagaccccggcccagaugagcauccagcugaucaacaaggccgugaacgcccucaucaacgaccagcugaucaugaagaaccaccuccgggacaucaugggcauccccuacugcaacuacuccaaguacugguaccugaaccacaccgucaccgggaagacgagccugccccgcugcuggcugguguccaacggcagcuaccucaacgagacccacuucuccgacgacaucgagcagcaggccgacaacaugaucaccgagcugcugcagaaggaguacaucgaccggcagggcaagaccccgcucgggcugguggaccuguucgucuucagcacguccuucuaccugaucagcaucuuccuccaccuggugaagauccccacccaccgccacgugaucggcaagcccugccccaagccgcaccggcugaaccacauggggaucugcuccugcggccucuacaagcaccccgggguccccgugaaguggaagcgcugaggacuaguuauaagacugacuagcccgaugggccucccaacgggcccuccuccccuccuugcaccgagauuaaucaaaggcucuuuucagagccaccaaaaaaaaaaaaaaaaaaaaaaaaaaaaaaaaaaaaaaaaaaaaaaaaaaaaaaaaaaaaaaaaaaaaaaaaaaaaaaaaaaaaaaaaaaaaaaaaaaaaa

SEQ ID NO: 24435 - RNA, 1686 nt, Artificial Sequence
  mRNA product Design i-3 (hSL-A100) comprising derived and/or modified sequence from LASV(LASV003-NIG-2008;Clade II)__AIT17580__GPCmut2 (opt1)
aggagaaagcuuaccaugggccagaucaucaccuucuuccaggaggugccccacgucaucgaggaggugaugaacaucgugcugaucgcccucagccugcuggccauccucaaggggaucuacaacgucgcgaccugcggccuguucgggcugguguccuuccuccugcugugcggccgcagcugcuccacgaccuacaaggggguguacgagcuccagacccuggagcuggacauggccagccucaacaugugcaugccgcuguccugcaccaagaacaacagccaccacuacaucauggucggcaacgagacgggccuggagcucacccugaccaacaccuccaucaucaaccacaaguucugcaaccugagcgacgcccacaagaagaaccucuacgaccacgcccugauguccaucaucagcacguuccaccuguccauccccaacuucaaccaguacgaggccaugagcugcgacuucaacgggggcaagaucuccgugcaguacaaccucagccacaccuacgcgguggacgccgccaaccacugcgggaccaucgccaacggcguccugcagaccuucaugcggauggcguggggcggguccuacaucgcccuggacagcggcaagggguccugggacugcaucaugacgagcuaccaguaccucaucauccagaacaccaccugggaggaccacugccaguucucccgccccagccccaucggcuaccuggggcugcucagccagcggacccgcgacaucuacaucucccggcgccggcgcggcacguucaccuggacccugagcgacuccgagagcaacgagaccccgggcggguacugccugacgcgguggaugcucaucgaggccgagcugaagugcuucggcaacaccgccguggccaagugcaacgagaagcacgacgaggaguucugcgacaugcugcgccucuucgacuucugcaagcaggcgauccggcgccugaaggcccccgcccagauguccauccagcugaucaacaaggccgugaacgcccucaucaacgaccagcugaucaugaagaaccaccuccgggacaucauggggauccccuacugcaacuacagcaaguacugguaccugaaccacaccgucaccggccgcacgucccugccccggugcuggcuggugagcaacggguccuaccucaacgagacccacuucagcgacgacaucgagcagcaggcggacaacaugaucaccgagcugcugcagaaggaguacauggaccgccagggcaagaccccgcucggccugguggaccuguucgucuucuccacgagcuucuaccugaucuccaucuuccuccaccuggugaagauccccacccaccggcacgugaucgggaagcccugccccaagccgcaccgccugaaccacaugggcaucugcagcugcgggcucuacaagcaccccggcguccccgugaaguggaagcggugaggacuaguuauaagacugacuagcccgaugggccucccaacgggcccuccuccccuccuugcaccgagauuaaucaaaggcucuuuucagagccaccaaaaaaaaaaaaaaaaaaaaaaaaaaaaaaaaaaaaaaaaaaaaaaaaaaaaaaaaaaaaaaaaaaaaaaaaaaaaaaaaaaaaaaaaaaaaaaaaaaaaa

SEQ ID NO: 24436 - RNA, 1686 nt, Artificial Sequence
  mRNA product Design i-3 (hSL-A100) comprising derived and/or modified sequence from LASV(LASV035-NIG-2009;Clade II)__AIT17588__GPCmut2 (opt1)
aggagaaagcuuaccaugggccagaucaucaccuucuuccaggaggugccccacgucaucgaggaggugaugaacaucgugcugaucgcccucagccugcuggccauccucaaggggaucuacaacgucgcgaccugcggccuguucgggcugguguccuuccuccugcugugcggccgcagcugcuccacgaccuacaaggggguguacgagcuccagacccuggagcuggacauggccagccucaacaugugcaugccgcuguccugcaccaagaacaacagccaccacuacaucauggucggcaacgagacgggccuggagcucacccugaccaacaccuccaucaucaaccacaaguucugcaaccugagcgacgcccacaagaagaaccucuacgaccacgcccugauguccaucaucagcacguuccaccuguccauccccaacuucaaccaguacgaggccaugagcugcgacuucaacgggggcaagaucuccgugcaguacaaccucagccacgcguacgccguggacgccgccaaccacugcgggaccaucgcgaacggcguccugcagaccuucaugcggauggccuggggcggguccuacaucgcccuggacagcggcaagggguccugggacugcaucaugaccagcuaccaguaccucaucauccagaacacgaccugggaggaccacugccaguucucccgccccagccccaucggcuaccuggggcugcucagccagcggacccgcgacaucuacaucucccggcgccggcgcggcaccuucacguggacccugagcgacuccgagggcaacgagacccccgggggcuacugccugacccgguggaugcucaucgaggccgagcugaagugcuucgggaacacggccguggcgaagugcaacgagaagcacgacgaggaguucugcgacaugcugcgccucuucgacuucugcaagcaggccauccggcgccugaaggccccggcccagaugagcauccagcugaucaacaaggccgugaacgcgcucaucaacgaccagcugaucaugaagaaccaccuccgggacaucaugggcauccccuacugcaacuacuccaaguacugguaccugaaccacaccgucaccgggaagaccagccugccccgcugcuggcugguguccaacggcagcuaccucaacgagacgcacuucuccgacgacaucgagcagcaggccgacaacaugaucaccgagcugcugcagaaggaguacaucgaccggcagggcaagaccccgcucgggcugguggaccuguucgucuucagcaccuccuucuaccugaucagcaucuuccuccaccuggugaagauccccacgcaccgccacgugaucggcaagcccugccccaagccgcaccggcugaaccacauggggaucugcuccugcggccucuacaagcaccccgggguccccgugaaguggaagcgcugaggacuaguuauaagacugacuagcccgaugggccucccaacgggcccuccuccccuccuugcaccgagauuaaucaaaggcucuuuucagagccaccaaaaaaaaaaaaaaaaaaaaaaaaaaaaaaaaaaaaaaaaaaaaaaaaaaaaaaaaaaaaaaaaaaaaaaaaaaaaaaaaaaaaaaaaaaaaaaaaaaaaa

SEQ ID NO: 24437 - RNA, 1686 nt, Artificial Sequence
  mRNA product Design i-3 (hSL-A100) comprising derived and/or modified sequence from LASV(LASV1000-NIG-2009;Clade II)__AIT17782__GPCmut2 (opt1)
aggagaaagcuuaccaugggccagaucaucaccuucuuccaggaggugccccacgucaucgaggaggugaugaacaucgugcugaucgcccucagccugcuggccauccucaaggggaucuacaacgucgcgaccugcggccuguucgggcugguguccuuccuccugcugugcggccgcagcugcuccacgaccuacaaggggguguacgagcuccagacccuggagcuggacauggccagccucaacaugugcaugccgcuguccugcaccaagaacaacagccaccacuacaucauggucggcaacgagacgggccuggagcucacccugaccaacaccuccaucaucaaccacaaguucugcaaccugagcgacgcccacaagaagaaccucuacgaccacgcccugauguccaucaucagcacguuccaccuguccauccccaacuucaaccaguacgaggccaugagcugcgacuucaacgggggcaagaucuccgugcaguacaaccucagccacaccuacgcgguggacgccgccaaccacugcgggaccaucgccaacggcguccugcagaccuucaugcggauggcguggggcggguccuacaucgcccuggacagcggcaagggguccugggacugcaucaugacgagcuaccaguaccucaucauccagaacaccaccugggaggaccacugccaguucucccgccccagccccaucggcuaccuggggcugcucagccagcggacccgcgacaucuacaucucccggcgccggcgcggcacguucaccuggacccugagcgacuccgagggcaacgagacccccgggggcuacugccugacgcgguggaugcucaucgaggccgagcugaagugcuucgggaacaccgccguggccaagugcaacgagaagcacgacgaggaguucugcgacaugcugcgccucuucgacuucugcaagcaggcgaucaagcggcugaagaccccggcccagaugagcauccagcugaucaacaaggccgugaacgcccucaucaacgaccagcugaucaugaagaaccaccuccgcgacaucaugggcauccccuacugcaacuacuccaaguacugguaccugaaccacaccgucacggggaagaccagccugccccggugcuggcugguguccaacggcagcuaccucaacgagacccacuucuccgacgacaucgagcagcaggccgacaacaugaucaccgagcugcugcagaaggaguacaucgaccgccagggcaagacgccgcucgggcugguggaccuguucgucuucagcaccuccuucuaccugaucagcaucuuccuccaccuggugaagauccccacccaccggcacguggucggcaagcccugccccaagccgcaccgccugaaccacauggggaucugcuccugcggccucuacaagcaccccggggugcccgugaaguggaagcggugaggacuaguuauaagacugacuagcccgaugggccucccaacgggcccuccuccccuccuugcaccgagauuaaucaaaggcucuuuucagagccaccaaaaaaaaaaaaaaaaaaaaaaaaaaaaaaaaaaaaaaaaaaaaaaaaaaaaaaaaaaaaaaaaaaaaaaaaaaaaaaaaaaaaaaaaaaaaaaaaaaaaa

SEQ ID NO: 24438 - RNA, 1686 nt, Artificial Sequence
  mRNA product Design i-3 (hSL-A100) comprising derived and/or modified sequence from LASV(LASV221-NIG-2010;Clade II)__AIT17624__GPCmut2 (opt1)
aggagaaagcuuaccaugggccagaucaucaccuucuuccaggaggugccccacgucaucgaggaggugaugaacaucgugcugaucgcccucagccugcuggccauccucaaggggaucuacaacgucgcgaccugcggccuguucgggcugguguccuuccuccugcugugcggccgcagcugcuccacgaccuacaaggggguguacgagcuccagacccuggagcuggacauggccagccucaacaugugcaugccgcuguccugcaccaagaacaacagccaccacuacaucauggucggcaacgagacgggccuggagcucacccugaccaacaccuccaucaucaaccacaaguucugcaaccugagcgacgcccacaagaagaaccucuacgaccacgcccugauguccaucaucagcacguuccaccuguccauccccaacuucaaccaguacgaggccaugagcugcgacuucaacgggggcaagaucuccgugcaguacaaccucagccacaccuacgcgaucgacgccgccaaccacugcgggaccaucgccaacggcgugcugcagaccuucaugcggauggcguggggcggguccuacaucgcccuggacagcggcaagggguccugggacugcaucaugacgagcuaccaguaccucaucauccagaacaccaccugggaggaccacugccaguucucccgccccagccccaucggcuaccuggggcugcucagccagcggacccgcgacaucuacaucucccggcgccggcgcggcacguucaccuggacccugagcgacuccgagggcaacgagacccccgggggcuacugccugacgcgguggaugcucaucgaggccgagcugaagugcuucgggaacaccgccgucgccaagugcaacgagaagcacgacgaggaguucugcgacaugcugcgccucuucgacuucugcaagcaggcgauccggcgccugaagaccccggcccagaugagcauccagcugaucaacaaggccgugaacgcccucaucaacgaccagcugaucaugaagaaccaccuccgggacaucaugggcauccccuacugcaacuacuccaaguacugguaccugaaccacaccgugacggggaagaccagccugccccgcugcuggcuggucuccaacggcagcuaccucaacgagacccacuucuccgacgacaucgagcagcaggccgacaacaugaucaccgagaugcugcagaaggaguacauggaccggcagggcaagacgccgcuggggcucguggaccuguucguguucagcaccuccuucuaccugaucagcaucuuccugcaccucgucaagauccccacccaccgccacgugaucggcaagcccugccccaagccgcaccggcugaaccacauggggaucugcuccugcggccuguacaagcaccccggggugcccgucaaguggaagcgcugaggacuaguuauaagacugacuagcccgaugggccucccaacgggcccuccuccccuccuugcaccgagauuaaucaaaggcucuuuucagagccaccaaaaaaaaaaaaaaaaaaaaaaaaaaaaaaaaaaaaaaaaaaaaaaaaaaaaaaaaaaaaaaaaaaaaaaaaaaaaaaaaaaaaaaaaaaaaaaaaaaaaa

SEQ ID NO: 24439 - RNA, 1686 nt, Artificial Sequence
  mRNA product Design i-3 (hSL-A100) comprising derived and/or modified sequence from LASV(LASV237-NIG-2010;Clade II)__AIT17638__GPCmut2 (opt1)
aggagaaagcuuaccaugggccagaucaucaccuucuuccaggaggugccccacgucaucgaggaggugaugaacaucgugcugaucgcccucagccugcuggccauccucaaggggaucuacaacgucgcgaccugcggccuguucgggcugguguccuuccuccugcugugcggccgcagcugcuccacgaccuacaaggggguguacgagcuccagacccuggagcuggacauggccagccucaacaugugcaugccgcuguccugcaccaagaacaacagccaccacuacaucauggucggcaacgagacgggccuggagcucacccugaccaacaccuccaucaucaaccacaaguucugcaaccugagcgacgcccacaagaaggaccucuacgaccacgcccugauguccaucaucagcacguuccaccuguccauccccaacuucaaccaguacgaggccaugagcugcgacuucaacgggggcaagaucuccgugcaguacaaccucagccacaccuacgcgguggacgccgccaaccacugcgggaccaucgccaacggcguccugcagaccuucaugcggauggcguggggcggguccuacaucgcccuggacagcggcaagggguccugggacugcaucaugacgagcuaccaguaccucaucauccagaacaccaccugggaggaccacugccaguucucccgccccagccccaucggcuaccuggggcugcucagccagcggacccgcgacaucuacaucucccggcgccggcgcggcacguucaccuggacccugagcgacuccgagggcaacgagacccccgggggcuacugccugacgcgguggaugcucaucgaggccgagcugaagugcuucgggaacaccgccguggccaagugcaacgagaagcacgacgaggaguucugcgacaugcugcgccucuucgacuucugcaagcaggcgauccggcgccugaagaccccggcccagaugagcauccagcugaucaacaaggccgugaacgcccucaucaacgaccagcugaucaugaagaaccaccuccgggacaucaugggcauccccuacugcaacuacuccaaguacugguaccugaaccacaccgucacggggaagaccagccugccccgcugcuggcugguguccaacggcagcuaccucaacgagacccacuucuccgacgacaucgagcagcaggccgacaacaugaucaccgagcugcugcagaaggaguacauggaccggcagggcaagacgccgcucgggcugguggaccuguucgucuucagcaccuccuucuaccugaucagcaucuuccuccaccugaucaagauccccacccaccgccacaucaccggcaagcccugccccaagccgcaccggcugaaccacauggggaucugcuccugcggccucuacaagcaccccggggugcccgugaaguggaagcgcugaggacuaguuauaagacugacuagcccgaugggccucccaacgggcccuccuccccuccuugcaccgagauuaaucaaaggcucuuuucagagccaccaaaaaaaaaaaaaaaaaaaaaaaaaaaaaaaaaaaaaaaaaaaaaaaaaaaaaaaaaaaaaaaaaaaaaaaaaaaaaaaaaaaaaaaaaaaaaaaaaaaaa

SEQ ID NO: 24440 - RNA, 1686 nt, Artificial Sequence
  mRNA product Design i-3 (hSL-A100) comprising derived and/or modified sequence from LASV(LASV253-NIG-2011;Clade II)__AIT17670__GPCmut2 (opt1)
aggagaaagcuuaccaugggccagaucaucaccuucuuccaggaggugccccacgucaucgaggaggugaugaacaucgugcugaucgcccucagccugcuggccauccucaaggggaucuacaacgucgcgaccugcggccuguucgggcugguguccuuccuccugcugugcggccgcagcugcuccacgaccuacaaggggguguacgagcuccagacccuggagcuggacauggccagccucaacaugugcaugccgcuguccugcaccaagaacaacagccaccacuacaucauggucggcaacgagacgggccuggagcucacccugaccaacaccuccaucaucaaccacaaguucugcaaccugagcgacgcccacaagaagaaccucuacgaccacgcccugauguccaucaucagcacguuccaccuguccauccccaacuucaaccaguacgaggccaugagcugcgacuucaacgggggcaagaucuccgugcaguacaaccucagccacaccuacgcgguggacgccgccaaccacugcgggaccaucgccaacggcguccugcagaccuucaugcggauggcguggggcggguccuacaucgcccuggacagcggcaagggguccugggacugcaucaugacgagcuaccaguaccucaucauccagaacaccaccugggaggaccacugccaguucucccgccccagccccaucggcuaccuggggcugcucagccagcggacccgcgacaucuacaucucccggcgccggcgcggcacguucaccuggacccugagcgacuccgagggcaacgagacccccgggggcuacugccugacgcgguggaugcucaucgaggccgagcugaagugcuucgggaacaccgccguggccaagugcaacgagaagcacgacgaggaguucugcgacaugcugcgccucuucgacuucugcaagcaggcgauccggcgccugaaggccccggcccagaugagcauccagcugaucaacaaggccgugaacgcccucaucaacgaccagcugaucaugaagaaccaccuccgggacaucaugggcauccccuacugcaacuacuccaaguacugguaccugaaccacaccgucaccgggcgcacgagccugccccggugcuggcugguguccaacggcagcuaccucaacgagacccacuucuccgacgacaucgagcagcaggcggacaacaugaucaccgagcugcugcagaaggaguacaucgaccgccagggcaagaccccgcucgggcugguggaccuguucgucuucagcacguccuucuaccugaucagcaucuuccuccaccuggugaagauccccacccaccggcacaucaucggcaagcccugccccaagccgcaccgccugaaccacauggggaucugcuccugcggccucuacaagcaccccggggugcccgucaaguggaagcggugaggacuaguuauaagacugacuagcccgaugggccucccaacgggcccuccuccccuccuugcaccgagauuaaucaaaggcucuuuucagagccaccaaaaaaaaaaaaaaaaaaaaaaaaaaaaaaaaaaaaaaaaaaaaaaaaaaaaaaaaaaaaaaaaaaaaaaaaaaaaaaaaaaaaaaaaaaaaaaaaaaaaa

SEQ ID NO: 24441 - RNA, 1686 nt, Artificial Sequence
  mRNA product Design i-3 (hSL-A100) comprising derived and/or modified sequence from LASV(LASV254-NIG-2011;Clade II)__AIT17674__GPCmut2 (opt1)
aggagaaagcuuaccaugggccagaucaucaccuucuuccaggaggugccccacgucaucgaggaggugaugaacaucgugcugaucgcccucagccugcuggccauccucaaggggaucuacaacgucgcgaccugcggccuguucgggcugguguccuuccuccugcugugcggccgcagcugcuccacgaccuacaaggggguguacgagcuccagacccuggagcuggacaugaccaaccucaacaugugcaugccgcugagcugcacgaagaacaacucccaccacuacaucauggucggcaacgagaccggccuggagcucacccugaccaacacgagcaucaucaaccacaaguucugcaaccuguccgacgcccacaagaagaaccucuacaaccacgcccugaugagcaucaucuccaccuuccaccugagcauccccaacuucaaccaguacgaggccauguccugcgacuucaacgggggcaagaucagcgugcaguacaaccucucccacagcuacgccguggacgcggccaaccacugcgggaccaucgccaacggcguccugcagaccuucaugcggauggccuggggcggguccuacaucgcgcuggacagcggcaaggggaacugggacugcaucaugacguccuaccaguaccucaucauccagaacaccaccugggaggaccacugccaguucagccgccccucccccaucggcuaccuggggcugcucagccagcggacccgcgacaucuacaucagccggcgccggcgcggcacguucaccuggacccuguccgacagcgagggcaacgagacccccgggggcuacugccugacgcgguggaugcucaucgaggccgagcugaagugcuucgggaacaccgccguggccaagugcaacgagaagcacgacgaggaguucugcgacaugcugcgccucuucgacuucugcaagcaggccauccggcgccugaagaccccggcgcaggccaacauccagcugaucaacaaggccgugaacgcccucaucaacgaccagcugaucaugaagaaccaccuccgggacaucaugggcauccccuacugcaacuacuccaaguacugguaccugaaccacaccgucacggggaagaccagccugccccgcugcuggcugguguccaacggcagcuaccucaacgagacccacuucuccgacgacaucgagcagcaggccgacaacaugaucaccgagcugcugcagaaggaguacauggaccggcagggcaagacgccgcucgggcugguggaccuguucgucuucagcaccuccuucuaccugaucagcaucuuccuccaccuggugaagauccccacccaccgccacgugaucggcaagcccugccccaagccgcaccggcugaaccacauggggaucugcuccugcggccucuacaagcaccccgggguccccgugaaguggaagcgcugaggacuaguuauaagacugacuagcccgaugggccucccaacgggcccuccuccccuccuugcaccgagauuaaucaaaggcucuuuucagagccaccaaaaaaaaaaaaaaaaaaaaaaaaaaaaaaaaaaaaaaaaaaaaaaaaaaaaaaaaaaaaaaaaaaaaaaaaaaaaaaaaaaaaaaaaaaaaaaaaaaaaa

SEQ ID NO: 24442 - RNA, 1686 nt, Artificial Sequence
  mRNA product Design i-3 (hSL-A100) comprising derived and/or modified sequence from LASV(Nig08-A19;Clade III)__ADU56618__GPCmut2 (opt1)
aggagaaagcuuaccaugggccagaucgugaccuucuuccaggaggucccccacgugaucgaggaggugaugaacaucguccugaucgcccucagcauccuggccauccugaaggggcucuacaacaucgcgaccugcggccugaucgggcuggugacguuccuccugcuguccggccgcagcugcuccaugaccuacaaggggguguacgagcuccagacccuggagcugaacaugaacacccucaacaugugcaugccgcugagcugcacgaagaacaacucccaccacuacaucauggucggcaacgagaccggccuggagcucacccugaccaacacgagccugcuccaccacaaguucugcaaccuguccgacgcccacaagaagaaccuguacgaccacacccucaugagcaucaucuccaccuuccaccugagcauccccaacuucaaccaguacgaggccauguccugcgacuucaacgggggcaagaucaccgugcaguacaaccugagccacuccuacgccaucgacgccgcgaaccacugcgggacgguggccaacggcguccuccagaccuucaugcggauggccuggggcgggagcuacaucgcccuggacuccggccgcgggaagugggacugcaucaugaccagcuaccaguaccugaucauccagaacaccacgugggaggaccacugccaguucucccggcccagccccaucggcuaccucgggcugcugucccagcgcacccgggacaucuacaucagccgccggcgccggggcaccuucaccuggacgcucagcgacuccgagggcaacgagacccccgggggcuacugccugacccgcuggaugcugaucgaggcggagcucaagugcuucgggaacaccgccguggccaagugcaacgagaagcacgacgaggaguucugcgacaugcugcggcuguucgacuucugcaagcaggccauccgccggcucaaggccccggcgcagaugagcauccagcugaucaacaaggccgugaacgcccugaucaacgaccagcucaucaugaagaaccaccuccgcgacaucaugggcauccccuacugcaacuacuccaaguacugguaccugaaccacacgagcaccgggcggaccucccugccccgcugcuggcuggucagcaacggcuccuaccugaacgagacccacuucagcgacgacaucgagcagcaggccgacaacaugaucacggagaugcuccagaaggaguaccuggaccggcagggcaagaccccgcuggggcugguggaccucuucguguucuccaccagcuucuaccugaucuccaucuuccugcaccucgucaagauccccacccaccgccacaucgugggcaagcccugccccaagccgcaccggcugaaccacauggggaucugcagcugcggccuguacaagcagcccggggugcccguccgcuggaagcggugaggacuaguuauaagacugacuagcccgaugggccucccaacgggcccuccuccccuccuugcaccgagauuaaucaaaggcucuuuucagagccaccaaaaaaaaaaaaaaaaaaaaaaaaaaaaaaaaaaaaaaaaaaaaaaaaaaaaaaaaaaaaaaaaaaaaaaaaaaaaaaaaaaaaaaaaaaaaaaaaaaaaa

SEQ ID NO: 24443 - RNA, 1689 nt, Artificial Sequence
  mRNA product Design i-3 (hSL-A100) comprising derived and/or modified sequence from LASV(G1180-SLE-2010;Clade IV)__AIT17168__GPCmut2 (opt1)
aggagaaagcuuaccaugggccagaucgugaccuucuuccaggaggucccccacgugaucgaggaggugaugaacaucguccugaucgcccucagcauccuggccgugcugaaggggcucuacaacuucgcgaccugcggccugguggggcugcucacguuccugcugcucugcggccgcuccugcaccgccagccgguacaagggggucuacgagcugcagacccuggagcucaacauggagacccugaacaugugcaugccgcuguccugcacgaagaacaacagccaccacuacaucauggugggcaacgagaccggccucgagcugacccugaccaacacguccaucaucaaccacaaguucugcaaccucagcgacgcccacaagaagaaccuguacgaccacgcccugauguccaucaucagcaccuuccaccucuccauccccaacuucaaccaguacgaggccaugagcugcgacuucaacgggggcaagaucuccgugcaguacaaccugagccacuccuacgcgggggacgccgccaaccacugcggcaccgucgccaacggggugcugcagaccuucaugcgcauggcguggggcggcagcuacaucgcccucgacuccgggcacggcagcugggacugcaucaugacguccuaccaguaccugaucauccagaacaccaccugggaggaccacugccaguucagccggcccucccccaucggguaccugggccuccugagccagcgcacccgggacaucuacaucagccgccggcgccggggcacguucaccuggacccuguccgacagcgaggggaaggacaccccgggcggguacugccucacgcgcuggaugcugaucgaggccgagcugaagugcuucggcaacaccgccguggccaagugcaacgagaagcacgacgaggaguucugcgacaugcuccggcuguucgacuucugcaagcaggcgauccagcgccugaaggcccccgcccagauguccauccagcucaucaacaaggccgucaacgcccugaucaacgaccagcugaucaugaagaaccaccuccgggacaucauggggauccccuacugcaacuacagcaaguacugguaccugaaccacaccaccacgggcaagaccucccugcccaagugcuggcucgugagcaacggcuccuaccugaacgagacccacuucagcgacgacaucgagcagcaggcggacaacaugaucaccgagaugcugcagaaggaguacauggagcgccaggggaagacgccgcucggccugguggaccuguucgucuucuccaccagcuucuaccugaucuccaucuuccuccaccuggugaagauccccacccaccggcacaucgugggcaagagcugccccaagccccaccgccugaaccacauggggaucugcuccugcgggcucuacaagcagccgggcguccccgugaaguggaagcggugaggacuaguuauaagacugacuagcccgaugggccucccaacgggcccuccuccccuccuugcaccgagauuaaucaaaggcucuuuucagagccaccaaaaaaaaaaaaaaaaaaaaaaaaaaaaaaaaaaaaaaaaaaaaaaaaaaaaaaaaaaaaaaaaaaaaaaaaaaaaaaaaaaaaaaaaaaaaaaaaaaaaa

SEQ ID NO: 24444 - RNA, 1689 nt, Artificial Sequence
  mRNA product Design i-3 (hSL-A100) comprising derived and/or modified sequence from LASV(G1442-SLE-2011;Clade IV)__AIT17180__GPCmut2 (opt1)
aggagaaagcuuaccaugggccagaucgugaccuucuuccaggaggucccccacgugaucgaggaggugaugaacaucguccugaucgcccucagcauccuggccgugcugaaggggcucuacaacguggcgaccugcggccugaucgggcuggucacguuccuccugcugugcggccgcuccugcaccaccacccucuacaaggggguguacgagcugcagacgcuggagcucaacauggagacccugaacaugugcaugccgcugagcugcaccaagaacaacucccaccacuacauccgggugggcaacgagaccggccucgagcugacgcugaccaacaccagcaucaucaaccacaaguucugcaaccucuccgacgcccacaagaagaaccuguacgaccacgcccugaugagcaucaucuccaccuuccaccucagcauccccaacuucaaccaguacgaggccauguccugcgacuucaacgggggcaagaucagcguccaguacaaccugucccacagcuacgccggggacgcggccaaccacugcggcacgguggccaacggggugcugcagaccuucaugcgcauggccuggggcggcuccuacaucgcgcucgacagcgggcggggcaacugggacugcaucaugaccuccuaccaguaccugaucauccagaacaccacgugggacgaccacugccaguucagccgccccucccccaucggguaccugggccuccugagccagcggacccgcgacgucuacaucucccggcgccggcgcggcaccuucaccuggacgcugagcgacagcgaggggaaggacaccccgggcggguacugccucacccgguggaugcugaucgaggccgagcugaagugcuucggcaacaccgccguggccaagugcaacgagaagcacgacgaggaguucugcgacaugcuccgccuguucgacuucugcaagcaggccauccagcggcugaaggcgcccgcccagauguccauccagcucaucaacaaggccgugaacgcccugaucaacgaccagcugaucaugaagaaccaccuccgcgacaucauggggauccccuacugcaacuacagcaaguacugguaccugaacaacacggccaccggcaagaccucccugcccaagugcuggcucaucagcaacggcuccuaccugaacgagacccacuucagcgacgacaucgagcaggaggcggacaacaugaucacggagaugcugcagaaggaguacauggagcggcaggggaagaccccgcucggccuggucgaccuguucguguucuccaccagcuucuaccugaucuccaucuuccuccaccuggugaagauccccacccaccgccacaucgucggcaagagcugccccaagccccaccggcugaaccacauggggaucugcuccugcgggcucuacaagcagccgggcgugcccgugcgcuggaagcggugaggacuaguuauaagacugacuagcccgaugggccucccaacgggcccuccuccccuccuugcaccgagauuaaucaaaggcucuuuucagagccaccaaaaaaaaaaaaaaaaaaaaaaaaaaaaaaaaaaaaaaaaaaaaaaaaaaaaaaaaaaaaaaaaaaaaaaaaaaaaaaaaaaaaaaaaaaaaaaaaaaaaa

SEQ ID NO: 24445 - RNA, 1689 nt, Artificial Sequence
  mRNA product Design i-3 (hSL-A100) comprising derived and/or modified sequence from LASV(G3010-SLE-2013;Clade IV)__AIT17344__GPCmut2 (opt1)
aggagaaagcuuaccaugggccagaucgugaccuucuuccaggaggucccccacgugaucgaggaggugaugaacaucguccugaucgcccucagcauccuggccgugcugaaggggcucuacaacuucgcgaccugcggccugguggggcuggucacguuccuccugcugugcggccgcuccugcaccaccagccucuacaaggggguguacgagcugcagacccuggagcucaacauggagacgcugaacaugugcaugccgcuguccugcaccaagaacaacagccaccacuacaucauggugggcaacgagaccggccucgagcugacccugacgaacaccuccaucaucaaccacaaguucugcaaccucagcgacgcccacaagaagaaccuguacaaccacgcccugauguccaucaucagcaccuuccaccucuccauccccaacuucaaccaguacgaggccaugagcugcgacuucaacgggggcaagaucuccguccaguacaaccugagccacuccuacgccggggacgcggccagccacugcggcaccguggccaacggggugcugcagacguucaugcggauggccuggggcggcuccuacaucgcgcucgacagcggguacggcaagugggacugcaucaugaccuccuaccaguaccugaucauccagaacaccaccugggaggaccacugccaguucagccgccccucccccaucggguaccugggccuccugagccagcggacgcgcgacaucuacaucagccggcgccggcgcggcaccuucaccuggacccuguccgacagcgaggggaaggacacgccgggcggguacugccucacccgguggaugcugaucgaggccgagcugaagugcuucggcaacaccgccgucgccaagugcaacgagaagcacgacgaggaguucugcgacaugcuccgccuguucgacuucugcaagcaggccauccagcggcugaagacccccgcgcagauguccauccagcucaucaacaaggccgugaacgcccugaucaacgaccagcugaucaugaagaaccaccuccgcgacaucauggggauccccuacugcaacuacagcaaguacugguaccugaaccacacgaccaccggcaagaccucccugcccaagugcuggcucgugagcaacggcuccuaccugaacgagacgcacuucagcgacgacaucgagcagcaggccgacaacaugaucaccgagaugcugcagaaggaguacauggagcggcaggggaagaccccgcucggccuggucgaccuguucguguucuccaccagcuucuaccugaucuccaucuuccuccaccuggugaagauccccacgcaccgccacaucgucggcaagagcugccccaagccccaccggcugaaccacauggggaucugcuccugcgggcucuacaagcagccgggcgugcccgugcgcuggaagcggugaggacuaguuauaagacugacuagcccgaugggccucccaacgggcccuccuccccuccuugcaccgagauuaaucaaaggcucuuuucagagccaccaaaaaaaaaaaaaaaaaaaaaaaaaaaaaaaaaaaaaaaaaaaaaaaaaaaaaaaaaaaaaaaaaaaaaaaaaaaaaaaaaaaaaaaaaaaaaaaaaaaaa

SEQ ID NO: 24446 - RNA, 1689 nt, Artificial Sequence
  mRNA product Design i-3 (hSL-A100) comprising derived and/or modified sequence from LASV(G502-SLE-2009;Clade IV)__AIT17126__GPCmut2 (opt1)
aggagaaagcuuaccaugggccagaucgugaccuucuuccaggaggucccccacgugaucgaggaggugaugaacaucguccugaucgcccucagcauccuggccgugcugaaggggcucuacaacuucgcgaccugcggccugguggggcugcucacguuccugcugcucugcggccgcuccugcaccaccgggcuguacaagggcgucuacgagcugcagacccucgagcugaacauggagacgcugaacaugugcaugccgcucagcugcaccaagaacaacucccaccacuacaucauggugggcaacgagaccgggcuggagcugacccucacgaacaccagcaucaucaaccacaaguucugcaaccuguccgacgcccacaagaagaaccuguacgaccacgcccucaugagcaucaucuccaccuuccaccugagcauccccaacuucaaccaguacgaggccauguccugcgacuucaacggcgggaagaucagcgugcaguacaaccugucccacagcuacgccggcgacgcggccgaccacugcgggaccgucgccaacggcgugcuccagacguucaugcggauggccuggggcggguccuacaucgcgcuggacagcggccgcgggcggugggacugcaucaugaccuccuaccaguaccugaucauccagaacaccaccugggaggaccacugccaguucagccgccccucccccaucggcuaccucggccugcugagccagcggacgcgcgacaucuacaucucccggcgccggcgcgggaccuucaccuggacccucagcgacagcgagggcaaggacacgcccgggggcuacugccugacccgguggaugcugaucgaggccgagcucaagugcuucgggaacaccgccguggccaagugcaacgagaagcacgacgaggaguucugcgacaugcugcgccuguucgacuucugcaagcaggccauccagcggcucaaggcgccggcccagauguccauccagcugaucaacaaggccgucaacgcccugaucaacgaccagcucgugaugaagaaccaccuccgcgacaucaugggcauccccuacugcaacuacagccgguacugguaccugaaccacaccacgaccggccgcaccucccugcccaagugcuggcuggugagcaacggguccuaccugaacgagacccacuucagcgacgacaucgagcagcaggccgacaacaugaucacggagaugcuccagaaggaguacauggagcggcagggcaagaccccgcuggggcuggucgaccuguucguguucuccaccagcuucuaccucaucuccaucuuccugcaccuggugaagauccccacccaccgccacaucgucggcaagagcugccccaagccccaccggcucaaccacauggggaucugcuccugcggccuguacaagcagccgggcgugcccgugaaguggaagcgcugaggacuaguuauaagacugacuagcccgaugggccucccaacgggcccuccuccccuccuugcaccgagauuaaucaaaggcucuuuucagagccaccaaaaaaaaaaaaaaaaaaaaaaaaaaaaaaaaaaaaaaaaaaaaaaaaaaaaaaaaaaaaaaaaaaaaaaaaaaaaaaaaaaaaaaaaaaaaaaaaaaaaa

SEQ ID NO: 24447 - RNA, 1689 nt, Artificial Sequence
  mRNA product Design i-3 (hSL-A100) comprising derived and/or modified sequence from LASV(G733-SLE-2010;Clade IV)__AIT17154__GPCmut2 (opt1)
aggagaaagcuuaccaugggccagaucgugaccuucuuccaggaggucccccacgugaucgaggaggugaugaacaucguccugaucgcccucagcauccuggccgugcugaaggggcucuacaacuucgcgaccugcggcaucguggggcuggucuccuuccugcuccugugcggccgcagcugcacgaccucccuguacaaggggguguacgagcuccagacccuggagcugaacauggagacccucaacaugugcaugccgcugagcugcacgaagaacaacucccaccacuacaucauggugggcaacgagaccggccuggagcucacccugaccaacacgagcaucaucaaccacaaguucugcaaccuguccgacgcccacaagaagaaccucuacgaccacgcccugaugagcaucaucuccaccuuccaccugagcauccccaacuucaaccaguacgaggccauguccugcgacuucaacgggggcaagaucagcguccaguacaaccucucccacagcuacgccggggacgcggccaaccacugcggcaccaucgccaacggggugcugcagaccuucaugcggauggccuggggcggcuccuacaucgcgcuggacagcgggcgcgaccggugggacugcaucaugacguccuaccaguaccucaucauccagaacaccaccugggaggaccacugccaguucagccgccccucccccaucggcuaccuggggcugcucagccagcggacccgcgacaucuacaucagccggcgccggcgcggcacguucaccuggacccuguccgacagcgagggcaaggacacccccgggggcuacugccugacgcgguggaugcucaucgaggccgagcugaagugcuucgggaacaccgccguggccaagugcaacgagaagcacgacgaggaguucugcgacaugcugcgccucuucgacuucugcaagcaggccauccagcggcugaaggcgccggcccagauguccauccagcugaucaacaaggccgucaacgcccucaucaacgaccagcugaucaugaagaaccaccuccgcgacaucaugggcauccccuacugcaacuacagcaaguacugguaccugaaccacaccaccacggggaagaccucccugcccaagugcuggcuggugagcaacggcuccuaccucaacgagacccacuucagcgacgacaucgagcagcaggccgacaacaugaucaccgagaugcugcagaaggaguacauggagcggcagggcaagacgccgcuggggcucguggaccuguucgucuucuccaccagcuucuaccugaucuccaucuuccugcaccucgugaagauccccacccaccgccacguggucggcaagagcugccccaagccccaccggcugaaccacauggggaucugcuccugcggccuguacgggcagccgggcgugcccgugaaguggaagcgcugaggacuaguuauaagacugacuagcccgaugggccucccaacgggcccuccuccccuccuugcaccgagauuaaucaaaggcucuuuucagagccaccaaaaaaaaaaaaaaaaaaaaaaaaaaaaaaaaaaaaaaaaaaaaaaaaaaaaaaaaaaaaaaaaaaaaaaaaaaaaaaaaaaaaaaaaaaaaaaaaaaaaa

SEQ ID NO: 24448 - RNA, 1689 nt, Artificial Sequence
  mRNA product Design i-3 (hSL-A100) comprising derived and/or modified sequence from MOPV/LASV reassortant(IGS-1;Clade IV)__AFY05576__GPCmut2 (opt1)
aggagaaagcuuaccaugggccagaucgugaccuucuuccaggaggucccccacgugaucgaggaggugaugaacaucguccugaucgcccucagcgugcuggccgugcugaaggggcucuacaacuucgcgaccugcggccuggucgggcuggugacguuccuccugcugugcggccgcuccugcaccaccagccucuacaaggggguguacgagcugcagacccuggagcucaacauggagacgcugaacaugugcaugccgcuguccugcaccaagaacaacagccaccacuacaucauggucggcaacgagaccggccucgagcugacccugacgaacaccuccaucaucaaccacaaguucugcaaccucagcgacgcccacaagaagaaccuguacgaccacgcccugauguccaucaucagcaccuuccaccucuccauccccaacuucaaccaguacgaggccaugagcugcgacuucaacgggggcaagaucuccgugcaguacaaccugagccacuccuacgccggggacgcggccaaccacugcggcaccguggccaacgggguccugcagacguucaugcggauggccuggggcggcagcuacaucgcgcucgacuccgggcgcggcaacugggacugcaucaugaccagcuaccaguaccugaucauccagaacaccaccugggaggaccacugccaguucucccggcccagccccaucggguaccugggccuccugucccagcgcacgcgggacaucuacaucagccgccggcgccggggcaccuucaccuggacccugagcgacuccgagggggaggacacgccgggcggguacugccucacccgcuggaugcugaucgaggccgagcugaagugcuucggcaacaccgccguggccaagugcaacgagaagcacgacgaggaguucugcgacaugcuccggcuguucgacuucugcaagcaggccauccagcgccugaaggcgcccgcccagaugagcauccagcucaucaacaaggccgugaacgcccugaucaacgaccagcugaucaugaagaaccaccuccgggacaucauggggauccccuacugcaacuacuccaaguacugguaccugaaccacaccacgaccggccgcaccagccugcccaagugcuggcucgucuccaacggcagcuaccugaacgagacccacuucuccgacgacaucgagcagcaggccgacaacaugaucacggagaugcugcagaaggaguacauggagcggcaggggaagaccccgcucggccugguggaccuguucguguucagcaccuccuucuaccugaucagcaucuuccuccaccuggucaagauccccacccaccgccacaucguggggaaguccugccccaagccccaccggcugaaccacaugggcaucugcagcugcgggcucuacaagcagccgggcgugcccgucaaguggaagcgcugaggacuaguuauaagacugacuagcccgaugggccucccaacgggcccuccuccccuccuugcaccgagauuaaucaaaggcucuuuucagagccaccaaaaaaaaaaaaaaaaaaaaaaaaaaaaaaaaaaaaaaaaaaaaaaaaaaaaaaaaaaaaaaaaaaaaaaaaaaaaaaaaaaaaaaaaaaaaaaaaaaaaa

SEQ ID NO: 24449 - RNA, 1689 nt, Artificial Sequence
  mRNA product Design i-3 (hSL-A100) comprising derived and/or modified sequence from LASV(LM765-SLE-2012;Clade IV)__AIT17814__GPCmut2 (opt1)
aggagaaagcuuaccaugggccagaucgugaccuucuuccaggaggucccccacgugaucgaggaggugaugaacaucguccugaucgcccucagcauccuggccgugcugaaggggcucuacaacuucgcgaccugcggccugguggggcuggucacguuccuccugcugugcggccgcuccugcaccaccagccucuacaaggggguguacgagcugcagacccuggagcucaacauggagacgcugaacaugugcaugccgcuguccugcaccaagaacaacagccaccacuacaucauggugggcaacgagaccggccucgagcugacccugacgaacaccuccaucaucgaccacaaguucugcaaccucagcgacgcccaccggaagaaccuguacgaccacgcccugauguccaucaucagcaccuuccaccucuccauccccaacuucaaccaguacgaggccaugagcugcgacuucaacgggggcaagaucuccguccaguacaaccugagccacuccuacgccaaggacgcggccgaccacugcgggaccguggccaacggcgugcugcagacguucaugcgcauggccuggggcgggagcuacaucgcgcucgacuccggccgggggcgcugggacugcaucaugaccagcuaccaguaccugaucauccagaacaccaccugggaggaccacugccaguucucccggcccagccccaucggcuaccuggggcuccugucccagcgcacgcgggacaucuacaucagccgccggcgccggggcaccuucaccuggacccugagcgacuccgagggcaaggacacgcccgggggcuacugccucacccgcuggaugcugaucgaggccgagcugaagugcuucgggaacaccgccgucgccaagugcaacgagaagcacgacgaggaguucugcgacaugcuccggcuguucgacuucugcaagcaggccauccagcgccugaaggcgccggcccagaugagcauccagcucaucaacaaggccgugaacgcccugaucaacgaccagcugaucaugaagaaccaccuccgggacaucaugggcauccccuacugcaacuacuccaaguacugguaccugaaccacaccacgaccgggaagaccagccugcccaagugcuggcucguguccaacggcagcuaccugaacgagacccacuucuccgacgacaucgagcagcaggccgacaacaugaucacggagaugcugcagaaggaguacauggagcgccagggcaagaccccgcucgggcuggucgaccuguucguguucagcaccuccuucuaccugaucagcaucuuccuccaccuggugaagauccccacccaccggcacaucgucggcaagcccugccccaagccgcaccgccugaaccacauggggaucugcuccugcggccucuacaagcagcccggggugcccgugaaguggaagcggugaggacuaguuauaagacugacuagcccgaugggccucccaacgggcccuccuccccuccuugcaccgagauuaaucaaaggcucuuuucagagccaccaaaaaaaaaaaaaaaaaaaaaaaaaaaaaaaaaaaaaaaaaaaaaaaaaaaaaaaaaaaaaaaaaaaaaaaaaaaaaaaaaaaaaaaaaaaaaaaaaaaaa

SEQ ID NO: 24450 - RNA, 1689 nt, Artificial Sequence
  mRNA product Design i-3 (hSL-A100) comprising derived and/or modified sequence from LASV(LM776-SLE-2012;Clade IV)__AIT17824__GPCmut2 (opt1)
aggagaaagcuuaccaugggccagaucgugaccuucuuccaggaggucccccacgugaucgaggaggugaugaacaucguccugaucgcccucagcauccuggccgugcugaaggggcucuacaacuucgcgaccugcggccugguggggcuggucacguuccuccugcugugcggccgcuccugcaccaccagcguguacaaggggguguacgagcuccagacccuggagcugaacauggagacgcucaacaugugcaugccgcuguccugcaccaagaacaacagccaccacuacaucauggucggcaacgagaccggccuggagcucacccugacgaacaccuccaucaucaaccacaaguucugcaaccugagcgacgcccacaagaagaaccucuacgaccacgcccugauguccaucaucagcaccuuccaccuguccauccccaacuucaaccaguacgaggccaugagcugcgacuucaacgggggcaagaucuccgugcaguacaaccucagccacuccuacgccggggacgcggccaaccacugcggcaccguggccaacgggguccugcagacguucaugcggauggccuggggcggcagcuacaucgcgcuggacuccgggcacggcaagugggacugcaucaugaccagcuaccaguaccucaucauccagaacaccaccugggaggaccacugccaguucucccgccccagccccaucggguaccugggccugcucucccagcggacgcgcgacaucuacaucagccggcgccggcgcggcaccuucaccuggacccugagcgacuccgaggggaaggacacgccgggcggguacugccugacccgguggaugcucaucgaggccgagcugaagugcuucggcaacaccgccguggccaagugcaacgagaagcacgacgaggaguucugcgacaugcugcgccucuucgacuucugcaagcaggccauccagcggcugaaggcgcccgcccagaugagcauccagcugaucaacaaggccgugaacgcccucaucaacgaccagcugaucaugaagaaccaccuccgcgacaucauggggauccccuacugcaacuacuccaaguacugguaccugaaccacaccacgaccggcaagaccagccugcccaagugcuggcuggucuccaacggcagcuaccucaacgagacccacuucuccgacgacaucgagcagcaggccgacaacaugaucacggagaugcugcagaaggaguacauggagcggcaggggaagaccccgcugggccucguggaccuguucguguucagcaccuccuucuaccugaucagcaucuuccugcaccucgucaagauccccacccaccgccacaucguggggaaguccugccccaagccccaccggcugaaccacaugggcaucugcagcugcgggcuguacaagcagccgggcgugcccguccgcuggaagcggugaggacuaguuauaagacugacuagcccgaugggccucccaacgggcccuccuccccuccuugcaccgagauuaaucaaaggcucuuuucagagccaccaaaaaaaaaaaaaaaaaaaaaaaaaaaaaaaaaaaaaaaaaaaaaaaaaaaaaaaaaaaaaaaaaaaaaaaaaaaaaaaaaaaaaaaaaaaaaaaaaaaaa

SEQ ID NO: 24451 - RNA, 1689 nt, Artificial Sequence
  mRNA product Design i-3 (hSL-A100) comprising derived and/or modified sequence from LASV(Mad39;Clade IV)__ANH09722__GPCmut2 (opt1)
aggagaaagcuuaccaugggccagaucgugaccuucuuccaggaggucccccacgugaucgaggaggugaugaacaucguccugaucgcccucagcauccuggccgugcugaaggggcucuacaacguggcgaccugcggccugaucgggcuggucacguuccuccugcugugcggccgcuccugcaccaccacccucuacaaggggguguacgagcugcaggcccuggagcucaacauggagacgcugaacaugugcaugccgcugagcugcaccaagaacaacucccaccacuacauccgggugggcaacgagaccggccucgagcugacccugacgaacaccagccucaucaaccacaaguucugcaaccuguccgacgcccacaagaagaaccuguacgaccacgcccucaugagcaucaucuccaccuuccaccugagcauccccaacuucaaccaguacgaggccauguccugcgacuucaacgacgggaagaucagcguccaguacaaccugucccacaccuacgcgggcgacacggccaaccacugcgggaccguggccaacggcgugcuccagaccuucaugcgcauggccuggggcgggagcuacaucgcgcuggacuccggccgcgggggcugggacugcaucaugaccagcuaccaguaccugaucauccagaacacgaccugggaggaccacugccaguucucccggcccagccccaucggguaccucggccugcugucccagcggacccgcgacaucuacaucagccggcgccggcgcggcaccuucacguggacccucuccgacagcgaggggaaggacaccccgggcggguacugccugacccgguggaugcugaucgaggccgagcucaagugcuucggcaacacggccgucgccaagugcaacgagaagcacgacgaggaguucugcgacaugcugcgccuguucgacuucugcaagcaggccauccagcggcucaaggcgcccgcccagaugagcauccagcugaucaacaaggccgugaacgcccugaucaacgaccagcucaucaugaagaaccaccuccgcgacaucauggggauccccuacugcaacuacuccaaguacugguaccugaaccacaccgugaccggcaagaccagccugcccaagugcuggcuggucuccaacggcagcuaccugaacgagacgcacuucuccgacgacaucgagcagcaggccgacaacaugaucaccgagaugcuccagaaggaguacauggagcggcaggggaagaccccgcugggccugguggaccuguucguguucagcaccuccuucuaccucaucagcaucuuccugcaccuggucaagauccccacgcaccgccacgugguggggaagcccugccccaagccgcaccggcucaaccacaugggcaucugcuccugcggguucuacaagcagcccggcguccccgugcgcuggaagcggugaggacuaguuauaagacugacuagcccgaugggccucccaacgggcccuccuccccuccuugcaccgagauuaaucaaaggcucuuuucagagccaccaaaaaaaaaaaaaaaaaaaaaaaaaaaaaaaaaaaaaaaaaaaaaaaaaaaaaaaaaaaaaaaaaaaaaaaaaaaaaaaaaaaaaaaaaaaaaaaaaaaaa

SEQ ID NO: 24452 - RNA, 1689 nt, Artificial Sequence
  mRNA product Design i-3 (hSL-A100) comprising derived and/or modified sequence from LASV(Z0947-SLE-2011;Clade IV)__AIT17840__GPCmut2 (opt1)
aggagaaagcuuaccaugggccagaucgugaccuucuuccaggaggucccccacgugaucgaggaggugaugaacaucguccugaucgcccucagcauccuggccgugcugaaggggcucuacaacuucgcgaccugcggccugguggggcuggucacguuccuccugcugugcggccgcuccugcaccaucagccucuacaaggggguguacgagcugcagacccuggagcucaacauggagacccugaacaugugcaugccgcuguccugcacgaagaacaacagccaccacuacaucauggugggcaacgagaccggccucgagcugacccugaccaacacguccaucaucaaccacaaguucugcaaccucagcgacgcccacaagaagaaccuguacgaccacgcccugauguccaucaucagcaccuuccaccucuccauccccaacuucaaccaguacgaggccaugagcugcgacuucaacgggggcaagaucuccguccaguacaaccugagccacuccuacgccggggacgcggccaaccacugcggcaccguggccaacggggugcugcagaccuucaugcggauggccuggggcggcagcuacaucgcgcucgacuccgggcgcgaccggugggacugcaucaugacgagcuaccaguaccugaucauccagaacaccaccugggaggaccacugccaguucucccgccccagccccaucggcuaccuggggcuccugucccagcggacccgcgacaucuacaucagccggcgccggcgcggcacguucaccuggacccugagcgacuccgagggcaaggacacccccgggggcuacugccucacgcgguggaugcugaucgaggccgagcugaagugcuucgggaacaccgccgucgccaagugcaacgagaagcacgacgaggaguucugcgacaugcuccgccuguucgacuucugcaagcaggccauccagcggcugaaggcgccggcccagaugagcauccagcucaucaacaaggccgugaacgcccugaucaacgaccagcugaucaugaagaaccaccuccgcgacaucaugggcauccccuacugcaacuacuccaaguacugguaccugaaccacaccaccacggggaagaccagccugcccaagugcuggcucguguccaacggcagcuaccugaacgagacccacuucuccgacgacaucgagcagcaggccgacaacaugaucaccgagaugcugcagaaggaguacauggagcggcagggcaagacgccgcucgggcuggucgaccuguucguguucagcaccuccuucuaccugaucagcaucuuccuccaccuggugaagauccccacccaccgccacaucgucggcaagcccugccccaagccgcaccggcugaaccacauggggaucugcuccugcggccucuacaagcagcccggggugcccgugaaguggaagcgcugaggacuaguuauaagacugacuagcccgaugggccucccaacgggcccuccuccccuccuugcaccgagauuaaucaaaggcucuuuucagagccaccaaaaaaaaaaaaaaaaaaaaaaaaaaaaaaaaaaaaaaaaaaaaaaaaaaaaaaaaaaaaaaaaaaaaaaaaaaaaaaaaaaaaaaaaaaaaaaaaaaaaa

SEQ ID NO: 24453 - RNA, 1689 nt, Artificial Sequence
  mRNA product Design i-3 (hSL-A100) comprising derived and/or modified sequence from LASV(Josiah;Clade IV)__NP_694870__GPCmut2 (opt4)
aggagaaagcuuaccaugggccagaucgugaccuucuuccaggaggugccccacgugaucgaggaggugaugaacaucgugcugaucgcccugagcgugcuggccgugcugaagggccuguacaacuucgccaccugcggccuggugggccuggugaccuuccugcugcugugcggcagaagcugcaccaccagccuguacaagggcguguacgagcugcagacccuggagcugaacauggagacccugaacaugugcaugccccugagcugcaccaagaacaacagccaccacuacaucauggugggcaacgagaccggccuggagcugacccugaccaacaccagcaucaucaaccacaaguucugcaaccugagcgacgcccacaagaagaaccuguacgaccacgcccugaugagcaucaucagcaccuuccaccugagcauccccaacuucaaccaguacgaggccaugagcugcgacuucaacggcggcaagaucagcgugcaguacaaccugagccacagcuacgccggcgacgccgccaaccacugcggcaccguggccaacggcgugcugcagaccuucaugagaauggccuggggcggcagcuacaucgcccuggacagcggcagaggcaacugggacugcaucaugaccagcuaccaguaccugaucauccagaacaccaccugggaggaccacugccaguucagcagacccagccccaucggcuaccugggccugcugagccagagaaccagagacaucuacaucagcagaagaagaagaggcaccuucaccuggacccugagcgacagcgagggcaaggacacccccggcggcuacugccugaccagauggaugcugaucgaggccgagcugaagugcuucggcaacaccgccguggccaagugcaacgagaagcacgacgaggaguucugcgacaugcugagacuguucgacuucugcaagcaggccauccagagacugaaggcccccgcccagaugagcauccagcugaucaacaaggccgugaacgcccugaucaacgaccagcugaucaugaagaaccaccugagagacaucaugggcauccccuacugcaacuacagcaaguacugguaccugaaccacaccaccaccggcagaaccagccugcccaagugcuggcuggugagcaacggcagcuaccugaacgagacccacuucagcgacgacaucgagcagcaggccgacaacaugaucaccgagaugcugcagaaggaguacauggagagacagggcaagaccccccugggccugguggaccuguucguguucagcaccagcuucuaccugaucagcaucuuccugcaccuggugaagauccccacccacagacacaucgugggcaagagcugccccaagccccacagacugaaccacaugggcaucugcagcugcggccuguacaagcagcccggcgugcccgugaaguggaagagaugaggacuaguuauaagacugacuagcccgaugggccucccaacgggcccuccuccccuccuugcaccgagauuaaucaaaggcucuuuucagagccaccaaaaaaaaaaaaaaaaaaaaaaaaaaaaaaaaaaaaaaaaaaaaaaaaaaaaaaaaaaaaaaaaaaaaaaaaaaaaaaaaaaaaaaaaaaaaaaaaaaaaa

SEQ ID NO: 24454 - RNA, 1686 nt, Artificial Sequence
  mRNA product Design i-3 (hSL-A100) comprising derived and/or modified sequence from LASV(LP;Clade I)__AAF86701__GPCmut2 (opt4)
aggagaaagcuuaccaugggccagaucaucaccuucuuccaggaggugccccacgugaucgaggaggugaugaacaucgugcugaucgcccugagccugcuggccauccugaagggccuguacaacaucgccaccugcggcaucaucggccugguggccuuccuguuccugugcggcaagagcugcagccugacccugaagggcggcuacgagcugcagacccuggagcugaacauggagacccugaacaugugcaugccccugagcugcaccaagaacagcagccaccacuacaucagagugggcaacgagaccggccuggagcugacccugaccaacaccagcaucaucaaccacaaguucugcaaccugagcgacgcccacaagaagaaccuguacgaccacgcccugaugagcaucaucagcaccuuccaccugagcauccccaacuucaaccaguacgaggccaugagcugcgacuucaacggcggcaagaucagcgugcaguacaaccugagccacagcuacgccggcgacgccgccgagcacugcggcaccguggccaacggcgugcugcagaccuucaugagaauggccuggggcggcagauacaucgcccuggacagcggcaagggcaacugggacugcaucaugaccagcuaccaguaccugaucauccagaacaccaccugggaggaccacugccaguucagcagacccagccccaucggcuaccugggccugcugagccagagaaccagagacaucuacaucagcagaagaagaagaggcaccuucaccuggacccugagcgacagcgagggcaacgagacccccggcggcuacugccugaccagauggaugcugaucgaggccgagcugaagugcuucggcaacaccgccguggccaagugcaacgagaagcacgacgaggaguucugcgacaugcugagacuguucgacuucugcaagcaggccaucagaagacugaaggcccccgcccagaugagcauccagcugaucaacaaggccgugaacgcccugaucaacgaccagcugaucaugaagaaccaccugagagacaucaugggcauccccuacugcaacuacagcaaguacugguaccugaaccacaccagcagcggcagaaccagccugcccaagugcuggcugaucagcaacggcagcuaccugaacgagacccaguucagcgacgacaucgagcagcaggccgacaacaugaucaccgagaugcugcagaaggaguacaucgagagacagggcaagaccccccugggccugguggacaucuucaucuucagcaccagcuucuaccugaucagcaucuuccugcaccugaucaagauccccacccacagacacaucgugggcaagcccugccccaagccccacagacugaaccacaugggcgugugcagcugcggccuguacaagcaccccggcgugcccaccaaguggaagagaugaggacuaguuauaagacugacuagcccgaugggccucccaacgggcccuccuccccuccuugcaccgagauuaaucaaaggcucuuuucagagccaccaaaaaaaaaaaaaaaaaaaaaaaaaaaaaaaaaaaaaaaaaaaaaaaaaaaaaaaaaaaaaaaaaaaaaaaaaaaaaaaaaaaaaaaaaaaaaaaaaaaaa

SEQ ID NO: 24455 - RNA, 1686 nt, Artificial Sequence
  mRNA product Design i-3 (hSL-A100) comprising derived and/or modified sequence from LASV(803213;Clade II)__AAF86703__GPCmut2 (opt4)
aggagaaagcuuaccaugggccagaucaucaccuucuuccaggaggugccccacgugaucgaggaggugaugaacaucgugcugaucgcccugagccugcuggccauccugaagggcaucuacaacguggccaccugcggccuguucggccugaucagcuuccugcugcugugcggcagaagcugcagcgugaccuacaagggcguguacgagcugcagacccuggagcugaacauggccaaccugaacaugugcaugccccugagcugcaccaagaacaacagccaccacuacaucauggugggcaacgagaccggccuggagcugacccugaccaacaccagcaucaucaaccacaaguucugcaaccugagcgacgcccacaagaagaaccuguacgaccacgcccugaugagcaucaucagcaccuuccaccugagcauccccaacuucaaccaguacgaggccaugagcugcgacuucaacggcggcaagaucagcgugcaguacaaccugagccacagcuucgccguggacgccgccaaccacugcggcaccaucgccaacggcgugcugcagaccuucaugagaauggccuggggcggcagcuacaucgcccuggacagcggcaagggcaacugggacugcaucaugaccagcuaccaguaccugaucauccagaacaccaccugggaggaccacugccaguucagcagacccagccccaucggcuaccugggccugcugagccagagaaccagagacaucuacaucagcagaagaagaagaggcaccuucaccuggacccugagcgacagcgagggcaacgaggcccccggcggcuacugccugaccagauggaugcugaucgaggccgagcugaagugcuucggcaacaccgccguggccaagugcaacgagaagcacgacgaggaguucugcgacaugcugagacuguucgacuucugcaagcaggccaucaagagacugaagacccccgcccagaugagcauccagcugaucaacaaggccgugaacgcccugaucaacgaccagcugaucaugaagaaccaccugagagacaucaugggcauccccuacugcaacuacagcagauacugguaccugaaccacaccgugaccggcaagaccagccugcccagaugcuggcuggugagcaacggcagcuaccugaacgagacccacuucagcgacgacaucgagcagcaggccgacaacaugaucaccgagaugcugcagaaggaguacauggacagacagggcaagaccccccugggccugguggaccuguucguguucagcaccagcuucuaccugaucagcaucuuccugcaccuggugaagauccccacccacagacacaucgugggcaagcccugccccaagccccacagacugaaccacaugggcaucugcagcugcggccuguacaagcaccccggcgugcccgugaaguggaagagaugaggacuaguuauaagacugacuagcccgaugggccucccaacgggcccuccuccccuccuugcaccgagauuaaucaaaggcucuuuucagagccaccaaaaaaaaaaaaaaaaaaaaaaaaaaaaaaaaaaaaaaaaaaaaaaaaaaaaaaaaaaaaaaaaaaaaaaaaaaaaaaaaaaaaaaaaaaaaaaaaaaaaa

SEQ ID NO: 24456 - RNA, 1686 nt, Artificial Sequence
  mRNA product Design i-3 (hSL-A100) comprising derived and/or modified sequence from LASV(GA391;Clade III)__CAA36645__GPCmut2 (opt4)
aggagaaagcuuaccaugggccagaucgugaccuucuuccaggaggugccccacgugaucgaggaggugaugaacaucgugcugaucgcccugagcauccuggccauccugaagggccuguacaacguggccaccugcggccugaucggccuggugaccuuccugcugcugagcggcagaagcugcagccugaucuacaagggcaccuacgagcugcagacccuggagcugaacauggagacccugaacaugugcaugccccugagcugcaccaagaacaacagccaccacuacaucagagugggcaacgagaccggccuggagcugacccugaccaacaccagcauccugaaccacaaguucugcaaccugagcgacgcccacaagagaaaccuguacgaccacagccugaugagcaucaucagcaccuuccaccugagcauccccaacuucaaccaguacgaggccaugagcugcgacuucaacggcggcaagaucaccgugcaguacaaccugagccacagcuucgccguggacgccgccggccacugcggcacccuggccaacggcgugcugcagaccuucaugagaauggccuggggcggcagcuacaucgcccuggacagcggcagaggcaacugggacugcaucaugaccagcuaccaguaccugaucauccagaacaccaccugggacgaccacugccaguucagcagacccagccccaucggcuaccugggccugcugagccagagaaccagagacaucuacaucagcagaagaagaagaggcaccuucaccuggacccugagcgacagcgagggcaacgagacccccggcggcuacugccugaccagauggaugcugaucgaggccgagcugaagugcuucggcaacaccgccguggccaagugcaacgagaagcacgacgaggaguucugcgacaugcugagacuguucgacuucugcaagcaggccaucagaagacugaagacccccgcccagaugagcauccagcugaucaacaaggccgugaacgcccugaucaacgaccagcugaucaugaagaaccaccugagagacaucaugggcauccccuacugcaacuacagcagauacugguaccugaaccacaccagcaccggcaagaccagccugcccagaugcuggcugaucagcaacggcagcuaccugaacgagaccaaguucagcgacgacaucgagcagcaggccgacaacaugaucaccgagaugcugcagaaggaguacaucgacagacagggcaagaccccccugggccugguggaccuguucguguucagcaccagcuucuaccugaucagcaucuuccugcaccuggugaagauccccacccacagacacaucgugggcaagcccugccccaagccccacagacugaaccacaugggcaucugcagcugcggccuguacaagcagcccggcgugcccgugagauggaagagaugaggacuaguuauaagacugacuagcccgaugggccucccaacgggcccuccuccccuccuugcaccgagauuaaucaaaggcucuuuucagagccaccaaaaaaaaaaaaaaaaaaaaaaaaaaaaaaaaaaaaaaaaaaaaaaaaaaaaaaaaaaaaaaaaaaaaaaaaaaaaaaaaaaaaaaaaaaaaaaaaaaaaa

SEQ ID NO: 24457 - RNA, 1689 nt, Artificial Sequence
  mRNA product Design i-3 (hSL-A100) comprising derived and/or modified sequence from LASV(AV;Clade V)__CCA30314__GPCmut2 (opt4)
aggagaaagcuuaccaugggccagaucgugaccuucuuccaggaggugccccacgugaucgaggaggugaugaacaucgugcugaucgcccugagcauccuggccgugcugaagggccuguacaacaucgccaccugcggccugaucggccugaucaccuuccugcugcugugcggcagaagcugcagcagcaaccuguacaagggcguguacgagcugcagagccuggaccugaacauggagacccugaacaugugcaugccccugagcugcaccaagaacaacagccaccacuacaucagagugggcaacgacaccggccuggagcugacccugaccaacaccagcauccugaaccacaaguucugcaaccugagcgacgcccacaagaaggaccuguacgaccacgcccugaugagcaucaucagcaccuuccaccugagcauccccaacuucaaccaguacgaggccaugagcugcgacuucaacggcggcaagaucagcgugcaguacaaccugagccacagcuacgccaucgacgccgccaaccacugcggcaccguggccaacggcauccugcagaccuucaugagaauggccuggggcggcagcuacaucgcccuggacagcggcagaggcaacugggacugcaucaugaccagcuaccaguaccugaucauccagaacaccaccugggagaaccacugccaguucagcagacccagccccaucggcuaccugggccugcugagccagagaaccagagacaucuacaucagcagaagaagaagaggcaccuucaccuggacccugagcgacagcgagggcaacgccacccccggcggcuacugccugaccagauggaugcugaucgaggccgagcugaagugcuucggcaacaccgccguggccaagugcaacgagaagcacgacgaggaguucugcgacaugcugagacuguucgacuucugcaagcaggccaucagcagacugaagagccccgcccagaugagcauccagcugaucaacaaggccgugaacgcccugaucaacgaccagcugaucaugaagaaccaccugagagacaucaugggcauccccuacugcaacuacagcaaguacugguaccugaaccacaccaucaccggcaagaccagccugcccaagugcuggcuggugagcaacggcagcuaccugaacgagacccacuucagcgacgacaucgagcagcaggccgacaacaugaucaccgagaugcugcagaaggaguacauggagagacagggcaagaccccccugggccugguggaccuguucguguucagcaccagcuucuaccugaucagcaucuuccugagacuggugaagauccccacccacagacacaucgugggcaagcccugccccaagccccacagacugaaccacaugggcaucugcagcugcggccuguacaagcagcccggcgugcccgugagauggaagagaugaggacuaguuauaagacugacuagcccgaugggccucccaacgggcccuccuccccuccuugcaccgagauuaaucaaaggcucuuuucagagccaccaaaaaaaaaaaaaaaaaaaaaaaaaaaaaaaaaaaaaaaaaaaaaaaaaaaaaaaaaaaaaaaaaaaaaaaaaaaaaaaaaaaaaaaaaaaaaaaaaaaaa

SEQ ID NO: 24458 - RNA, 1686 nt, Artificial Sequence
  mRNA product Design i-3 (hSL-A100) comprising derived and/or modified sequence from LASV(Togo/2016/7082;Clade VI)__AMR44577__GPCmut2 (opt4)
aggagaaagcuuaccaugggccagaucaucaccuucuuccaggaggugccccacgugaucgaggaggugaugaacaucgugcugaucgcccugagccugcuggccauccugaagggcguguacaacguggccaccugcggcaucaucggccuggugaccuuccuguuccugugcggcagaagcugcagccugaucuacaagggcagcuacgagcugcagacccuggagcugaacauggagacccugaacaugugcaugccccugagcugcaccaagaacagcagccaccacuacaucagagugggcaacgagaccggccuggagcugacccugaccaacaccagcaucaucaaccacaaguucugcaaccugagcgacgcccacaagagaaaccuguacgaccacgcccugaugagcauccugagcaccuuccaccugagcauccccaacuucaaccaguacgaggccaugagcugcgacuucaacggcggcaagaucagcgugcaguacaaccugagccacgccuacgccguggacgccgccgagcacugcggcaccguggccaacggcgugcugcagaccuucaugagaauggccuggggcggcagcuacaucgcccuggacagcggcagaggcaacugggacugcaucaugaccagcuaccaguaccugaucauccagaacaccaccugggaggaccacugccaguucagcagacccagccccaucggcuaccugggccugcugagccagagaaccagagacaucuacaucagcagaagaagaagaggcaccuucaccuggacccugagcgacagcgagggcaacgagacccccggcggcuacugccugaccagauggaugcugaucgaggccgagcugaagugcuucggcaacaccgccguggccaagugcaacgagaagcacgacgaggaguucugcgacaugcugagacuguucgacuucugcaagcaggccauccagagacugaagagccccgcccagaugagcauccagcugaucaacaaggccgugaacgcccugaucaacgaccagcugaucaugaagaaccaccugagagacaugaugggcauccccuacugcaacuacagcaaguacugguaccugaaccacaccagcagcggcagaaccagccugcccaagugcuggcuggugagcaacggcagcuaccugaacgagacccacuucagcgacgacaucgagcagcaggccgacaacaugaucaccgagaugcugcagaaggaguacaucgacagacagggcaagaccccccugggccugguggaccuguucguguucagcaccagcuucuaccugaucagcaucuuccugcaccugaucaagauccccacccacagacacaucgugggcaagcccugccccaagccccacagacugaaccacaugggcaucugcagcugcggccuguacaagcagcccggcgugcccaccagauggaagagaugaggacuaguuauaagacugacuagcccgaugggccucccaacgggcccuccuccccuccuugcaccgagauuaaucaaaggcucuuuucagagccaccaaaaaaaaaaaaaaaaaaaaaaaaaaaaaaaaaaaaaaaaaaaaaaaaaaaaaaaaaaaaaaaaaaaaaaaaaaaaaaaaaaaaaaaaaaaaaaaaaaaaa

SEQ ID NO: 24459 - RNA, 1686 nt, Artificial Sequence
  mRNA product Design i-3 (hSL-A100) comprising derived and/or modified sequence from LASV(KAK-428;Clade n.d. (VII))__ANH09740__GPCmut2 (opt4)
aggagaaagcuuaccaugggccagaucgugaccuucuuccaggaggugccccacgugaucgaggaggugaugaacaucgugcugaucgcccugagccugcuggccauccugaagggccuguacaacuucgccaccugcggcgugaucggccugaucaccuuccugcugcugugcggcagaagcugcagcgccaccuacaagggccaguacgagcugcagacccuggagcugaacauggagagccugaacaugugcaugccccugagcugcaccaagaacaacagccaccacuacaucagagccggcaacaacaccggccuggagcugacccugaccaacaccagcaucaucagccacaaguucugcaaccugagcgacgcccacaagaagaaccuguacgaccacacccugaugagcaucaucaccaccuuccaccugagcauccccaacuucaaccaguacgaggccaugagcugcgacuucaacggcggcaagaucagcauccaguacaaccugagccacagcuacgccggcgacgccgcccagcacugcggcaccguggccaacggcgugcugcagaccuucaugagaauggccuggggcggcagcuaccuggcccuggacagcggcagaagaggcugggacugcaucaucagcagcuaccaguaccugaucauccagaacaccaccugggacgaccacugccaguucagcagacccagccccaucggcuaccugggcuucgugagccagaagaccagagacaucuacaucagcagaagaagaagaggcaccuucaccuggacccugagcgacagcgagggccacgacaugcccggcggcuacugccugaccagauggaugcugaucgaggccgaccugaagugcuucggcaacaccgccguggccaagugcaacgagaagcacgacgaggaguucugcgacauguggagacuguucgacuucugcaagcaggccauccagagacugaaggcccccgcccagaugaacauccagcugaucaacaaggccgugaacgcccugaucaacgaccagcugaugaugaagaaccaccugagagacaucaugggcauccccuacugcaacuacagcaaguucugguaccugaacaacaccaccaccggcagaaccagccugcccagaugcuggcugaucagcaacggcagcuaccugaacgagacccacuucagcgacgacaucgagcagcaggccgacaacaugaucaccgagaugcugcagaaggaguacauggacagacagggcaagaccccccugggccugguggaccuguucguguucagcaccagcuucuaccugaucaccaucuuccugcaccuggugaagauccccacccacagacacaucgugggcaagcccugccccaagccccacagacugaaccacaugggcaucugcagcugcggccuguacaagcagcccggcgugcccgugagauggaagagaugaggacuaguuauaagacugacuagcccgaugggccucccaacgggcccuccuccccuccuugcaccgagauuaaucaaaggcucuuuucagagccaccaaaaaaaaaaaaaaaaaaaaaaaaaaaaaaaaaaaaaaaaaaaaaaaaaaaaaaaaaaaaaaaaaaaaaaaaaaaaaaaaaaaaaaaaaaaaaaaaaaaaa

SEQ ID NO: 24460 - RNA, 1686 nt, Artificial Sequence; identical to SEQ ID NO: 24454
  mRNA product Design i-3 (hSL-A100) comprising derived and/or modified sequence from LASV(Pinneo-NIG-1969;Clade I)__AIT17836__GPCmut2 (opt4)

SEQ ID NO: 24461 - RNA, 1686 nt, Artificial Sequence
  mRNA product Design i-3 (hSL-A100) comprising derived and/or modified sequence from LASV(ISTH0009-NIG-2011;Clade II)__AIT17404__GPCmut2 (opt4)
aggagaaagcuuaccaugggccagaucaucaccuucuuccaggaggugccccacgugaucgaggaggugaugaacaucgugcugaucgcccugagccugcuggccauccugaagggcaucuacaacguggccaccugcggccuguucggccuggugagcuuccugcugcugugcggcagaagcugcagcaccaccuacaagggcguguacgagcugcagacccuggagcuggacauggccagccugaacaugugcaugccccugagcugcaccaagaacaacagccaccacuacaucauggugggcaacgagaccggccuggagcugacccugaccaacaccagcaucaucaaccacaaguucugcaaccugagcgacgcccacaagaagaaccuguacgaccacgcccugaugagcaucaucagcaccuuccaccugagcauccccaacuucaaccaguacgaggccaugagcugcgacuucaacggcggcaagaucagcgugcaguacaaccugagccacgccuacgccguggacgccgccaaccacugcggcaccaucgccaacggcgugcugcagaccuucaugagaauggccuggggcggcagcuacaucgcccuggacagcggcaagggcagcugggacugcaucaugaccagcuaccaguaccugaucauccagaacaccaccugggaggaccacugccaguucagcagacccagccccaucggcuaccugggccugcugagccagagaaccagagacaucuacaucagcagaagaagaagaggcaccuucaccuggacccugagcgacagcgagggcaacgagacccccggcggcuacugccugaccagauggaugcugaucgaggccgagcugaagugcuucggcaacaccgccguggccaagugcaacgagaagcacgacgaggaguucugcgacaugcugagacuguucgacuucugcaagcaggccaucagaagacugaagacccccgcccagaugagcauccagcugaucaacaaggccgugaacgcccugaucaacgaccagcugaucaugaagaaccaccugagagacaucaugggcauccccuacugcaacuacagcaaguacugguaccugaaccacaccgugaccggcaagaccagccugcccagaugcuggcuggugagcaacggcagcuaccugaacgagacccacuucagcgacgacaucgagcagcaggccgacaacaugaucaccgagcugcugcagaaggaguacauggacagacagggcaagaccccccugggccugguggaccuguucguguucagcaccagcuucuaccugaucagcaucuuccugcaccugaucaagauccccacccacagacacaucaccggcaagcccugccccaagccccacagacugaaccacaugggcaucugcagcugcggccuguacaagcaccccggcgugcccgugaaguggaagagaugaggacuaguuauaagacugacuagcccgaugggccucccaacgggcccuccuccccuccuugcaccgagauuaaucaaaggcucuuuucagagccaccaaaaaaaaaaaaaaaaaaaaaaaaaaaaaaaaaaaaaaaaaaaaaaaaaaaaaaaaaaaaaaaaaaaaaaaaaaaaaaaaaaaaaaaaaaaaaaaaaaaaa

SEQ ID NO: 24462 - RNA, 1686 nt, Artificial Sequence
  mRNA product Design i-3 (hSL-A100) comprising derived and/or modified sequence from LASV(ISTH2010-NIG-2012;Clade II)__AIT17482__GPCmut2 (opt4)
aggagaaagcuuaccaugggccagaucaucaccuucuuccaggaggugccccacgugaucgaggaggugaugaacaucgugcugaucgcccugagccugcuggccauccugaagggcaucuacaacguggccaccugcggccuguucggccuggugagcuuccugcugcugugcggcagaagcugcagcaccaccuacaagggcguguacgagcugcagacccuggagcuggacauggccagccugaacaugugcaugccccugagcugcaccaagaacaacagccaccacuacaucauggugggcaacgagaccggccuggagcugacccugaccaacaccagcaucaucaaccacaaguucugcaaccugagcgacgcccacaagaagaaccuguacgaccacgcccugaugagcaucaucagcaccuuccaccugagcauccccaacuucaaccaguacgaggccaugagcugcgacuucaacggcggcaagaucagcgugcaguacaaccugagccacgccuacgccguggacgccgccaaccacugcggcaccaucgccaacggcgugcugcagaccuucaugagaauggccuggggcggcagcuacaucgcccuggacagcggcaagggcagcugggacugcaucaugaccagcuaccaguaccugaucauccagaacaucaccugggaggaccacugccaguucagcagacccagccccaucggcuaccugggccugcugagccagagaaccagagacaucuacaucagcagaagaagaagaggcaccuucaccuggacccugagcgacagcgagggcaacgagacccccggcggcuacugccugaccagauggaugcugaucgaggccgagcugaagugcuucggcaacaccgccguggccaagugcaacgagaagcacgacgaggaguucugcgacaugcugagacuguucgacuucugcaagcaggccaucagaagacugaagacccccgcccagaugagcauccagcugaucaacaaggccgugaacgcccugaucaacgaccagcugaucaugaagaaccaccugagagacaucaugggcauccccuacugcaacuacagcaaguacugguaccugaaccacaccgugaccggcaagaccagccugcccagaugcuggcuggugagcaacggcagcuaccugaacgagacccacuucagcgacgacaucgagcagcaggccgacaacaugaucaccgagcugcugcagaaggaguacaucgacagacagggcaagaccccccugggccugguggaccuguucguguucagcaccagcuucuaccugaucagcaucuuccugcaccuggugaagauccccacccacagacacguggugggcaagcccugccccaagccccacagacugaaccacaugggcaucugcagcugcggccuguacaagcaccccggcgugcccgugaaguggaagagaugaggacuaguuauaagacugacuagcccgaugggccucccaacgggcccuccuccccuccuugcaccgagauuaaucaaaggcucuuuucagagccaccaaaaaaaaaaaaaaaaaaaaaaaaaaaaaaaaaaaaaaaaaaaaaaaaaaaaaaaaaaaaaaaaaaaaaaaaaaaaaaaaaaaaaaaaaaaaaaaaaaaaa

SEQ ID NO: 24463 - RNA, 1686 nt, Artificial Sequence
  mRNA product Design i-3 (hSL-A100) comprising derived and/or modified sequence from LASV(Lassa virus/H.sapiens-wt/NGA/2015/ISTH_0543;Clade II)__AVO03639__GPCmut2 (opt4)
aggagaaagcuuaccaugggccagaucaucaccuucuuccaggaggugccccacgugaucgaggaggugaugaacaucgugcugaucgcccugagccugcuggccauccugaagggcaucuacaacguggccaccugcggccuguucggccuggugagcuuccugcugcugugcggcagaagcugcagcaccaccuacaagggcguguacgagcugcagacccuggagcuggacauggccaaccugaacaugugcaugccccugagcugcaccaagaacaacagccaccacuacaucauggugggcaacgagaccggccuggagcugacccugaccaacaccagcaucaucaaccacaaguucugcaaccugagcgacgcccacaagaagaaccuguacgaccacgcccugaugagcaucaucagcaccuuccaccugagcauccccaacuucaaccaguacgaggccaugagcugcgacuucaacggcggcaagaucagcgugcaguacaaccugagccacaccuacgccguggacgccgccaaccacugcggcaccaucgccaacggcgugcugcagaccuucaugagaauggccuggggcggcagcuacaucgcccuggacagcggcaagggcagcugggacugcaucaugaccagcuaccaguaccuggugauccagaacaccaccugggaggaccacugccaguucagcagacccagccccaucggcuaccugggccugcugagccagagaaccagagacaucuacaucagcagaagaagaagaggcaccuucaccuggacccugagcgacagcgagggcaacgagacccccggcggcuacugccugaccagauggaugcugaucgaggccgagcugaagugcuucggcaacaccgccguggccaagugcaacgagaagcacgacgaggaguucugcgacaugcugagacuguucgacuucugcaagcaggccaucagaagacugaagacccccgcccagaugagcauccagcugaucaacaaggccgugaacgcccugaucaacgaccagcugaucaugaagaaccaccugagagacaucaugggcauccccuacugcaacuacagcaaguacugguaccugaaccacaccgugaccggcaagaccagccugcccagaugcuggcuggugagcaacggcagcuaccugaacgagacccacuucagcgacgacaucgagcagcaggccgacaacaugaucaccgagcugcugcagaaggaguacaucgacagacagggcaagaccccccugggccugguggaccuguucguguucagcaccagcuucuaccugaucagcaucuuccugcaccuggugaagauccccacccacagacacaucaccggcaagcccugccccaagccccacagacugaaccacaugggcaucugcagcugcggccuguacaagcaccccggcgugcccgugaaguggaagagaugaggacuaguuauaagacugacuagcccgaugggccucccaacgggcccuccuccccuccuugcaccgagauuaaucaaaggcucuuuucagagccaccaaaaaaaaaaaaaaaaaaaaaaaaaaaaaaaaaaaaaaaaaaaaaaaaaaaaaaaaaaaaaaaaaaaaaaaaaaaaaaaaaaaaaaaaaaaaaaaaaaaaa

SEQ ID NO: 24464 - RNA, 1686 nt, Artificial Sequence
  mRNA product Design i-3 (hSL-A100) comprising derived and/or modified sequence from LASV(Lassa virus/H.sapiens-wt/NGA/2016/ISTH_0009;Clade II)__AVO03571__GPCmut2 (opt4)
aggagaaagcuuaccaugggccagaucaucaccuucuuccaggaggugccccacgugaucgaggaggugaugaacaucgugcugaucgcccugagccugcuggccauccugaagggcaucuacaacguggccaccugcggccugcugggccuggugagcuuccugcugcugugcggcagaagcugcagcaccaccuacaagggcguguacgagcugcagacccuggagcuggacauggccagccugaacaugugcaugccccugagcugcaccaagaacaacagccaccacuacaucauggugggcaacgagaccggccuggagcugacccugaccaacaccagcaucaucaaccacaaguucugcaaccugagcgacgcccacaagaagaaccuguacgaccacgcccugaugagcaucaucagcaccuuccaccugagcauccccaacuucaaccaguacgaggccaugagcugcgacuucaacggcggcagaaucagcgugcaguacaaccugagccacagcuacgccguggacgccgccaaccacugcggcaccaucgccaacggcgugcugcagaccuucaugagaauggccuggggcggcagcuacaucgcccuggacagcggcaagggcagcugggacugcaucaugaccagcuaccaguaccugaucauccagaacaccaccugggaggaccacugccaguucagcagacccagccccaucggcuaccugggccugcugagccagagaaccagagacaucuacaucagcagaagaagaagaggcaccuucaccuggacccugagcgacagcgagggcaacgagacccccggcggcuacugccugaccagauggaugcugaucgaggccgagcugaagugcuucggcaacaccgccguggccaagugcaacgagaagcacgacgaggaguucugcgacaugcugagacuguucgacuucugcaagcaggccaucagaagacugaagacccccgcccagaugagcauccagcugaucaacaaggccgugaacgcccugaucaacgaccagcugaucaugaagaaccaccugagagacaucaugggcauccccuacugcaacuacagcaaguacugguaccugaaccacaccgugaccggcaagaccagccugcccagaugcuggcuggugagcaacggcagcuaccugaacgagacccacuucagcgacgacaucgagcagcaggccgacaacaugaucaccgagcugcugcagaaggaguacaucgacagacagggcaagaccccccugggccugguggaccuguucguguucagcaccagcuucuaccugaucagcaucuuccugcaccuggugaagauccccacccacagacacaucaccggcaagcccugccccaagccccacagacugaaccacaugggcaucugcagcugcggccuguacaaccaccccggcgugcccgugaaguggaagagaugaggacuaguuauaagacugacuagcccgaugggccucccaacgggcccuccuccccuccuugcaccgagauuaaucaaaggcucuuuucagagccaccaaaaaaaaaaaaaaaaaaaaaaaaaaaaaaaaaaaaaaaaaaaaaaaaaaaaaaaaaaaaaaaaaaaaaaaaaaaaaaaaaaaaaaaaaaaaaaaaaaaaa

SEQ ID NO: 24465 - RNA, 1686 nt, Artificial Sequence
  mRNA product Design i-3 (hSL-A100) comprising derived and/or modified sequence from LASV(Lassa virus/H.sapiens-wt/NGA/2016/ISTH_0017;Clade II)__AVO03567__GPCmut2 (opt4)
aggagaaagcuuaccaugggccagaucaucaccuucuuccaggaggugccccacgugaucgaggaggugaugaacaucgugcugaucgcccugagccugcuggccauccugaagggcaucuacaacguggccaccugcggccuguucggccuggugagcuuccugcugcugugcggcagaagcugcagcaccaccuacaagggcguguacgagcugcagacccuggagcuggacauggccagccugaacaugugcaugccccugagcugcaccaagaacaacagccaccacuacaucauggugggcaacgagaccggccuggagcugacccugaccaacaccagcaucaucaaccacaaguucugcaaccugagcgacgcccacaagaagaaccuguacgaccacgcccugaugagcaucaucagcaccuuccaccugagcauccccaacuucaaccaguacgaggccaugagcugcgacuucaacggcggcaagaucagcgugcaguacaaccugagccacaccuacgccaucgacgccgccaaccacugcggcaccaucgccaacggcgugcugcagaccuucaugagaauggccuggggcggcagcuacaucgcccuggacagcggcaagggcagcugggacugcaucaugaccagcuaccaguaccugaucauccagaacaccaccugggaggaccacugccaguucagcagacccagccccaucggcuaccugggccugcugagccagagaaccagagacaucuacaucagcagaagaagaagaggcaccuucaccuggacccugagcgacagcgagggcaacgagacccccggcggcuacugccugaccagauggaugcugaucgaggccgagcugaagugcuucggcaacaccgccguggccaagugcaacgagaagcacgacgaggaguucugcgacaugcugagacuguucgacuucugcaagcaggccaucagaagacugaagacccccgcccagaugagcauccagcugaucaacaaggccgugaacgcccugaucaacgaccagcugaucaugaagaaccaccugagagacaucaugggcauccccuacugcaacuacagcaaguacugguaccugaaccacaccgugaccggcaagaccagccugcccagaugcuggcuggugagcaacggcagcuaccugaacgagacccacuucagcgacgacaucgagcagcaggccgacaacaugaucaccgagcugcugcagaaggaguacauggacagacagggcaagaccccccugggccugguggaccuguucguguucagcaccagcuucuaccugaucagcaucuuccugcaccuggugagaauccccacccacagacacgugaucggcaagcccugccccaagccccacagacugaaccacaugggcaucugcagcugcggccuguacaagcaccccggcgugcccgugaaguggaagagaugaggacuaguuauaagacugacuagcccgaugggccucccaacgggcccuccuccccuccuugcaccgagauuaaucaaaggcucuuuucagagccaccaaaaaaaaaaaaaaaaaaaaaaaaaaaaaaaaaaaaaaaaaaaaaaaaaaaaaaaaaaaaaaaaaaaaaaaaaaaaaaaaaaaaaaaaaaaaaaaaaaaaa

SEQ ID NO: 24466 - RNA, 1686 nt, Artificial Sequence
  mRNA product Design i-3 (hSL-A100) comprising derived and/or modified sequence from LASV(Lassa virus/H.sapiens-wt/NGA/2018/ISTH_0959;Clade II)__AVV65099__GPCmut2 (opt4)
aggagaaagcuuaccaugggccagaucaucaccuucuuccaggaggugccccacgugaucgaggaggugaugaacaucgugcugaucgcccugagccugcuggccauccugaagggcaucuacaacguggugaccugcggccuguucggccuggugagcuuccugcugcugugcggcagaagcugcagcaccaccuacaagggcguguacgagcugcagacccuggagcuggacauggccagccugaacaugugcaugccccugagcugcaccaagaacaacagccaccacuacaucauggugggcaacgagaccggccuggagcugacccugaccaacaccagcaucaucaaccacaaguucugcaaccugagcgacgcccacaagaagaaccuguacgaccacgcccugaugagcaucaucagcaccuuccaccugagcauccccaacuucaaccaguacgaggccaugagcugcgacuucaacggcggcaagaucagcgugcaguacaaccugagccacgccuacgccaucgacgccgccaaccacugcggcaccaucgccaacggcgugcugcagaccuucaugagaauggccuggggcggcagcuacaucgcccuggacagcggcaagggcagcugggacugcaucaugaccagcuaccaguaccugaucauccagaacaccaccugggaggaccacugccaguucagcagacccagccccaucggcuaccugggccugcugagccagagaaccagagacaucuacaucagcagaagaagaagaggcaccuucaccuggacccugagcgacagcgagggcaacgagacccccggcggcuacugccugaccagauggaugcugaucgaggccgagcugaagugcuucggcaacaccgccguggccaagugcaacgagaagcacgacgaggaguucugcgacaugcugagacuguucgacuucugcaagcaggccaucagaagacugaagacccccgcccagaugagcauccagcugaucaacaaggccgugaacgcccugaucaacgaccagcugaucaugaagaaccaccugagagacaucaugggcauccccuacugcaacuacagcaaguacugguaccugaaccacaccgugaccggcaagaccagccugcccagaugcuggcuggugagcaacggcagcuaccugaacgagacccacuucagcgacgacaucgagcagcaggccgacaacaugaucaccgagcugcugcagaaggaguacaucgacagacagggcaagaccccccugggccugguggaccuguucguguucagcaccagcuucuaccugaucagcaucuuccugcaccuggugaagauccccacccacagacacgugaucggcaagcccugccccaagccccacagacugaaccacaugggcaucugcagcugcggccuguacaagcaccccggcgugcccgugaaguggaagagaugaggacuaguuauaagacugacuagcccgaugggccucccaacgggcccuccuccccuccuugcaccgagauuaaucaaaggcucuuuucagagccaccaaaaaaaaaaaaaaaaaaaaaaaaaaaaaaaaaaaaaaaaaaaaaaaaaaaaaaaaaaaaaaaaaaaaaaaaaaaaaaaaaaaaaaaaaaaaaaaaaaaaa

SEQ ID NO: 24467 - RNA, 1686 nt, Artificial Sequence
  mRNA product Design i-3 (hSL-A100) comprising derived and/or modified sequence from LASV(LASV003-NIG-2008;Clade II)__AIT17580__GPCmut2 (opt4)
aggagaaagcuuaccaugggccagaucaucaccuucuuccaggaggugccccacgugaucgaggaggugaugaacaucgugcugaucgcccugagccugcuggccauccugaagggcaucuacaacguggccaccugcggccuguucggccuggugagcuuccugcugcugugcggcagaagcugcagcaccaccuacaagggcguguacgagcugcagacccuggagcuggacauggccagccugaacaugugcaugccccugagcugcaccaagaacaacagccaccacuacaucauggugggcaacgagaccggccuggagcugacccugaccaacaccagcaucaucaaccacaaguucugcaaccugagcgacgcccacaagaagaaccuguacgaccacgcccugaugagcaucaucagcaccuuccaccugagcauccccaacuucaaccaguacgaggccaugagcugcgacuucaacggcggcaagaucagcgugcaguacaaccugagccacaccuacgccguggacgccgccaaccacugcggcaccaucgccaacggcgugcugcagaccuucaugagaauggccuggggcggcagcuacaucgcccuggacagcggcaagggcagcugggacugcaucaugaccagcuaccaguaccugaucauccagaacaccaccugggaggaccacugccaguucagcagacccagccccaucggcuaccugggccugcugagccagagaaccagagacaucuacaucagcagaagaagaagaggcaccuucaccuggacccugagcgacagcgagagcaacgagacccccggcggcuacugccugaccagauggaugcugaucgaggccgagcugaagugcuucggcaacaccgccguggccaagugcaacgagaagcacgacgaggaguucugcgacaugcugagacuguucgacuucugcaagcaggccaucagaagacugaaggcccccgcccagaugagcauccagcugaucaacaaggccgugaacgcccugaucaacgaccagcugaucaugaagaaccaccugagagacaucaugggcauccccuacugcaacuacagcaaguacugguaccugaaccacaccgugaccggcagaaccagccugcccagaugcuggcuggugagcaacggcagcuaccugaacgagacccacuucagcgacgacaucgagcagcaggccgacaacaugaucaccgagcugcugcagaaggaguacauggacagacagggcaagaccccccugggccugguggaccuguucguguucagcaccagcuucuaccugaucagcaucuuccugcaccuggugaagauccccacccacagacacgugaucggcaagcccugccccaagccccacagacugaaccacaugggcaucugcagcugcggccuguacaagcaccccggcgugcccgugaaguggaagagaugaggacuaguuauaagacugacuagcccgaugggccucccaacgggcccuccuccccuccuugcaccgagauuaaucaaaggcucuuuucagagccaccaaaaaaaaaaaaaaaaaaaaaaaaaaaaaaaaaaaaaaaaaaaaaaaaaaaaaaaaaaaaaaaaaaaaaaaaaaaaaaaaaaaaaaaaaaaaaaaaaaaaa

SEQ ID NO: 24468 - RNA, 1686 nt, Artificial Sequence
  mRNA product Design i-3 (hSL-A100) comprising derived and/or modified sequence from LASV(LASV035-NIG-2009;Clade II)__AIT17588__GPCmut2 (opt4)
aggagaaagcuuaccaugggccagaucaucaccuucuuccaggaggugccccacgugaucgaggaggugaugaacaucgugcugaucgcccugagccugcuggccauccugaagggcaucuacaacguggccaccugcggccuguucggccuggugagcuuccugcugcugugcggcagaagcugcagcaccaccuacaagggcguguacgagcugcagacccuggagcuggacauggccagccugaacaugugcaugccccugagcugcaccaagaacaacagccaccacuacaucauggugggcaacgagaccggccuggagcugacccugaccaacaccagcaucaucaaccacaaguucugcaaccugagcgacgcccacaagaagaaccuguacgaccacgcccugaugagcaucaucagcaccuuccaccugagcauccccaacuucaaccaguacgaggccaugagcugcgacuucaacggcggcaagaucagcgugcaguacaaccugagccacgccuacgccguggacgccgccaaccacugcggcaccaucgccaacggcgugcugcagaccuucaugagaauggccuggggcggcagcuacaucgcccuggacagcggcaagggcagcugggacugcaucaugaccagcuaccaguaccugaucauccagaacaccaccugggaggaccacugccaguucagcagacccagccccaucggcuaccugggccugcugagccagagaaccagagacaucuacaucagcagaagaagaagaggcaccuucaccuggacccugagcgacagcgagggcaacgagacccccggcggcuacugccugaccagauggaugcugaucgaggccgagcugaagugcuucggcaacaccgccguggccaagugcaacgagaagcacgacgaggaguucugcgacaugcugagacuguucgacuucugcaagcaggccaucagaagacugaaggcccccgcccagaugagcauccagcugaucaacaaggccgugaacgcccugaucaacgaccagcugaucaugaagaaccaccugagagacaucaugggcauccccuacugcaacuacagcaaguacugguaccugaaccacaccgugaccggcaagaccagccugcccagaugcuggcuggugagcaacggcagcuaccugaacgagacccacuucagcgacgacaucgagcagcaggccgacaacaugaucaccgagcugcugcagaaggaguacaucgacagacagggcaagaccccccugggccugguggaccuguucguguucagcaccagcuucuaccugaucagcaucuuccugcaccuggugaagauccccacccacagacacgugaucggcaagcccugccccaagccccacagacugaaccacaugggcaucugcagcugcggccuguacaagcaccccggcgugcccgugaaguggaagagaugaggacuaguuauaagacugacuagcccgaugggccucccaacgggcccuccuccccuccuugcaccgagauuaaucaaaggcucuuuucagagccaccaaaaaaaaaaaaaaaaaaaaaaaaaaaaaaaaaaaaaaaaaaaaaaaaaaaaaaaaaaaaaaaaaaaaaaaaaaaaaaaaaaaaaaaaaaaaaaaaaaaaa

SEQ ID NO: 24469 - RNA, 1686 nt, Artificial Sequence
  mRNA product Design i-3 (hSL-A100) comprising derived and/or modified sequence from LASV(LASV1000-NIG-2009;Clade II)__AIT17782__GPCmut2 (opt4)
aggagaaagcuuaccaugggccagaucaucaccuucuuccaggaggugccccacgugaucgaggaggugaugaacaucgugcugaucgcccugagccugcuggccauccugaagggcaucuacaacguggccaccugcggccuguucggccuggugagcuuccugcugcugugcggcagaagcugcagcaccaccuacaagggcguguacgagcugcagacccuggagcuggacauggccagccugaacaugugcaugccccugagcugcaccaagaacaacagccaccacuacaucauggugggcaacgagaccggccuggagcugacccugaccaacaccagcaucaucaaccacaaguucugcaaccugagcgacgcccacaagaagaaccuguacgaccacgcccugaugagcaucaucagcaccuuccaccugagcauccccaacuucaaccaguacgaggccaugagcugcgacuucaacggcggcaagaucagcgugcaguacaaccugagccacaccuacgccguggacgccgccaaccacugcggcaccaucgccaacggcgugcugcagaccuucaugagaauggccuggggcggcagcuacaucgcccuggacagcggcaagggcagcugggacugcaucaugaccagcuaccaguaccugaucauccagaacaccaccugggaggaccacugccaguucagcagacccagccccaucggcuaccugggccugcugagccagagaaccagagacaucuacaucagcagaagaagaagaggcaccuucaccuggacccugagcgacagcgagggcaacgagacccccggcggcuacugccugaccagauggaugcugaucgaggccgagcugaagugcuucggcaacaccgccguggccaagugcaacgagaagcacgacgaggaguucugcgacaugcugagacuguucgacuucugcaagcaggccaucaagagacugaagacccccgcccagaugagcauccagcugaucaacaaggccgugaacgcccugaucaacgaccagcugaucaugaagaaccaccugagagacaucaugggcauccccuacugcaacuacagcaaguacugguaccugaaccacaccgugaccggcaagaccagccugcccagaugcuggcuggugagcaacggcagcuaccugaacgagacccacuucagcgacgacaucgagcagcaggccgacaacaugaucaccgagcugcugcagaaggaguacaucgacagacagggcaagaccccccugggccugguggaccuguucguguucagcaccagcuucuaccugaucagcaucuuccugcaccuggugaagauccccacccacagacacguggugggcaagcccugccccaagccccacagacugaaccacaugggcaucugcagcugcggccuguacaagcaccccggcgugcccgugaaguggaagagaugaggacuaguuauaagacugacuagcccgaugggccucccaacgggcccuccuccccuccuugcaccgagauuaaucaaaggcucuuuucagagccaccaaaaaaaaaaaaaaaaaaaaaaaaaaaaaaaaaaaaaaaaaaaaaaaaaaaaaaaaaaaaaaaaaaaaaaaaaaaaaaaaaaaaaaaaaaaaaaaaaaaaa

SEQ ID NO: 24470 - RNA, 1686 nt, Artificial Sequence
  mRNA product Design i-3 (hSL-A100) comprising derived and/or modified sequence from LASV(LASV221-NIG-2010;Clade II)__AIT17624__GPCmut2 (opt4)
aggagaaagcuuaccaugggccagaucaucaccuucuuccaggaggugccccacgugaucgaggaggugaugaacaucgugcugaucgcccugagccugcuggccauccugaagggcaucuacaacguggccaccugcggccuguucggccuggugagcuuccugcugcugugcggcagaagcugcagcaccaccuacaagggcguguacgagcugcagacccuggagcuggacauggccagccugaacaugugcaugccccugagcugcaccaagaacaacagccaccacuacaucauggugggcaacgagaccggccuggagcugacccugaccaacaccagcaucaucaaccacaaguucugcaaccugagcgacgcccacaagaagaaccuguacgaccacgcccugaugagcaucaucagcaccuuccaccugagcauccccaacuucaaccaguacgaggccaugagcugcgacuucaacggcggcaagaucagcgugcaguacaaccugagccacaccuacgccaucgacgccgccaaccacugcggcaccaucgccaacggcgugcugcagaccuucaugagaauggccuggggcggcagcuacaucgcccuggacagcggcaagggcagcugggacugcaucaugaccagcuaccaguaccugaucauccagaacaccaccugggaggaccacugccaguucagcagacccagccccaucggcuaccugggccugcugagccagagaaccagagacaucuacaucagcagaagaagaagaggcaccuucaccuggacccugagcgacagcgagggcaacgagacccccggcggcuacugccugaccagauggaugcugaucgaggccgagcugaagugcuucggcaacaccgccguggccaagugcaacgagaagcacgacgaggaguucugcgacaugcugagacuguucgacuucugcaagcaggccaucagaagacugaagacccccgcccagaugagcauccagcugaucaacaaggccgugaacgcccugaucaacgaccagcugaucaugaagaaccaccugagagacaucaugggcauccccuacugcaacuacagcaaguacugguaccugaaccacaccgugaccggcaagaccagccugcccagaugcuggcuggugagcaacggcagcuaccugaacgagacccacuucagcgacgacaucgagcagcaggccgacaacaugaucaccgagaugcugcagaaggaguacauggacagacagggcaagaccccccugggccugguggaccuguucguguucagcaccagcuucuaccugaucagcaucuuccugcaccuggugaagauccccacccacagacacgugaucggcaagcccugccccaagccccacagacugaaccacaugggcaucugcagcugcggccuguacaagcaccccggcgugcccgugaaguggaagagaugaggacuaguuauaagacugacuagcccgaugggccucccaacgggcccuccuccccuccuugcaccgagauuaaucaaaggcucuuuucagagccaccaaaaaaaaaaaaaaaaaaaaaaaaaaaaaaaaaaaaaaaaaaaaaaaaaaaaaaaaaaaaaaaaaaaaaaaaaaaaaaaaaaaaaaaaaaaaaaaaaaaaa

SEQ ID NO: 24471 - RNA, 1686 nt, Artificial Sequence
  mRNA product Design i-3 (hSL-A100) comprising derived and/or modified sequence from LASV(LASV237-NIG-2010;Clade II)__AIT17638__GPCmut2 (opt4)
aggagaaagcuuaccaugggccagaucaucaccuucuuccaggaggugccccacgugaucgaggaggugaugaacaucgugcugaucgcccugagccugcuggccauccugaagggcaucuacaacguggccaccugcggccuguucggccuggugagcuuccugcugcugugcggcagaagcugcagcaccaccuacaagggcguguacgagcugcagacccuggagcuggacauggccagccugaacaugugcaugccccugagcugcaccaagaacaacagccaccacuacaucauggugggcaacgagaccggccuggagcugacccugaccaacaccagcaucaucaaccacaaguucugcaaccugagcgacgcccacaagaaggaccuguacgaccacgcccugaugagcaucaucagcaccuuccaccugagcauccccaacuucaaccaguacgaggccaugagcugcgacuucaacggcggcaagaucagcgugcaguacaaccugagccacaccuacgccguggacgccgccaaccacugcggcaccaucgccaacggcgugcugcagaccuucaugagaauggccuggggcggcagcuacaucgcccuggacagcggcaagggcagcugggacugcaucaugaccagcuaccaguaccugaucauccagaacaccaccugggaggaccacugccaguucagcagacccagccccaucggcuaccugggccugcugagccagagaaccagagacaucuacaucagcagaagaagaagaggcaccuucaccuggacccugagcgacagcgagggcaacgagacccccggcggcuacugccugaccagauggaugcugaucgaggccgagcugaagugcuucggcaacaccgccguggccaagugcaacgagaagcacgacgaggaguucugcgacaugcugagacuguucgacuucugcaagcaggccaucagaagacugaagacccccgcccagaugagcauccagcugaucaacaaggccgugaacgcccugaucaacgaccagcugaucaugaagaaccaccugagagacaucaugggcauccccuacugcaacuacagcaaguacugguaccugaaccacaccgugaccggcaagaccagccugcccagaugcuggcuggugagcaacggcagcuaccugaacgagacccacuucagcgacgacaucgagcagcaggccgacaacaugaucaccgagcugcugcagaaggaguacauggacagacagggcaagaccccccugggccugguggaccuguucguguucagcaccagcuucuaccugaucagcaucuuccugcaccugaucaagauccccacccacagacacaucaccggcaagcccugccccaagccccacagacugaaccacaugggcaucugcagcugcggccuguacaagcaccccggcgugcccgugaaguggaagagaugaggacuaguuauaagacugacuagcccgaugggccucccaacgggcccuccuccccuccuugcaccgagauuaaucaaaggcucuuuucagagccaccaaaaaaaaaaaaaaaaaaaaaaaaaaaaaaaaaaaaaaaaaaaaaaaaaaaaaaaaaaaaaaaaaaaaaaaaaaaaaaaaaaaaaaaaaaaaaaaaaaaaa

SEQ ID NO: 24472 - RNA, 1686 nt, Artificial Sequence
  mRNA product Design i-3 (hSL-A100) comprising derived and/or modified sequence from LASV(LASV253-NIG-2011;Clade II)__AIT17670__GPCmut2 (opt4)
aggagaaagcuuaccaugggccagaucaucaccuucuuccaggaggugccccacgugaucgaggaggugaugaacaucgugcugaucgcccugagccugcuggccauccugaagggcaucuacaacguggccaccugcggccuguucggccuggugagcuuccugcugcugugcggcagaagcugcagcaccaccuacaagggcguguacgagcugcagacccuggagcuggacauggccagccugaacaugugcaugccccugagcugcaccaagaacaacagccaccacuacaucauggugggcaacgagaccggccuggagcugacccugaccaacaccagcaucaucaaccacaaguucugcaaccugagcgacgcccacaagaagaaccuguacgaccacgcccugaugagcaucaucagcaccuuccaccugagcauccccaacuucaaccaguacgaggccaugagcugcgacuucaacggcggcaagaucagcgugcaguacaaccugagccacaccuacgccguggacgccgccaaccacugcggcaccaucgccaacggcgugcugcagaccuucaugagaauggccuggggcggcagcuacaucgcccuggacagcggcaagggcagcugggacugcaucaugaccagcuaccaguaccugaucauccagaacaccaccugggaggaccacugccaguucagcagacccagccccaucggcuaccugggccugcugagccagagaaccagagacaucuacaucagcagaagaagaagaggcaccuucaccuggacccugagcgacagcgagggcaacgagacccccggcggcuacugccugaccagauggaugcugaucgaggccgagcugaagugcuucggcaacaccgccguggccaagugcaacgagaagcacgacgaggaguucugcgacaugcugagacuguucgacuucugcaagcaggccaucagaagacugaaggcccccgcccagaugagcauccagcugaucaacaaggccgugaacgcccugaucaacgaccagcugaucaugaagaaccaccugagagacaucaugggcauccccuacugcaacuacagcaaguacugguaccugaaccacaccgugaccggcagaaccagccugcccagaugcuggcuggugagcaacggcagcuaccugaacgagacccacuucagcgacgacaucgagcagcaggccgacaacaugaucaccgagcugcugcagaaggaguacaucgacagacagggcaagaccccccugggccugguggaccuguucguguucagcaccagcuucuaccugaucagcaucuuccugcaccuggugaagauccccacccacagacacaucaucggcaagcccugccccaagccccacagacugaaccacaugggcaucugcagcugcggccuguacaagcaccccggcgugcccgugaaguggaagagaugaggacuaguuauaagacugacuagcccgaugggccucccaacgggcccuccuccccuccuugcaccgagauuaaucaaaggcucuuuucagagccaccaaaaaaaaaaaaaaaaaaaaaaaaaaaaaaaaaaaaaaaaaaaaaaaaaaaaaaaaaaaaaaaaaaaaaaaaaaaaaaaaaaaaaaaaaaaaaaaaaaaaa

SEQ ID NO: 24473 - RNA, 1686 nt, Artificial Sequence
  mRNA product Design i-3 (hSL-A100) comprising derived and/or modified sequence from LASV(LASV254-NIG-2011;Clade II)__AIT17674__GPCmut2 (opt4)
aggagaaagcuuaccaugggccagaucaucaccuucuuccaggaggugccccacgugaucgaggaggugaugaacaucgugcugaucgcccugagccugcuggccauccugaagggcaucuacaacguggccaccugcggccuguucggccuggugagcuuccugcugcugugcggcagaagcugcagcaccaccuacaagggcguguacgagcugcagacccuggagcuggacaugaccaaccugaacaugugcaugccccugagcugcaccaagaacaacagccaccacuacaucauggugggcaacgagaccggccuggagcugacccugaccaacaccagcaucaucaaccacaaguucugcaaccugagcgacgcccacaagaagaaccuguacaaccacgcccugaugagcaucaucagcaccuuccaccugagcauccccaacuucaaccaguacgaggccaugagcugcgacuucaacggcggcaagaucagcgugcaguacaaccugagccacagcuacgccguggacgccgccaaccacugcggcaccaucgccaacggcgugcugcagaccuucaugagaauggccuggggcggcagcuacaucgcccuggacagcggcaagggcaacugggacugcaucaugaccagcuaccaguaccugaucauccagaacaccaccugggaggaccacugccaguucagcagacccagccccaucggcuaccugggccugcugagccagagaaccagagacaucuacaucagcagaagaagaagaggcaccuucaccuggacccugagcgacagcgagggcaacgagacccccggcggcuacugccugaccagauggaugcugaucgaggccgagcugaagugcuucggcaacaccgccguggccaagugcaacgagaagcacgacgaggaguucugcgacaugcugagacuguucgacuucugcaagcaggccaucagaagacugaagacccccgcccaggccaacauccagcugaucaacaaggccgugaacgcccugaucaacgaccagcugaucaugaagaaccaccugagagacaucaugggcauccccuacugcaacuacagcaaguacugguaccugaaccacaccgugaccggcaagaccagccugcccagaugcuggcuggugagcaacggcagcuaccugaacgagacccacuucagcgacgacaucgagcagcaggccgacaacaugaucaccgagcugcugcagaaggaguacauggacagacagggcaagaccccccugggccugguggaccuguucguguucagcaccagcuucuaccugaucagcaucuuccugcaccuggugaagauccccacccacagacacgugaucggcaagcccugccccaagccccacagacugaaccacaugggcaucugcagcugcggccuguacaagcaccccggcgugcccgugaaguggaagagaugaggacuaguuauaagacugacuagcccgaugggccucccaacgggcccuccuccccuccuugcaccgagauuaaucaaaggcucuuuucagagccaccaaaaaaaaaaaaaaaaaaaaaaaaaaaaaaaaaaaaaaaaaaaaaaaaaaaaaaaaaaaaaaaaaaaaaaaaaaaaaaaaaaaaaaaaaaaaaaaaaaaaa

SEQ ID NO: 24474 - RNA, 1686 nt, Artificial Sequence
  mRNA product Design i-3 (hSL-A100) comprising derived and/or modified sequence from LASV(Nig08-A19;Clade III)__ADU56618__GPCmut2 (opt4)
aggagaaagcuuaccaugggccagaucgugaccuucuuccaggaggugccccacgugaucgaggaggugaugaacaucgugcugaucgcccugagcauccuggccauccugaagggccuguacaacaucgccaccugcggccugaucggccuggugaccuuccugcugcugagcggcagaagcugcagcaugaccuacaagggcguguacgagcugcagacccuggagcugaacaugaacacccugaacaugugcaugccccugagcugcaccaagaacaacagccaccacuacaucauggugggcaacgagaccggccuggagcugacccugaccaacaccagccugcugcaccacaaguucugcaaccugagcgacgcccacaagaagaaccuguacgaccacacccugaugagcaucaucagcaccuuccaccugagcauccccaacuucaaccaguacgaggccaugagcugcgacuucaacggcggcaagaucaccgugcaguacaaccugagccacagcuacgccaucgacgccgccaaccacugcggcaccguggccaacggcgugcugcagaccuucaugagaauggccuggggcggcagcuacaucgcccuggacagcggcagaggcaagugggacugcaucaugaccagcuaccaguaccugaucauccagaacaccaccugggaggaccacugccaguucagcagacccagccccaucggcuaccugggccugcugagccagagaaccagagacaucuacaucagcagaagaagaagaggcaccuucaccuggacccugagcgacagcgagggcaacgagacccccggcggcuacugccugaccagauggaugcugaucgaggccgagcugaagugcuucggcaacaccgccguggccaagugcaacgagaagcacgacgaggaguucugcgacaugcugagacuguucgacuucugcaagcaggccaucagaagacugaaggcccccgcccagaugagcauccagcugaucaacaaggccgugaacgcccugaucaacgaccagcugaucaugaagaaccaccugagagacaucaugggcauccccuacugcaacuacagcaaguacugguaccugaaccacaccagcaccggcagaaccagccugcccagaugcuggcuggugagcaacggcagcuaccugaacgagacccacuucagcgacgacaucgagcagcaggccgacaacaugaucaccgagaugcugcagaaggaguaccuggacagacagggcaagaccccccugggccugguggaccuguucguguucagcaccagcuucuaccugaucagcaucuuccugcaccuggugaagauccccacccacagacacaucgugggcaagcccugccccaagccccacagacugaaccacaugggcaucugcagcugcggccuguacaagcagcccggcgugcccgugagauggaagagaugaggacuaguuauaagacugacuagcccgaugggccucccaacgggcccuccuccccuccuugcaccgagauuaaucaaaggcucuuuucagagccaccaaaaaaaaaaaaaaaaaaaaaaaaaaaaaaaaaaaaaaaaaaaaaaaaaaaaaaaaaaaaaaaaaaaaaaaaaaaaaaaaaaaaaaaaaaaaaaaaaaaaa

SEQ ID NO: 24475 - RNA, 1689 nt, Artificial Sequence
  mRNA product Design i-3 (hSL-A100) comprising derived and/or modified sequence from LASV(G1180-SLE-2010;Clade IV)__AIT17168__GPCmut2 (opt4)
aggagaaagcuuaccaugggccagaucgugaccuucuuccaggaggugccccacgugaucgaggaggugaugaacaucgugcugaucgcccugagcauccuggccgugcugaagggccuguacaacuucgccaccugcggccuggugggccugcugaccuuccugcugcugugcggcagaagcugcaccgccagcagauacaagggcguguacgagcugcagacccuggagcugaacauggagacccugaacaugugcaugccccugagcugcaccaagaacaacagccaccacuacaucauggugggcaacgagaccggccuggagcugacccugaccaacaccagcaucaucaaccacaaguucugcaaccugagcgacgcccacaagaagaaccuguacgaccacgcccugaugagcaucaucagcaccuuccaccugagcauccccaacuucaaccaguacgaggccaugagcugcgacuucaacggcggcaagaucagcgugcaguacaaccugagccacagcuacgccggcgacgccgccaaccacugcggcaccguggccaacggcgugcugcagaccuucaugagaauggccuggggcggcagcuacaucgcccuggacagcggccacggcagcugggacugcaucaugaccagcuaccaguaccugaucauccagaacaccaccugggaggaccacugccaguucagcagacccagccccaucggcuaccugggccugcugagccagagaaccagagacaucuacaucagcagaagaagaagaggcaccuucaccuggacccugagcgacagcgagggcaaggacacccccggcggcuacugccugaccagauggaugcugaucgaggccgagcugaagugcuucggcaacaccgccguggccaagugcaacgagaagcacgacgaggaguucugcgacaugcugagacuguucgacuucugcaagcaggccauccagagacugaaggcccccgcccagaugagcauccagcugaucaacaaggccgugaacgcccugaucaacgaccagcugaucaugaagaaccaccugagagacaucaugggcauccccuacugcaacuacagcaaguacugguaccugaaccacaccaccaccggcaagaccagccugcccaagugcuggcuggugagcaacggcagcuaccugaacgagacccacuucagcgacgacaucgagcagcaggccgacaacaugaucaccgagaugcugcagaaggaguacauggagagacagggcaagaccccccugggccugguggaccuguucguguucagcaccagcuucuaccugaucagcaucuuccugcaccuggugaagauccccacccacagacacaucgugggcaagagcugccccaagccccacagacugaaccacaugggcaucugcagcugcggccuguacaagcagcccggcgugcccgugaaguggaagagaugaggacuaguuauaagacugacuagcccgaugggccucccaacgggcccuccuccccuccuugcaccgagauuaaucaaaggcucuuuucagagccaccaaaaaaaaaaaaaaaaaaaaaaaaaaaaaaaaaaaaaaaaaaaaaaaaaaaaaaaaaaaaaaaaaaaaaaaaaaaaaaaaaaaaaaaaaaaaaaaaaaaaa

SEQ ID NO: 24476 - RNA, 1689 nt, Artificial Sequence
  mRNA product Design i-3 (hSL-A100) comprising derived and/or modified sequence from LASV(G1442-SLE-2011;Clade IV)__AIT17180__GPCmut2 (opt4)
aggagaaagcuuaccaugggccagaucgugaccuucuuccaggaggugccccacgugaucgaggaggugaugaacaucgugcugaucgcccugagcauccuggccgugcugaagggccuguacaacguggccaccugcggccugaucggccuggugaccuuccugcugcugugcggcagaagcugcaccaccacccuguacaagggcguguacgagcugcagacccuggagcugaacauggagacccugaacaugugcaugccccugagcugcaccaagaacaacagccaccacuacaucagagugggcaacgagaccggccuggagcugacccugaccaacaccagcaucaucaaccacaaguucugcaaccugagcgacgcccacaagaagaaccuguacgaccacgcccugaugagcaucaucagcaccuuccaccugagcauccccaacuucaaccaguacgaggccaugagcugcgacuucaacggcggcaagaucagcgugcaguacaaccugagccacagcuacgccggcgacgccgccaaccacugcggcaccguggccaacggcgugcugcagaccuucaugagaauggccuggggcggcagcuacaucgcccuggacagcggcagaggcaacugggacugcaucaugaccagcuaccaguaccugaucauccagaacaccaccugggacgaccacugccaguucagcagacccagccccaucggcuaccugggccugcugagccagagaaccagagacguguacaucagcagaagaagaagaggcaccuucaccuggacccugagcgacagcgagggcaaggacacccccggcggcuacugccugaccagauggaugcugaucgaggccgagcugaagugcuucggcaacaccgccguggccaagugcaacgagaagcacgacgaggaguucugcgacaugcugagacuguucgacuucugcaagcaggccauccagagacugaaggcccccgcccagaugagcauccagcugaucaacaaggccgugaacgcccugaucaacgaccagcugaucaugaagaaccaccugagagacaucaugggcauccccuacugcaacuacagcaaguacugguaccugaacaacaccgccaccggcaagaccagccugcccaagugcuggcugaucagcaacggcagcuaccugaacgagacccacuucagcgacgacaucgagcaggaggccgacaacaugaucaccgagaugcugcagaaggaguacauggagagacagggcaagaccccccugggccugguggaccuguucguguucagcaccagcuucuaccugaucagcaucuuccugcaccuggugaagauccccacccacagacacaucgugggcaagagcugccccaagccccacagacugaaccacaugggcaucugcagcugcggccuguacaagcagcccggcgugcccgugagauggaagagaugaggacuaguuauaagacugacuagcccgaugggccucccaacgggcccuccuccccuccuugcaccgagauuaaucaaaggcucuuuucagagccaccaaaaaaaaaaaaaaaaaaaaaaaaaaaaaaaaaaaaaaaaaaaaaaaaaaaaaaaaaaaaaaaaaaaaaaaaaaaaaaaaaaaaaaaaaaaaaaaaaaaaa

SEQ ID NO: 24477 - RNA, 1689 nt, Artificial Sequence
  mRNA product Design i-3 (hSL-A100) comprising derived and/or modified sequence from LASV(G3010-SLE-2013;Clade IV)__AIT17344__GPCmut2 (opt4)
aggagaaagcuuaccaugggccagaucgugaccuucuuccaggaggugccccacgugaucgaggaggugaugaacaucgugcugaucgcccugagcauccuggccgugcugaagggccuguacaacuucgccaccugcggccuggugggccuggugaccuuccugcugcugugcggcagaagcugcaccaccagccuguacaagggcguguacgagcugcagacccuggagcugaacauggagacccugaacaugugcaugccccugagcugcaccaagaacaacagccaccacuacaucauggugggcaacgagaccggccuggagcugacccugaccaacaccagcaucaucaaccacaaguucugcaaccugagcgacgcccacaagaagaaccuguacaaccacgcccugaugagcaucaucagcaccuuccaccugagcauccccaacuucaaccaguacgaggccaugagcugcgacuucaacggcggcaagaucagcgugcaguacaaccugagccacagcuacgccggcgacgccgccagccacugcggcaccguggccaacggcgugcugcagaccuucaugagaauggccuggggcggcagcuacaucgcccuggacagcggcuacggcaagugggacugcaucaugaccagcuaccaguaccugaucauccagaacaccaccugggaggaccacugccaguucagcagacccagccccaucggcuaccugggccugcugagccagagaaccagagacaucuacaucagcagaagaagaagaggcaccuucaccuggacccugagcgacagcgagggcaaggacacccccggcggcuacugccugaccagauggaugcugaucgaggccgagcugaagugcuucggcaacaccgccguggccaagugcaacgagaagcacgacgaggaguucugcgacaugcugagacuguucgacuucugcaagcaggccauccagagacugaagacccccgcccagaugagcauccagcugaucaacaaggccgugaacgcccugaucaacgaccagcugaucaugaagaaccaccugagagacaucaugggcauccccuacugcaacuacagcaaguacugguaccugaaccacaccaccaccggcaagaccagccugcccaagugcuggcuggugagcaacggcagcuaccugaacgagacccacuucagcgacgacaucgagcagcaggccgacaacaugaucaccgagaugcugcagaaggaguacauggagagacagggcaagaccccccugggccugguggaccuguucguguucagcaccagcuucuaccugaucagcaucuuccugcaccuggugaagauccccacccacagacacaucgugggcaagagcugccccaagccccacagacugaaccacaugggcaucugcagcugcggccuguacaagcagcccggcgugcccgugagauggaagagaugaggacuaguuauaagacugacuagcccgaugggccucccaacgggcccuccuccccuccuugcaccgagauuaaucaaaggcucuuuucagagccaccaaaaaaaaaaaaaaaaaaaaaaaaaaaaaaaaaaaaaaaaaaaaaaaaaaaaaaaaaaaaaaaaaaaaaaaaaaaaaaaaaaaaaaaaaaaaaaaaaaaaa

SEQ ID NO: 24478 - RNA, 1689 nt, Artificial Sequence
  mRNA product Design i-3 (hSL-A100) comprising derived and/or modified sequence from LASV(G502-SLE-2009;Clade IV)__AIT17126__GPCmut2 (opt4)
aggagaaagcuuaccaugggccagaucgugaccuucuuccaggaggugccccacgugaucgaggaggugaugaacaucgugcugaucgcccugagcauccuggccgugcugaagggccuguacaacuucgccaccugcggccuggugggccugcugaccuuccugcugcugugcggcagaagcugcaccaccggccuguacaagggcguguacgagcugcagacccuggagcugaacauggagacccugaacaugugcaugccccugagcugcaccaagaacaacagccaccacuacaucauggugggcaacgagaccggccuggagcugacccugaccaacaccagcaucaucaaccacaaguucugcaaccugagcgacgcccacaagaagaaccuguacgaccacgcccugaugagcaucaucagcaccuuccaccugagcauccccaacuucaaccaguacgaggccaugagcugcgacuucaacggcggcaagaucagcgugcaguacaaccugagccacagcuacgccggcgacgccgccgaccacugcggcaccguggccaacggcgugcugcagaccuucaugagaauggccuggggcggcagcuacaucgcccuggacagcggcagaggcagaugggacugcaucaugaccagcuaccaguaccugaucauccagaacaccaccugggaggaccacugccaguucagcagacccagccccaucggcuaccugggccugcugagccagagaaccagagacaucuacaucagcagaagaagaagaggcaccuucaccuggacccugagcgacagcgagggcaaggacacccccggcggcuacugccugaccagauggaugcugaucgaggccgagcugaagugcuucggcaacaccgccguggccaagugcaacgagaagcacgacgaggaguucugcgacaugcugagacuguucgacuucugcaagcaggccauccagagacugaaggcccccgcccagaugagcauccagcugaucaacaaggccgugaacgcccugaucaacgaccagcuggugaugaagaaccaccugagagacaucaugggcauccccuacugcaacuacagcagauacugguaccugaaccacaccaccaccggcagaaccagccugcccaagugcuggcuggugagcaacggcagcuaccugaacgagacccacuucagcgacgacaucgagcagcaggccgacaacaugaucaccgagaugcugcagaaggaguacauggagagacagggcaagaccccccugggccugguggaccuguucguguucagcaccagcuucuaccugaucagcaucuuccugcaccuggugaagauccccacccacagacacaucgugggcaagagcugccccaagccccacagacugaaccacaugggcaucugcagcugcggccuguacaagcagcccggcgugcccgugaaguggaagagaugaggacuaguuauaagacugacuagcccgaugggccucccaacgggcccuccuccccuccuugcaccgagauuaaucaaaggcucuuuucagagccaccaaaaaaaaaaaaaaaaaaaaaaaaaaaaaaaaaaaaaaaaaaaaaaaaaaaaaaaaaaaaaaaaaaaaaaaaaaaaaaaaaaaaaaaaaaaaaaaaaaaaa

SEQ ID NO: 24479 - RNA, 1689 nt, Artificial Sequence
  mRNA product Design i-3 (hSL-A100) comprising derived and/or modified sequence from LASV(G733-SLE-2010;Clade IV)__AIT17154__GPCmut2 (opt4)
aggagaaagcuuaccaugggccagaucgugaccuucuuccaggaggugccccacgugaucgaggaggugaugaacaucgugcugaucgcccugagcauccuggccgugcugaagggccuguacaacuucgccaccugcggcaucgugggccuggugagcuuccugcugcugugcggcagaagcugcaccaccagccuguacaagggcguguacgagcugcagacccuggagcugaacauggagacccugaacaugugcaugccccugagcugcaccaagaacaacagccaccacuacaucauggugggcaacgagaccggccuggagcugacccugaccaacaccagcaucaucaaccacaaguucugcaaccugagcgacgcccacaagaagaaccuguacgaccacgcccugaugagcaucaucagcaccuuccaccugagcauccccaacuucaaccaguacgaggccaugagcugcgacuucaacggcggcaagaucagcgugcaguacaaccugagccacagcuacgccggcgacgccgccaaccacugcggcaccaucgccaacggcgugcugcagaccuucaugagaauggccuggggcggcagcuacaucgcccuggacagcggcagagacagaugggacugcaucaugaccagcuaccaguaccugaucauccagaacaccaccugggaggaccacugccaguucagcagacccagccccaucggcuaccugggccugcugagccagagaaccagagacaucuacaucagcagaagaagaagaggcaccuucaccuggacccugagcgacagcgagggcaaggacacccccggcggcuacugccugaccagauggaugcugaucgaggccgagcugaagugcuucggcaacaccgccguggccaagugcaacgagaagcacgacgaggaguucugcgacaugcugagacuguucgacuucugcaagcaggccauccagagacugaaggcccccgcccagaugagcauccagcugaucaacaaggccgugaacgcccugaucaacgaccagcugaucaugaagaaccaccugagagacaucaugggcauccccuacugcaacuacagcaaguacugguaccugaaccacaccaccaccggcaagaccagccugcccaagugcuggcuggugagcaacggcagcuaccugaacgagacccacuucagcgacgacaucgagcagcaggccgacaacaugaucaccgagaugcugcagaaggaguacauggagagacagggcaagaccccccugggccugguggaccuguucguguucagcaccagcuucuaccugaucagcaucuuccugcaccuggugaagauccccacccacagacacguggugggcaagagcugccccaagccccacagacugaaccacaugggcaucugcagcugcggccuguacggccagcccggcgugcccgugaaguggaagagaugaggacuaguuauaagacugacuagcccgaugggccucccaacgggcccuccuccccuccuugcaccgagauuaaucaaaggcucuuuucagagccaccaaaaaaaaaaaaaaaaaaaaaaaaaaaaaaaaaaaaaaaaaaaaaaaaaaaaaaaaaaaaaaaaaaaaaaaaaaaaaaaaaaaaaaaaaaaaaaaaaaaaa

SEQ ID NO: 24480 - RNA, 1689 nt, Artificial Sequence
  mRNA product Design i-3 (hSL-A100) comprising derived and/or modified sequence from MOPV/LASV reassortant(IGS-1;Clade IV)__AFY05576__GPCmut2 (opt4)
aggagaaagcuuaccaugggccagaucgugaccuucuuccaggaggugccccacgugaucgaggaggugaugaacaucgugcugaucgcccugagcgugcuggccgugcugaagggccuguacaacuucgccaccugcggccuggugggccuggugaccuuccugcugcugugcggcagaagcugcaccaccagccuguacaagggcguguacgagcugcagacccuggagcugaacauggagacccugaacaugugcaugccccugagcugcaccaagaacaacagccaccacuacaucauggugggcaacgagaccggccuggagcugacccugaccaacaccagcaucaucaaccacaaguucugcaaccugagcgacgcccacaagaagaaccuguacgaccacgcccugaugagcaucaucagcaccuuccaccugagcauccccaacuucaaccaguacgaggccaugagcugcgacuucaacggcggcaagaucagcgugcaguacaaccugagccacagcuacgccggcgacgccgccaaccacugcggcaccguggccaacggcgugcugcagaccuucaugagaauggccuggggcggcagcuacaucgcccuggacagcggcagaggcaacugggacugcaucaugaccagcuaccaguaccugaucauccagaacaccaccugggaggaccacugccaguucagcagacccagccccaucggcuaccugggccugcugagccagagaaccagagacaucuacaucagcagaagaagaagaggcaccuucaccuggacccugagcgacagcgagggcgaggacacccccggcggcuacugccugaccagauggaugcugaucgaggccgagcugaagugcuucggcaacaccgccguggccaagugcaacgagaagcacgacgaggaguucugcgacaugcugagacuguucgacuucugcaagcaggccauccagagacugaaggcccccgcccagaugagcauccagcugaucaacaaggccgugaacgcccugaucaacgaccagcugaucaugaagaaccaccugagagacaucaugggcauccccuacugcaacuacagcaaguacugguaccugaaccacaccaccaccggcagaaccagccugcccaagugcuggcuggugagcaacggcagcuaccugaacgagacccacuucagcgacgacaucgagcagcaggccgacaacaugaucaccgagaugcugcagaaggaguacauggagagacagggcaagaccccccugggccugguggaccuguucguguucagcaccagcuucuaccugaucagcaucuuccugcaccuggugaagauccccacccacagacacaucgugggcaagagcugccccaagccccacagacugaaccacaugggcaucugcagcugcggccuguacaagcagcccggcgugcccgugaaguggaagagaugaggacuaguuauaagacugacuagcccgaugggccucccaacgggcccuccuccccuccuugcaccgagauuaaucaaaggcucuuuucagagccaccaaaaaaaaaaaaaaaaaaaaaaaaaaaaaaaaaaaaaaaaaaaaaaaaaaaaaaaaaaaaaaaaaaaaaaaaaaaaaaaaaaaaaaaaaaaaaaaaaaaaa

SEQ ID NO: 24481 - RNA, 1689 nt, Artificial Sequence
  mRNA product Design i-3 (hSL-A100) comprising derived and/or modified sequence from LASV(LM765-SLE-2012;Clade IV)__AIT17814__GPCmut2 (opt4)
aggagaaagcuuaccaugggccagaucgugaccuucuuccaggaggugccccacgugaucgaggaggugaugaacaucgugcugaucgcccugagcauccuggccgugcugaagggccuguacaacuucgccaccugcggccuggugggccuggugaccuuccugcugcugugcggcagaagcugcaccaccagccuguacaagggcguguacgagcugcagacccuggagcugaacauggagacccugaacaugugcaugccccugagcugcaccaagaacaacagccaccacuacaucauggugggcaacgagaccggccuggagcugacccugaccaacaccagcaucaucgaccacaaguucugcaaccugagcgacgcccacagaaagaaccuguacgaccacgcccugaugagcaucaucagcaccuuccaccugagcauccccaacuucaaccaguacgaggccaugagcugcgacuucaacggcggcaagaucagcgugcaguacaaccugagccacagcuacgccaaggacgccgccgaccacugcggcaccguggccaacggcgugcugcagaccuucaugagaauggccuggggcggcagcuacaucgcccuggacagcggcagaggcagaugggacugcaucaugaccagcuaccaguaccugaucauccagaacaccaccugggaggaccacugccaguucagcagacccagccccaucggcuaccugggccugcugagccagagaaccagagacaucuacaucagcagaagaagaagaggcaccuucaccuggacccugagcgacagcgagggcaaggacacccccggcggcuacugccugaccagauggaugcugaucgaggccgagcugaagugcuucggcaacaccgccguggccaagugcaacgagaagcacgacgaggaguucugcgacaugcugagacuguucgacuucugcaagcaggccauccagagacugaaggcccccgcccagaugagcauccagcugaucaacaaggccgugaacgcccugaucaacgaccagcugaucaugaagaaccaccugagagacaucaugggcauccccuacugcaacuacagcaaguacugguaccugaaccacaccaccaccggcaagaccagccugcccaagugcuggcuggugagcaacggcagcuaccugaacgagacccacuucagcgacgacaucgagcagcaggccgacaacaugaucaccgagaugcugcagaaggaguacauggagagacagggcaagaccccccugggccugguggaccuguucguguucagcaccagcuucuaccugaucagcaucuuccugcaccuggugaagauccccacccacagacacaucgugggcaagcccugccccaagccccacagacugaaccacaugggcaucugcagcugcggccuguacaagcagcccggcgugcccgugaaguggaagagaugaggacuaguuauaagacugacuagcccgaugggccucccaacgggcccuccuccccuccuugcaccgagauuaaucaaaggcucuuuucagagccaccaaaaaaaaaaaaaaaaaaaaaaaaaaaaaaaaaaaaaaaaaaaaaaaaaaaaaaaaaaaaaaaaaaaaaaaaaaaaaaaaaaaaaaaaaaaaaaaaaaaaa

SEQ ID NO: 24482 - RNA, 1689 nt, Artificial Sequence
  mRNA product Design i-3 (hSL-A100) comprising derived and/or modified sequence from LASV(LM776-SLE-2012;Clade IV)__AIT17824__GPCmut2 (opt4)
aggagaaagcuuaccaugggccagaucgugaccuucuuccaggaggugccccacgugaucgaggaggugaugaacaucgugcugaucgcccugagcauccuggccgugcugaagggccuguacaacuucgccaccugcggccuggugggccuggugaccuuccugcugcugugcggcagaagcugcaccaccagcguguacaagggcguguacgagcugcagacccuggagcugaacauggagacccugaacaugugcaugccccugagcugcaccaagaacaacagccaccacuacaucauggugggcaacgagaccggccuggagcugacccugaccaacaccagcaucaucaaccacaaguucugcaaccugagcgacgcccacaagaagaaccuguacgaccacgcccugaugagcaucaucagcaccuuccaccugagcauccccaacuucaaccaguacgaggccaugagcugcgacuucaacggcggcaagaucagcgugcaguacaaccugagccacagcuacgccggcgacgccgccaaccacugcggcaccguggccaacggcgugcugcagaccuucaugagaauggccuggggcggcagcuacaucgcccuggacagcggccacggcaagugggacugcaucaugaccagcuaccaguaccugaucauccagaacaccaccugggaggaccacugccaguucagcagacccagccccaucggcuaccugggccugcugagccagagaaccagagacaucuacaucagcagaagaagaagaggcaccuucaccuggacccugagcgacagcgagggcaaggacacccccggcggcuacugccugaccagauggaugcugaucgaggccgagcugaagugcuucggcaacaccgccguggccaagugcaacgagaagcacgacgaggaguucugcgacaugcugagacuguucgacuucugcaagcaggccauccagagacugaaggcccccgcccagaugagcauccagcugaucaacaaggccgugaacgcccugaucaacgaccagcugaucaugaagaaccaccugagagacaucaugggcauccccuacugcaacuacagcaaguacugguaccugaaccacaccaccaccggcaagaccagccugcccaagugcuggcuggugagcaacggcagcuaccugaacgagacccacuucagcgacgacaucgagcagcaggccgacaacaugaucaccgagaugcugcagaaggaguacauggagagacagggcaagaccccccugggccugguggaccuguucguguucagcaccagcuucuaccugaucagcaucuuccugcaccuggugaagauccccacccacagacacaucgugggcaagagcugccccaagccccacagacugaaccacaugggcaucugcagcugcggccuguacaagcagcccggcgugcccgugagauggaagagaugaggacuaguuauaagacugacuagcccgaugggccucccaacgggcccuccuccccuccuugcaccgagauuaaucaaaggcucuuuucagagccaccaaaaaaaaaaaaaaaaaaaaaaaaaaaaaaaaaaaaaaaaaaaaaaaaaaaaaaaaaaaaaaaaaaaaaaaaaaaaaaaaaaaaaaaaaaaaaaaaaaaaa

SEQ ID NO: 24483 - RNA, 1689 nt, Artificial Sequence
  mRNA product Design i-3 (hSL-A100) comprising derived and/or modified sequence from LASV(Mad39;Clade IV)__ANH09722__GPCmut2 (opt4)
aggagaaagcuuaccaugggccagaucgugaccuucuuccaggaggugccccacgugaucgaggaggugaugaacaucgugcugaucgcccugagcauccuggccgugcugaagggccuguacaacguggccaccugcggccugaucggccuggugaccuuccugcugcugugcggcagaagcugcaccaccacccuguacaagggcguguacgagcugcaggcccuggagcugaacauggagacccugaacaugugcaugccccugagcugcaccaagaacaacagccaccacuacaucagagugggcaacgagaccggccuggagcugacccugaccaacaccagccugaucaaccacaaguucugcaaccugagcgacgcccacaagaagaaccuguacgaccacgcccugaugagcaucaucagcaccuuccaccugagcauccccaacuucaaccaguacgaggccaugagcugcgacuucaacgacggcaagaucagcgugcaguacaaccugagccacaccuacgccggcgacaccgccaaccacugcggcaccguggccaacggcgugcugcagaccuucaugagaauggccuggggcggcagcuacaucgcccuggacagcggcagaggcggcugggacugcaucaugaccagcuaccaguaccugaucauccagaacaccaccugggaggaccacugccaguucagcagacccagccccaucggcuaccugggccugcugagccagagaaccagagacaucuacaucagcagaagaagaagaggcaccuucaccuggacccugagcgacagcgagggcaaggacacccccggcggcuacugccugaccagauggaugcugaucgaggccgagcugaagugcuucggcaacaccgccguggccaagugcaacgagaagcacgacgaggaguucugcgacaugcugagacuguucgacuucugcaagcaggccauccagagacugaaggcccccgcccagaugagcauccagcugaucaacaaggccgugaacgcccugaucaacgaccagcugaucaugaagaaccaccugagagacaucaugggcauccccuacugcaacuacagcaaguacugguaccugaaccacaccgugaccggcaagaccagccugcccaagugcuggcuggugagcaacggcagcuaccugaacgagacccacuucagcgacgacaucgagcagcaggccgacaacaugaucaccgagaugcugcagaaggaguacauggagagacagggcaagaccccccugggccugguggaccuguucguguucagcaccagcuucuaccugaucagcaucuuccugcaccuggugaagauccccacccacagacacguggugggcaagcccugccccaagccccacagacugaaccacaugggcaucugcagcugcggcuucuacaagcagcccggcgugcccgugagauggaagagaugaggacuaguuauaagacugacuagcccgaugggccucccaacgggcccuccuccccuccuugcaccgagauuaaucaaaggcucuuuucagagccaccaaaaaaaaaaaaaaaaaaaaaaaaaaaaaaaaaaaaaaaaaaaaaaaaaaaaaaaaaaaaaaaaaaaaaaaaaaaaaaaaaaaaaaaaaaaaaaaaaaaaa

SEQ ID NO: 24484 - RNA, 1689 nt, Artificial Sequence
  mRNA product Design i-3 (hSL-A100) comprising derived and/or modified sequence from LASV(Z0947-SLE-2011;Clade IV)__AIT17840__GPCmut2 (opt4)
aggagaaagcuuaccaugggccagaucgugaccuucuuccaggaggugccccacgugaucgaggaggugaugaacaucgugcugaucgcccugagcauccuggccgugcugaagggccuguacaacuucgccaccugcggccuggugggccuggugaccuuccugcugcugugcggcagaagcugcaccaucagccuguacaagggcguguacgagcugcagacccuggagcugaacauggagacccugaacaugugcaugccccugagcugcaccaagaacaacagccaccacuacaucauggugggcaacgagaccggccuggagcugacccugaccaacaccagcaucaucaaccacaaguucugcaaccugagcgacgcccacaagaagaaccuguacgaccacgcccugaugagcaucaucagcaccuuccaccugagcauccccaacuucaaccaguacgaggccaugagcugcgacuucaacggcggcaagaucagcgugcaguacaaccugagccacagcuacgccggcgacgccgccaaccacugcggcaccguggccaacggcgugcugcagaccuucaugagaauggccuggggcggcagcuacaucgcccuggacagcggcagagacagaugggacugcaucaugaccagcuaccaguaccugaucauccagaacaccaccugggaggaccacugccaguucagcagacccagccccaucggcuaccugggccugcugagccagagaaccagagacaucuacaucagcagaagaagaagaggcaccuucaccuggacccugagcgacagcgagggcaaggacacccccggcggcuacugccugaccagauggaugcugaucgaggccgagcugaagugcuucggcaacaccgccguggccaagugcaacgagaagcacgacgaggaguucugcgacaugcugagacuguucgacuucugcaagcaggccauccagagacugaaggcccccgcccagaugagcauccagcugaucaacaaggccgugaacgcccugaucaacgaccagcugaucaugaagaaccaccugagagacaucaugggcauccccuacugcaacuacagcaaguacugguaccugaaccacaccaccaccggcaagaccagccugcccaagugcuggcuggugagcaacggcagcuaccugaacgagacccacuucagcgacgacaucgagcagcaggccgacaacaugaucaccgagaugcugcagaaggaguacauggagagacagggcaagaccccccugggccugguggaccuguucguguucagcaccagcuucuaccugaucagcaucuuccugcaccuggugaagauccccacccacagacacaucgugggcaagcccugccccaagccccacagacugaaccacaugggcaucugcagcugcggccuguacaagcagcccggcgugcccgugaaguggaagagaugaggacuaguuauaagacugacuagcccgaugggccucccaacgggcccuccuccccuccuugcaccgagauuaaucaaaggcucuuuucagagccaccaaaaaaaaaaaaaaaaaaaaaaaaaaaaaaaaaaaaaaaaaaaaaaaaaaaaaaaaaaaaaaaaaaaaaaaaaaaaaaaaaaaaaaaaaaaaaaaaaaaaa

SEQ ID NO: 24485 - RNA, 1689 nt, Artificial Sequence
  mRNA product Design i-3 (hSL-A100) comprising derived and/or modified sequence from LASV(Josiah;Clade IV)__NP_694870__GPCmut2 (opt5)
aggagaaagcuuaccaugggccagaucgugaccuucuuucaagaggucccccacguuauugaagaggugaugaacaucgugcugauugcccucagcguccuggcugugcuuaaggggcuguacaauuucgccacaugcggacucguuggccuggugacguuucuucugcucugugggagauccugcaccacaucucuguauaaaggagucuacgaacugcagacccucgagcugaacauggaaacacuuaauauguguaugccucugagcugcaccaagaacaauucccaucacuauaucauggugggcaacgagacagggcucgagcugacccuuacgaauaccucuauuaucaaccauaaauucuguaaucugagcgacgcgcacaagaaaaaccucuacgaucaugcucugauguccaucauuucuacauuucaccugagcaucccgaauuucaaccaguaugaagccauguccugcgacuuuaauggaggcaagauuagcguucaguacaaccucucucacuccuaugccggcgaugcugccaaucauugugggaccguggcuaacggaguccugcaaacauucaugcggauggccuggggcgggagcuacaucgcgcuugacucuggacgcggcaacugggauugcauuaugaccuccuaccaguaucugaucauucagaauacgacaugggaggaccacugucaguuuagcagacccucuccuaucggguaccucggacugcuuucccaacggacccgcgauaucuauauuagcagacggcgcagaggcacauucaccuggacccuguccgacucugaaggcaaggauacacccgggggauacugccucacgcgguggaugcugaucgaggccgagcugaaauguuuuggcaacaccgcuguggccaagugcaaugaaaaacaugacgaggaguucugcgauaugcuccgccuguuugacuucuguaagcaggcuauucagagacuuaaagccccugcgcagaugagcauccaacugauuaacaaggccgugaaugcucucaucaacgaucagcugaucaugaagaaucaccuucgggacauuauggggauccccuauugcaacuacuccaaauauugguaccugaaucacacaaccacaggacgcaccagccucccuaaguguuggcuggucucuaacggcuccuaccugaaugaaacgcauuucagcgacgauauugaacagcaagccgacaacaugaucacagagaugcuccagaaagaguauauggaaagacaggggaagaccccgcugggacuuguugaucuguuuguguucucuaccagcuuuuaccucauuuccaucuuccugcaccuggugaaaauccccacacaucggcacauugucggcaagucuugcccuaaaccccaucgccuuaaucacaugggcaucuguagcugcgggcucuauaagcagccuggagugcccguuaaguggaaaagaugaggacuaguuauaagacugacuagcccgaugggccucccaacgggcccuccuccccuccuugcaccgagauuaaucaaaggcucuuuucagagccaccaaaaaaaaaaaaaaaaaaaaaaaaaaaaaaaaaaaaaaaaaaaaaaaaaaaaaaaaaaaaaaaaaaaaaaaaaaaaaaaaaaaaaaaaaaaaaaaaaaaaa

SEQ ID NO: 24486 - RNA, 1686 nt, Artificial Sequence
  mRNA product Design i-3 (hSL-A100) comprising derived and/or modified sequence from LASV(LP;Clade I)__AAF86701__GPCmut2 (opt5)
aggagaaagcuuaccaugggccagaucauuaccuucuuucaagaggugccccacgucaucgaagagguuaugaacauugugcugaucgcccucagccugcuugcuauucugaaggggcucuacaauaucgccacaugcggaaucauuggccugguggcguuccuuuuucugugugggaaauccugcucucucacgcugaagggaggcuaugaacugcagacccucgagcugaacauggaaacacuuaauauguguaugccucugagcugcaccaaaaacuccucucaucacuacaucagagucgggaaugagacaggacucgagcugacccuuacaaacaccagcauuaucaaucauaaguucuguaaccuguccgacgcucacaaaaagaaucucuaugaucaugcccugaugucuauuaucagcacguuucaccuguccauuccgaacuucaaucaguacgaagccaugagcugcgacuuuaacggcggcaagaucucugugcaguauaaucucucccacagcuacgcuggggaugccgcugagcauuguggaaccguugccaacggcgugcugcaaacauucaugcggauggcguggggagggcgcuauaucgcccuugacucuggcaaagggaauugggauugcauuaugaccuccuaccaguaccugaucauucagaacacaaccugggaagaccacugucaguuuagcagacccucuccuaucggauaucucggccugcuuucccaacggacgcgcgauauuuacaucagcagacggcgcagaggcacauucaccuggacacuguccgacucugaggggaacgagacccccggaggcuauugccucacccgguggaugcugaucgaagcugagcugaaguguuuugggaauacagccgucgcuaaaugcaacgaaaagcaugaugaggaguucugcgacaugcuccgccuguuugauuucuguaaacaggccauuagacggcuuaaggcgccugcccagaugagcauccagcugauuaauaaggcugugaacgcccucaucaaugaccaacugauuaugaaaaaccaccuucgcgauaucaugggaauccccuacugcaauuauuccaaguacugguaucugaaccacacgagcucuggcagaaccucccucccuaaauguuggcugauuagcaaugggucuuaccugaacgaaacacaguucagcgacgacaucgagcagcaagcugauaauaugauuaccgaaaugcuccagaaggaguacaucgaacggcagggaaaaacaccgcugggccuuguugacauuuuuaucuucuccaccucuuuuuaucugauuagcaucuuccuccaucugaucaagauucccacgcaccgccauaucgugggcaaaccuugccccaagccucacagacugaaccauaugggggucuguuccugcggacuuuacaagcaccccggcgugccgacaaaauggaagcggugaggacuaguuauaagacugacuagcccgaugggccucccaacgggcccuccuccccuccuugcaccgagauuaaucaaaggcucuuuucagagccaccaaaaaaaaaaaaaaaaaaaaaaaaaaaaaaaaaaaaaaaaaaaaaaaaaaaaaaaaaaaaaaaaaaaaaaaaaaaaaaaaaaaaaaaaaaaaaaaaaaaaa

SEQ ID NO: 24487 - RNA, 1686 nt, Artificial Sequence
  mRNA product Design i-3 (hSL-A100) comprising derived and/or modified sequence from LASV(803213;Clade II)__AAF86703__GPCmut2 (opt5)
aggagaaagcuuaccaugggccagaucauuaccuucuuucaagaggugccccacgucaucgaagagguuaugaacauugugcugaucgcccucagccugcuugcuauucugaaggggaucuacaauguggccacaugcggacucuucggccugaucuccuuucuucugcucugugggagaucuugcagcgucacguauaaaggaguguacgaacugcagacccuggagcucaacauggcgaaucugaacauguguaugccucuuuccugcacaaagaauaacucucaucacuauauuaugguuggcaaugaaaccgggcuggagcucacacugaccaacacaagcaucauuaaucauaaauucuguaaccuuuccgacgcucacaagaaaaaucuguacgaucaugcccucaugucuaucauuagcaccuuucaccuguccaucccgaacuucaaucaguaugaggccaugagcugcgacuuuaacggaggcaagauuucugugcaguacaaucugucccacagcuucgcugucgaugccgcuaaccauuguggcacgaucgccaacggggugcuccaaaccuuuaugcggauggcguggggaggcucuuauaucgcccuggacuccgggaagggaaauugggauugcauuaugacaagcuaccaguaccuuaucauucagaacaccacaugggaagaccacugucaguucucucgccccuccccuaucggcuaucuggggcuccugagccaaagaacccgggauauuuacaucucccgcagacggcgcggaacguuuacauggacccuuucugacagcgagggcaaugaagcucccggcggguauugccugacaagauggaugcucaucgaggccgagcugaaauguuucggaaacaccgcuguugccaagugcaaugaaaaacaugaugaggaauuuugcgacaugcugcgccucuucgauuucuguaagcaggcgauuaaacggcugaagaccccugcccagauguccauccagcuuauuaacaaggcugugaaugcccugaucaacgaccaacucauuaugaaaaaucaccugagagauaucaugggcauccccuacugcaacuauagccgguacugguaucuuaaucacacagucacggggaagaccucucugccucgcuguuggcucguguccaacggaagcuaccugaaugagacacauuuuucugacgacauugaacagcaggcugauaacaugaucaccgagaugcugcaaaaagaguacauggacagacagggcaagacaccgcucgggcugguggaucuuuucgucuuuagcaccuccuucuaucugauuucuaucuuucuccaccugguuaaaauucccacgcaucggcacaucgugggaaagccuugccccaaaccucaucgccugaaucacaugggcauuuguagcugcggccuuuacaagcaccccggggugccggucaaguggaaaagaugaggacuaguuauaagacugacuagcccgaugggccucccaacgggcccuccuccccuccuugcaccgagauuaaucaaaggcucuuuucagagccaccaaaaaaaaaaaaaaaaaaaaaaaaaaaaaaaaaaaaaaaaaaaaaaaaaaaaaaaaaaaaaaaaaaaaaaaaaaaaaaaaaaaaaaaaaaaaaaaaaaaaa

SEQ ID NO: 24488 - RNA, 1686 nt, Artificial Sequence
  mRNA product Design i-3 (hSL-A100) comprising derived and/or modified sequence from LASV(GA391;Clade III)__CAA36645__GPCmut2 (opt5)
aggagaaagcuuaccaugggccagaucgugaccuucuuucaagaggucccccacguuauugaagaggugaugaacaucgugcugauugcccucagcauccuggcuauucuuaaggggcuguacaaugucgccacaugcggacucaucggccuggugacguuccuucugcucuccgggagaucuuguagccugaucuauaaaggaaccuacgaacugcagacacucgagcugaacauggaaacccuuaauaugugcaugccucuguccuguacaaagaacaauucucaucacuauauucggguuggcaacgagaccgggcucgagcugacacuuaccaauacgagcauccugaaccauaaauuuugcaaucucuccgacgcgcacaagcgcaaccuguacgaucauucucugaugagcauuaucuccaccuuccaccucagcauuccgaauuuuaaccaguaugaagcuaugucuugugacuucaauggaggcaaaaucacagugcaguacaaccugucccacagcuuugccgucgaugccgcuggccauugcgggacccuugccaauggagugcugcaaacauucaugagaauggcuuggggcgggucuuauauugcccucgacuccggacggggcaacugggauuguaucaugaccagcuaccaguaccugaucauucagaacacgacaugggacgaucacugccaguuuucucgccccuccccuaucggguaucuuggacugcucagccaaagaacccgggacauuuacaucucccgcagacggcgcggcacauucaccuggacccugucugauagcgagggcaaugaaacacccgggggauauugucugacgagauggaugcucauugaggcggagcugaagugcuuuggcaacaccgccguugcuaaguguaaugaaaaacaugacgaggaguucugcgauaugcuucggcuguuugacuucugcaagcaggccauccgcagacucaaaaccccugcucagauguccauccagcugauuaacaaggccgugaaugcgcuuaucaacgaucaacugauuaugaaaaaucaccuccgggacaucauggggauucccuacuguaacuauagccgcuacugguaucugaaucacacaucuacaggaaagaccucccugccuagaugcuggcucaucagcaacggcucuuaccugaaugaaacgaaguucagcgacgauaucgaacagcaggccgacaacaugauuacagagaugcuucaaaaagaguacaucgaucggcaggggaagaccccgcugggacucgucgaccuguuuguguucuccaccucuuuuuaucugauuagcaucuuccuucaucucgugaaaauucccacacacagacauaucgucggcaagccuugucccaaaccucaccgccugaaucauaugggcauuugcuccugugggcuguacaagcagcccggaguuccggugcgguggaaaagaugaggacuaguuauaagacugacuagcccgaugggccucccaacgggcccuccuccccuccuugcaccgagauuaaucaaaggcucuuuucagagccaccaaaaaaaaaaaaaaaaaaaaaaaaaaaaaaaaaaaaaaaaaaaaaaaaaaaaaaaaaaaaaaaaaaaaaaaaaaaaaaaaaaaaaaaaaaaaaaaaaaaaa

SEQ ID NO: 24489 - RNA, 1689 nt, Artificial Sequence
  mRNA product Design i-3 (hSL-A100) comprising derived and/or modified sequence from LASV(AV;Clade V)__CCA30314__GPCmut2 (opt5)
aggagaaagcuuaccaugggccagaucgugaccuucuuucaagaggucccccacguuauugaagaggugaugaacaucgugcugauugcccucagcauccuggcuguccuuaaggggcuguacaauauugccacaugcggacucaucggccugaucacguuccuucugcucugugggagauccugcucuagcaaccuguauaaaggaguguacgaacugcagucccucgaccugaauauggagacccuuaacauguguaugccucugucuugcacaaagaauaacagccaucacuauauucggguuggcaaugauaccgggcucgaacugacacuuaccaacacauccauccugaaucauaaauuuuguaaccucucugacgcgcacaagaaagaucuguacgaccaugcucugaugagcauuaucuccaccuuccaccucagcauuccgaauuuuaaccaguaugaggccaugucuugcgauuucaauggaggcaagaucuccgugcaguacaaccugagccacucuuaugccauugacgcugccaaucauuguggcacggucgcuaacgggauccuucaaaccuuuaugcgcauggccuggggaggcuccuacaucgcgcuggauagcgggagaggaaacugggacugcauuaugacaucuuaccaguaucucaucauucagaauaccacaugggagaaccacugucaguucucccggcccagcccuaucggcuaccuggggcuucugucccaacgcaccagagauauuuauaucucucggcgcagacggggaacguuuacauggacccucagcgacuccgaaggcaaugccacacccggcggguacugccugacccgcuggaugcugaucgaggcugaacucaaguguuucggaaacaccgccguggcuaaaugcaaugagaagcaugaugaggaauuuugcgacaugcugagacuuuucgauuuuuguaaacaggccauuagccggcugaagucuccugcgcagauguccauccagcucauuaacaaagccguuaaugcucugaucaacgaccaacuuauuaugaagaaucaucugcgcgacaucaugggcauccccuauugcaacuacagcaaguauugguaccucaaucacacaauuacggggaaaaccucucugccuaaguguuggcuggugagcaacggauccuaccucaaugagacacacuucucugaugacaucgaacagcaggccgauaacaugauuaccgagaugcugcaaaaagaauauauggagagacagggcaagacaccgcuugggcuggucgaccucuucguguuuagcaccuccuucuaccugaucagcauuuuucugcggcuugugaaaauccccacgcaccgccauauugucggaaagccuugccccaaaccucacagacucaaucauaugggcaucuguucuugcggccuguauaagcagcccgggguuccggugcgguggaagagaugaggacuaguuauaagacugacuagcccgaugggccucccaacgggcccuccuccccuccuugcaccgagauuaaucaaaggcucuuuucagagccaccaaaaaaaaaaaaaaaaaaaaaaaaaaaaaaaaaaaaaaaaaaaaaaaaaaaaaaaaaaaaaaaaaaaaaaaaaaaaaaaaaaaaaaaaaaaaaaaaaaaaa

SEQ ID NO: 24490 - RNA, 1686 nt, Artificial Sequence
  mRNA product Design i-3 (hSL-A100) comprising derived and/or modified sequence from LASV(Togo/2016/7082;Clade VI)__AMR44577__GPCmut2 (opt5)
aggagaaagcuuaccaugggccagaucauuaccuucuuucaagaggugccccacgucaucgaagagguuaugaacauugugcugaucgcccucagccugcuugcuauucugaaggggguguacaaugucgccacaugcggaaucaucggccucgugacguuccuguuucuuugugggagauccugcucucugauuuauaaaggaagcuacgaacuccagacccuggagcugaacauggaaacacucaauauguguaugccucuguccugcaccaagaacucuagccaucacuauauccggguuggcaaugagacagggcuugagcugacccucacaaacaccuccauuaucaaucauaaauucuguaaccugucugacgcgcacaagcgcaaucuuuacgaucaugcucugaugagcauucucuccacguuucaccugagcaucccgaacuucaaucaguaugaagccaugucuugcgacuuuaacggaggcaaaauuuccgugcaguacaaucugagccacgccuaugcugucgaugccgcugagcauuguggcaccguggccaacgggguucuccaaacauucaugagaauggcguggggaggcucuuacaucgcccuggacuccgggcggggaaauugggauugcaucaugaccagcuaccaguaucuuauuauccagaacacaaccugggaagaccacugucaguuuucucgccccuccccuauuggcuaccuggggcuccugagccaaagaacgcgggauaucuauauuucccgcagacggcgcggaacauucaccuggacacuuucugacagcgagggcaacgagacccccggcggguacugccugaccagauggaugcucaucgaagcugagcugaaguguuuuggaaauacagccguggcuaagugcaacgaaaaacaugaugaggaguucugcgacaugcugcggcucuuugauuucuguaagcaggccauccagcgccugaaauccccugcgcagaugagcauucaacuuaucaauaaggccgucaacgcucugauuaaugaccagcucaucaugaaaaaccaccugagagauaugaugggcauucccuauugcaauuacucuaaguauugguaccuuaaccacacguccagcgggcggaccucucugccuaaguguuggcucgugagcaauggauccuaccugaacgaaacacauuucucugacgacaucgagcagcaagccgauaauaugaucaccgaaaugcugcagaaagaguauauugaccgccagggcaagacaccgcucgggcugguggaucuuuuugucuucagcaccuccuuuuaccugaucagcauuuuccuccaccugaucaaaauucccacgcauagacacaucguuggaaagccuugccccaaaccucaucggcugaaccacaugggcauuuguucuugcggccuuuauaagcagcccggggugccgacaagauggaaacgcugaggacuaguuauaagacugacuagcccgaugggccucccaacgggcccuccuccccuccuugcaccgagauuaaucaaaggcucuuuucagagccaccaaaaaaaaaaaaaaaaaaaaaaaaaaaaaaaaaaaaaaaaaaaaaaaaaaaaaaaaaaaaaaaaaaaaaaaaaaaaaaaaaaaaaaaaaaaaaaaaaaaaa

SEQ ID NO: 24491 - RNA, 1686 nt, Artificial Sequence
  mRNA product Design i-3 (hSL-A100) comprising derived and/or modified sequence from LASV(KAK-428;Clade n.d. (VII))__ANH09740__GPCmut2 (opt5)
aggagaaagcuuaccaugggccagaucgugaccuucuuucaagaggucccccacguuauugaagaggugaugaacaucgugcugauugcccucagccugcuugcuauccugaaggggcucuacaauuucgccacaugcggagucauuggccugaucacguuucuucugcucugugggagauccugcucugcgaccuauaaaggacaguacgaacugcagacacuggagcucaacauggaaagccugaauauguguaugccucuuuccugcaccaagaacaauucucaucacuauauccgggcuggcaacaauacagggcuggagcucacccugacaaacaccagcauuaucucccauaaauucuguaaucuuucugacgcccacaagaaaaaccuguacgaucauacgcucaugagcauuaucaccacauuucaccuguccauuccgaauuucaaccaguaugaggccaugagcugcgacuuuaauggaggcaagaucucuauucaauacaaccugucccacagcuaugcuggcgaugccgcucagcauugugggaccguggccaauggaguucuccagacauucaugcgcauggcguggggcgggucuuaccuggcccuugacuccggaagacggggcugggauugcaucaucagcucuuaccaguaucugauuauccaaaacaccacgugggacgaucacugucaguuuucccgccccagcccuauuggguaccucggauucgugucccagaagacaagagacaucuauauuucucggcgcagacggggcaccuuuacauggacccugagcgauuccgaaggccaugacaugcccgggggauacugccuuacccgcuggaugcugaucgaggcugaucucaaauguuucggcaacacagccgucgcuaagugcaaugaaaaacacgacgaggaguuuugcgauauguggagacuguucgacuucuguaagcaggccauccaacggcugaaagcgccugcccagaugaacauucagcucaucaauaaggcugugaacgcccugauuaaugaccaacuuaugaugaagaaccaucugcgcgauaucauggggauucccuauugcaauuacagcaaauuuugguaucucaacaauacgaccacaggaagaaccucucugccucgguguuggcuuaucuccaacggcagcuaccugaaugaaacacacuucucugacgauaucgagcagcaggcugacaacaugauuaccgaaaugcuccagaaggaguacauggaucgccaagggaaaacgccgcugggacugguugaccucuuuguguucagcacauccuuuuaucugaucaccauuuuccuucaccuggucaagauccccacccauagacacauugugggcaaaccuugccccaagccucaucggcucaaucacaugggcaucuguucuugcgggcuguacaaacagcccggagugccggucagauggaagcgcugaggacuaguuauaagacugacuagcccgaugggccucccaacgggcccuccuccccuccuugcaccgagauuaaucaaaggcucuuuucagagccaccaaaaaaaaaaaaaaaaaaaaaaaaaaaaaaaaaaaaaaaaaaaaaaaaaaaaaaaaaaaaaaaaaaaaaaaaaaaaaaaaaaaaaaaaaaaaaaaaaaaaa

SEQ ID NO: 24492 - RNA, 1686 nt, Artificial Sequence; identical to SEQ ID NO: 24486
  mRNA product Design i-3 (hSL-A100) comprising derived and/or modified sequence from LASV(Pinneo-NIG-1969;Clade I)__AIT17836__GPCmut2 (opt5)

SEQ ID NO: 24493 - RNA, 1686 nt, Artificial Sequence
  mRNA product Design i-3 (hSL-A100) comprising derived and/or modified sequence from LASV(ISTH0009-NIG-2011;Clade II)__AIT17404__GPCmut2 (opt5)
aggagaaagcuuaccaugggccagaucauuaccuucuuucaagaggugccccacgucaucgaagagguuaugaacauugugcugaucgcccucagccugcuugcuauucugaaggggaucuacaauguggccacaugcggacucuucggccuggucuccuuucuucugcucugugggagaucuugcagcacgaccuauaaaggaguguacgaacugcagacacuggagcucgacauggcgucccugaacauguguaugccucuuucuugcaccaagaauaacagccaucacuauaucaugguuggcaaugaaacagggcuggagcucacccugacaaacaccuccauuaucaaucauaaauucuguaaccuuucugaugcucacaagaaaaaucuguacgaccaugcccucaugagcauuaucuccacguuucaccugagcauuccgaacuucaaucaguaugaggccaugucuugcgauuuuaacggaggcaagaucuccgugcaguacaaucugagccacgcuuaugccgucgacgcugccaaccauuguggcaccauugcgaauggggugcuccaaacauucaugcggauggccuggggaggcucuuacaucgcucuggauuccgggaagggaagcugggacugcaucaugaccucuuaccaguaucuuauuauccagaacacaaccugggaagaucacugucaguuuucccgccccagcccuauuggcuaccuggggcuccugucccaaagaacgcgggacaucuauauuucucgcagacggcgcggaacauucaccuggacacuuagcgauuccgagggcaacgaaacccccggcggguacugccugaccagauggaugcucaucgaggccgagcugaaauguuuuggaaauacagcuguugccaagugcaacgaaaaacaugacgaggaguucugcgauaugcugcggcucuuugacuucuguaagcaggcgauccgcagacugaaaacgccugcccagaugagcauucagcuuaucaauaaggcugugaacgcccugauuaaugaucaacucaucaugaagaaccaucugcgggacauuaugggcauccccuauugcaauuacucuaaauauugguaccuuaaccacaccgucacagggaagaccucccugccucgcuguuggcucgugagcaauggaucuuaccugaacgaaacacacuucagcgacgauaucgaacagcaggcugacaauaugauuaccgagcugcuccaaaaagaguauauggauagacagggcaagacgccgcuggggcuuguggaccuguuugucuucuccacaucuuuuuaccucaucagcauuuuccugcaccugaucaaaauucccacccaucggcacaucaccggaaagccuugccccaaaccucaucgccuuaaccacaugggcauuuguuccugcggccucuauaagcaccccgggguuccggugaaguggaaaagaugaggacuaguuauaagacugacuagcccgaugggccucccaacgggcccuccuccccuccuugcaccgagauuaaucaaaggcucuuuucagagccaccaaaaaaaaaaaaaaaaaaaaaaaaaaaaaaaaaaaaaaaaaaaaaaaaaaaaaaaaaaaaaaaaaaaaaaaaaaaaaaaaaaaaaaaaaaaaaaaaaaaaa

SEQ ID NO: 24494 - RNA, 1686 nt, Artificial Sequence
  mRNA product Design i-3 (hSL-A100) comprising derived and/or modified sequence from LASV(ISTH2010-NIG-2012;Clade II)__AIT17482__GPCmut2 (opt5)
aggagaaagcuuaccaugggccagaucauuaccuucuuucaagaggugccccacgucaucgaagagguuaugaacauugugcugaucgcccucagccugcuugcuauucugaaggggaucuacaauguggccacaugcggacucuucggccuggucuccuuucuucugcucugugggagaucuugcagcacgaccuauaaaggaguguacgaacugcagacacuggagcucgacauggcgucccugaacauguguaugccucuuucuugcaccaagaauaacagccaucacuauaucaugguuggcaaugaaacagggcuggagcucacccugacaaacaccuccauuaucaaucauaaauucuguaaccuuucugaugcucacaagaaaaaucuguacgaccaugcccucaugagcauuaucuccacguuucaccugagcauuccgaacuucaaucaguaugaggccaugucuugcgauuuuaacggaggcaagaucuccgugcaguacaaucugagccacgcuuaugccgucgacgcugccaaccauuguggcaccauugcgaauggggugcuccaaacauucaugcggauggccuggggaggcucuuacaucgcucuggauuccgggaagggaagcugggacugcaucaugaccucuuaccaguaucuuauuauccagaacauuacaugggaagaucacugucaguuuucccgccccagcccuaucggcuaccuggggcuccugucccaaagaacccgggacauuuauaucucucgcagacggcgcggaacguucacauggacccuuagcgauuccgagggcaacgaaacacccggcggguacugccugaccagauggaugcucaucgaggccgagcugaaauguuuuggaaauaccgcuguugccaagugcaacgaaaaacaugacgaggaguucugcgauaugcugcggcucuuugacuucuguaagcaggcgauucgcagacugaaaacgccugcccagaugagcauccagcuuauuaauaaggcugugaacgcccugaucaaugaucaacucauuaugaagaaccaucugcgggacaucaugggcauccccuauugcaauuacucuaaauauugguaccuuaaccacacagucaccgggaagacaucccugccucgcuguuggcucgugagcaauggaucuuaccugaacgaaacccacuucagcgacgauauugaacagcaggcugacaauaugaucacagagcugcuccaaaaagaguauauugauagacagggcaagaccccgcuggggcuuguggaccuguuugucuucuccacgucuuuuuaccucaucagcauuuuccugcaccugguuaaaauccccacacaucggcacguggugggaaagccuugccccaaaccucaucgccuuaaccacaugggcauuuguuccugcggccucuauaagcaccccggggucccggugaaguggaaaagaugaggacuaguuauaagacugacuagcccgaugggccucccaacgggcccuccuccccuccuugcaccgagauuaaucaaaggcucuuuucagagccaccaaaaaaaaaaaaaaaaaaaaaaaaaaaaaaaaaaaaaaaaaaaaaaaaaaaaaaaaaaaaaaaaaaaaaaaaaaaaaaaaaaaaaaaaaaaaaaaaaaaaa

SEQ ID NO: 24495 - RNA, 1686 nt, Artificial Sequence
  mRNA product Design i-3 (hSL-A100) comprising derived and/or modified sequence from LASV(Lassa virus/H.sapiens-wt/NGA/2015/ISTH_0543;Clade II)__AVO03639__GPCmut2 (opt5)
aggagaaagcuuaccaugggccagaucauuaccuucuuucaagaggugccccacgucaucgaagagguuaugaacauugugcugaucgcccucagccugcuugcuauucugaaggggaucuacaauguggccacaugcggacucuucggccuggucuccuuucuucugcucugugggagaucuugcagcacgaccuauaaaggaguguacgaacugcagacacuggagcucgacauggcgaaccugaauauguguaugccucuuuccugcaccaagaacaauucucaucacuauaucaugguuggcaacgaaacagggcuggagcucacccugacaaauaccagcauuaucaaccauaaauucuguaaucuuuccgaugcucacaagaaaaaccuguacgaccaugcccucaugucuauuaucagcacguuucaccuguccauuccgaauuucaaccaguaugaggccaugagcugcgauuuuaauggaggcaagaucucugugcaguacaaccugucccacaccuaugcugucgacgccgcuaaucauuguggcacaauugccaacggggugcuccaaaccuucaugcggauggcguggggaggcagcuacaucgcccuggauucugggaagggauccugggacugcaucaugacaagcuaccaguaucuuguuauucagaacaccacgugggaagaucacugucaguuuucucgccccuccccuaucggcuaccuggggcuccugagccaaagaacacgggacauuuauaucucccgcagacggcgcggaaccuucacauggacccuuucugauagcgagggcaaugaaacccccggcggguacugccugacaagauggaugcucauugaggcugagcugaaauguuuuggaaacacggccguggcuaagugcaaugaaaaacaugacgaggaguucugcgauaugcugcggcucuuugacuucuguaagcaggccauccgcagacugaaaaccccugcgcagauguccauccagcuuauuaacaaggccgucaaugcucugaucaacgaucaacucauuaugaagaaucaucugcgggacaucaugggcauucccuauugcaacuacagcaaauauugguaccuuaaucacacagugaccgggaagacaucucugccucgcuguuggcucguguccaacggaagcuaccugaaugaaacccacuucucugacgauaucgaacagcaggccgacaacaugaucacggagcugcuccaaaaagaguauauugauagacagggcaagacaccgcuggggcuugucgaccuguuuguuuucagcaccuccuuuuaccucaucucuauuuuccugcaccuggugaaaauccccacccaucggcacauuacaggaaagccuugccccaaaccucaucgccuuaaucacaugggcaucuguagcugcggccucuauaagcaccccggggugccggucaaguggaaaagaugaggacuaguuauaagacugacuagcccgaugggccucccaacgggcccuccuccccuccuugcaccgagauuaaucaaaggcucuuuucagagccaccaaaaaaaaaaaaaaaaaaaaaaaaaaaaaaaaaaaaaaaaaaaaaaaaaaaaaaaaaaaaaaaaaaaaaaaaaaaaaaaaaaaaaaaaaaaaaaaaaaaaa

SEQ ID NO: 24496 - RNA, 1686 nt, Artificial Sequence
  mRNA product Design i-3 (hSL-A100) comprising derived and/or modified sequence from LASV(Lassa virus/H.sapiens-wt/NGA/2016/ISTH_0009;Clade II)__AVO03571__GPCmut2 (opt5)
aggagaaagcuuaccaugggccagaucauuaccuucuuucaagaggugccccacgucaucgaagagguuaugaacauugugcugaucgcccucagccugcuugcuauucugaaggggaucuacaauguggccacaugcggacuccugggccuugucuccuuccugcuccugugugggagaucuugcagcacgaccuauaaaggaguguacgaacugcagacacucgagcuggacauggcgucccuuaacauguguaugccucugucuugcaccaagaauaacagccaucacuauaucaugguuggcaaugaaacagggcucgagcugacccuuacaaacaccuccauuaucaaucauaaauuuuguaaccugucugaugcucacaagaaaaaucucuacgaccaugcccugaugagcauuaucuccacguuccaccugagcauuccgaacuuuaaucaguaugaggccaugucuugcgauuucaacggaggccggaucuccgugcaguacaaucucagccacucuuaugcugucgacgccgcuaaccauuguggcaccauugccaauggggugcugcaaacauuuaugcgcauggcguggggaggcuccuacaucgcccuugauagcgggaagggaucuugggacugcaucaugaccuccuaccaguaucugauuauccagaacacaaccugggaagaucacugucaguucagcagacccuccccuauuggcuaccucgggcugcuuucucaacggacgcgcgacaucuauauuagcagacggcgcagaggaacauuuaccuggacacuguccgauagcgagggcaacgaaacccccggcggguacugccucacccgguggaugcugaucgaggcugagcugaaguguuucggaaauacagccguugcuaaaugcaacgaaaagcaugacgaggaauuuugcgauaugcuccgccuguucgacuuuuguaaacaggccaucagacggcuuaagacgccugcgcagaugucuauucagcugaucaauaaagccgugaacgcucucauuaaugaucaacugaucaugaagaaccaccuucgcgacauuaugggcauccccuauugcaauuacuccaaguauugguaccugaaccacaccgucacagggaaaaccagccucccuagauguuggcuggugucuaauggaagcuaccugaacgagacacauuucuccgacgauaucgaacagcaggccgacaauaugauuaccgagcuccugcaaaaggaguauaucgaucggcagggcaaaacgccgcuugggcugguggaccucuucgucuuuucuaccagcuucuaccugauuuccaucuuucugcaccuuguuaagauucccacacaucgccacaucaccggaaaaccuugccccaagccucauagacucaaccacaugggcauuuguagcugcggccuguauaaucaccccggggugccggugaaauggaagcggugaggacuaguuauaagacugacuagcccgaugggccucccaacgggcccuccuccccuccuugcaccgagauuaaucaaaggcucuuuucagagccaccaaaaaaaaaaaaaaaaaaaaaaaaaaaaaaaaaaaaaaaaaaaaaaaaaaaaaaaaaaaaaaaaaaaaaaaaaaaaaaaaaaaaaaaaaaaaaaaaaaaaa

SEQ ID NO: 24497 - RNA, 1686 nt, Artificial Sequence
  mRNA product Design i-3 (hSL-A100) comprising derived and/or modified sequence from LASV(Lassa virus/H.sapiens-wt/NGA/2016/ISTH_0017;Clade II)__AVO03567__GPCmut2 (opt5)
aggagaaagcuuaccaugggccagaucauuaccuucuuucaagaggugccccacgucaucgaagagguuaugaacauugugcugaucgcccucagccugcuugcuauucugaaggggaucuacaauguggccacaugcggacucuucggccuggucuccuuucuucugcucugugggagaucuugcagcacgaccuauaaaggaguguacgaacugcagacacuggagcucgacauggcgucccugaacauguguaugccucuuucuugcaccaagaauaacagccaucacuauaucaugguuggcaaugaaacagggcuggagcucacccugacaaacaccuccauuaucaaucauaaauucuguaaccuuucugaugcucacaagaaaaaucuguacgaccaugcccucaugagcauuaucuccacguuucaccugagcauuccgaacuucaaucaguaugaggccaugucuugcgauuuuaacggaggcaagaucuccgugcaguacaaucugagccacaccuaugcuauugacgccgcuaaccauuguggcacaaucgccaaugggguccuccaaaccuucaugcggauggcguggggaggcucuuacaucgcccuggauuccgggaagggaagcugggacugcauuaugacaucuuaccaguaucuuaucauucagaacaccacgugggaagaucacugucaguuuucccgccccagcccuaucggcuaccuggggcuccugucccaaagaacacgggacauuuauaucucucgcagacggcgcggaaccuucacauggacccuuagcgauuccgagggcaacgaaacccccggcggguacugccugacaagauggaugcucaucgaggcugagcugaaauguuuuggaaauacggccguggcuaagugcaacgaaaaacaugacgaggaguucugcgauaugcugcggcucuuugacuucuguaagcaggccauucgcagacugaaaaccccugcgcagaugagcauccagcuuauuaauaaggccguuaacgcucugaucaaugaucaacucauuaugaagaaccaucugcgggacaucaugggcauccccuauugcaauuacucuaaauauugguaccuuaaccacacagugaccgggaagacaucccugccucgcuguuggcucgucagcaauggaucuuaccugaacgaaacccacuucagcgacgauauugaacagcaggccgacaauaugaucacggagcugcuccaaaaagaguauauggauagacagggcaagacaccgcuggggcuuguggaccuguuuguguucuccaccucuuuuuaccucauuagcaucuuccugcaccugguccggauucccacccaucgccacguuaucggaaaaccuugccccaagccucauagacuuaaccacaugggcauuuguuccugcggccucuauaaacaccccggggugccggugaaguggaagcggugaggacuaguuauaagacugacuagcccgaugggccucccaacgggcccuccuccccuccuugcaccgagauuaaucaaaggcucuuuucagagccaccaaaaaaaaaaaaaaaaaaaaaaaaaaaaaaaaaaaaaaaaaaaaaaaaaaaaaaaaaaaaaaaaaaaaaaaaaaaaaaaaaaaaaaaaaaaaaaaaaaaaa

SEQ ID NO: 24498 - RNA, 1686 nt, Artificial Sequence
  mRNA product Design i-3 (hSL-A100) comprising derived and/or modified sequence from LASV(Lassa virus/H.sapiens-wt/NGA/2018/ISTH_0959;Clade II)__AVV65099__GPCmut2 (opt5)
aggagaaagcuuaccaugggccagaucauuaccuucuuucaagaggugccccacgucaucgaagagguuaugaacauugugcugaucgcccucagccugcuugcuauucugaaggggaucuacaauguggucacaugcggacucuucggccugguguccuuucuucugcucugugggagaucuugcagcacgaccuauaaaggaguuuacgaacugcagacacuggagcucgacauggccucccugaacauguguaugccucuuucuugcaccaagaauaacagccaucacuauaucauggugggcaaugaaacagggcuggagcucacccugacaaacaccuccauuaucaaucauaaauucuguaaccuuucugaugcgcacaagaaaaaucuguacgaccaugcucucaugagcauuaucuccacguuucaccugagcauuccgaacuucaaucaguaugaggccaugucuugcgauuuuaacggaggcaagaucuccguccaguacaaucugagccacgccuaugcuauugacgccgcuaaccauuguggcaccaucgccaauggggugcuccaaacauucaugcggauggcguggggaggcucuuacaucgcccuggauuccgggaagggaagcugggacugcauuaugaccucuuaccaguaucuuaucauucagaacacaaccugggaagaucacugucaguuuucccgccccagcccuaucggcuaccuggggcuccugucccaaagaacgcgggacauuuauaucucucgcagacggcgcggaacauucaccuggacacuuagcgauuccgagggcaacgaaacccccggcggguacugccugaccagauggaugcucaucgaggcugagcugaaauguuuuggaaauacagccguugcuaagugcaacgaaaaacaugacgaggaguucugcgauaugcugcggcucuuugacuucuguaagcaggccauucgcagacugaaaacgccugcgcagaugagcauccagcuuauuaauaaggccgugaacgcucugaucaaugaucaacucauuaugaagaaccaucugcgggacaucaugggcauccccuauugcaauuacucuaaauauugguaccuuaaccacaccgucacagggaagaccucccugccucgcuguuggcucgugagcaauggaucuuaccugaacgaaacacacuucagcgacgauauugaacagcaggccgacaauaugaucaccgagcugcuccaaaaagaguauauugauagacagggcaagacgccgcuggggcuuguggaccuguuugucuucuccacaucuuuuuaccucaucagcauuuuccugcaccugguuaaaauccccacccaucggcacgugauuggaaagccuugccccaaaccucaucgccuuaaccacaugggcaucuguuccugcggccucuauaagcaccccggggugccggucaaguggaaaagaugaggacuaguuauaagacugacuagcccgaugggccucccaacgggcccuccuccccuccuugcaccgagauuaaucaaaggcucuuuucagagccaccaaaaaaaaaaaaaaaaaaaaaaaaaaaaaaaaaaaaaaaaaaaaaaaaaaaaaaaaaaaaaaaaaaaaaaaaaaaaaaaaaaaaaaaaaaaaaaaaaaaaa

SEQ ID NO: 24499 - RNA, 1686 nt, Artificial Sequence
  mRNA product Design i-3 (hSL-A100) comprising derived and/or modified sequence from LASV(LASV003-NIG-2008;Clade II)__AIT17580__GPCmut2 (opt5)
aggagaaagcuuaccaugggccagaucauuaccuucuuucaagaggugccccacgucaucgaagagguuaugaacauugugcugaucgcccucagccugcuugcuauucugaaggggaucuacaauguggccacaugcggacucuucggccuggucuccuuucuucugcucugugggagaucuugcagcacgaccuauaaaggaguguacgaacugcagacacuggagcucgacauggcgucccugaacauguguaugccucuuucuugcaccaagaauaacagccaucacuauaucaugguuggcaaugaaacagggcuggagcucacccugacaaacaccuccauuaucaaucauaaauucuguaaccuuucugaugcucacaagaaaaaucuguacgaccaugcccucaugagcauuaucuccacguuucaccugagcauuccgaacuucaaucaguaugaggccaugucuugcgauuuuaacggaggcaagaucuccgugcaguacaaucugagccacaccuaugcugucgacgccgcuaaccauuguggcacaauugccaauggggugcuccaaaccuucaugcggauggcguggggaggcucuuacaucgcccuggauuccgggaagggaagcugggacugcaucaugacaucuuaccaguaucuuauuauccagaacaccacgugggaagaucacugucaguuuucccgccccagcccuauuggcuaccuggggcuccugucccaaagaacacgggacaucuauauuucucgcagacggcgcggaaccuucacauggacccuuagcgauuccgagagcaacgaaacccccggcggcuacugccugacaagauggaugcucaucgaggcugagcugaaauguuuugggaauacggccguugcuaagugcaacgaaaaacaugacgaggaguucugcgauaugcugcggcucuuugacuucuguaagcaggccauccgcagacugaaagcgccugcccagaugucuauucagcuuaucaauaaggcugugaacgcccugauuaaugaucaacucaucaugaagaaccaucugcgggacauuaugggaauccccuauugcaauuacuccaaauauugguaccuuaaccacaccgucacaggccgcaccagccugccuagauguuggcucgugucuaaugggagcuaccugaacgaaacacacuucuccgacgauaucgaacagcaggcugacaauaugauuaccgagcugcuccaaaaggaguauauggaucggcagggaaaaacgccgcugggccuuguggaccuguuugucuucucuaccagcuuuuaccucaucuccauuuuccugcaccugguuaagauccccacacaucgccacgugauugggaaaccuugccccaagccucauagacuuaaccacaugggaaucuguagcugcggccucuauaaacaccccggcgugccggucaaguggaagcggugaggacuaguuauaagacugacuagcccgaugggccucccaacgggcccuccuccccuccuugcaccgagauuaaucaaaggcucuuuucagagccaccaaaaaaaaaaaaaaaaaaaaaaaaaaaaaaaaaaaaaaaaaaaaaaaaaaaaaaaaaaaaaaaaaaaaaaaaaaaaaaaaaaaaaaaaaaaaaaaaaaaaa

SEQ ID NO: 24500 - RNA, 1686 nt, Artificial Sequence
  mRNA product Design i-3 (hSL-A100) comprising derived and/or modified sequence from LASV(LASV035-NIG-2009;Clade II)__AIT17588__GPCmut2 (opt5)
aggagaaagcuuaccaugggccagaucauuaccuucuuucaagaggugccccacgucaucgaagagguuaugaacauugugcugaucgcccucagccugcuugcuauucugaaggggaucuacaauguggccacaugcggacucuucggccuggucuccuuucuucugcucugugggagaucuugcagcacgaccuauaaaggaguguacgaacugcagacacuggagcucgacauggcgucccugaacauguguaugccucuuucuugcaccaagaauaacagccaucacuauaucaugguuggcaaugaaacagggcuggagcucacccugacaaacaccuccauuaucaaucauaaauucuguaaccuuucugaugcucacaagaaaaaucuguacgaccaugcccucaugagcauuaucuccacguuucaccugagcauuccgaacuucaaucaguaugaggccaugucuugcgauuuuaacggaggcaagaucuccgugcaguacaaucugagccacgcuuaugccgucgacgcugccaaccauuguggcaccauugcgaauggggugcuccaaacauucaugcggauggccuggggaggcucuuacaucgcucuggauuccgggaagggaagcugggacugcaucaugaccucuuaccaguaucuuauuauccagaacacaaccugggaagaucacugucaguuuucccgccccagcccuauuggcuaccuggggcuccugucccaaagaacgcgggacaucuauauuucucgcagacggcgcggaacauucaccuggacacuuagcgauuccgagggcaacgaaacccccggcggguacugccugaccagauggaugcucaucgaggccgagcugaaauguuuuggaaauacagcuguugccaagugcaacgaaaaacaugacgaggaguucugcgauaugcugcggcucuuugacuucuguaagcaggcgauccgcagacugaaagccccugcucagaugagcauucagcuuaucaauaaggccgugaacgcucugauuaaugaucaacucaucaugaagaaccaucugcgggacauuaugggcauccccuauugcaauuacucuaaauauugguaccuuaaccacacggucaccgggaagacaucccugccucgcuguuggcucgugagcaauggaucuuaccugaacgaaacccacuucagcgacgauaucgaacagcaggccgacaauaugauuacagagcugcuccaaaaagaguauaucgauagacagggcaagaccccgcuggggcuuguggaccuguuugucuucuccacgucuuuuuaccucauuagcaucuuccugcaccugguuaaaauucccacacaucggcacgugaucggaaagccuugccccaaaccucaucgccuuaaccacaugggcauuuguuccugcggccucuauaagcaccccggggugccggucaaguggaaaagaugaggacuaguuauaagacugacuagcccgaugggccucccaacgggcccuccuccccuccuugcaccgagauuaaucaaaggcucuuuucagagccaccaaaaaaaaaaaaaaaaaaaaaaaaaaaaaaaaaaaaaaaaaaaaaaaaaaaaaaaaaaaaaaaaaaaaaaaaaaaaaaaaaaaaaaaaaaaaaaaaaaaaa

SEQ ID NO: 24501 - RNA, 1686 nt, Artificial Sequence
  mRNA product Design i-3 (hSL-A100) comprising derived and/or modified sequence from LASV(LASV1000-NIG-2009;Clade II)__AIT17782__GPCmut2 (opt5)
aggagaaagcuuaccaugggccagaucauuaccuucuuucaagaggugccccacgucaucgaagagguuaugaacauugugcugaucgcccucagccugcuugcuauucugaaggggaucuacaauguggccacaugcggacucuucggccuggucuccuuucuucugcucugugggagaucuugcagcacgaccuauaaaggaguguacgaacugcagacacuggagcucgacauggcgucccugaacauguguaugccucuuucuugcaccaagaauaacagccaucacuauaucaugguuggcaaugaaacagggcuggagcucacccugacaaacaccuccauuaucaaucauaaauucuguaaccuuucugaugcucacaagaaaaaucuguacgaccaugcccucaugagcauuaucuccacguuucaccugagcauuccgaacuucaaucaguaugaggccaugucuugcgauuuuaacggaggcaagaucuccgugcaguacaaucugagccacaccuaugcugucgacgccgcuaaccauuguggcacaauugccaauggggugcuccaaaccuucaugcggauggcguggggaggcucuuacaucgcccuggauuccgggaagggaagcugggacugcaucaugacaucuuaccaguaucuuauuauccagaacaccacgugggaagaucacugucaguuuucccgccccagcccuauuggcuaccuggggcuccugucccaaagaacacgggacaucuauauuucucgcagacggcgcggaaccuucacauggacccuuagcgauuccgagggcaacgaaacccccggcggguacugccugacaagauggaugcucaucgaggcugagcugaaauguuuuggaaauacggccguugcuaagugcaacgaaaaacaugacgaggaguucugcgauaugcugcggcucuuugacuucuguaagcaggccaucaaacgccugaagaccccugcgcagaugagcauucagcuuaucaauaaggccgugaacgcucugauuaaugaucaacucaucaugaaaaaccaccugagagacauuaugggcauccccuauugcaauuacucuaaguauugguaccuuaaccacacagucaccgggaaaacaucccugccucgguguuggcucgugagcaauggaucuuaccugaacgaaacccauuucagcgacgauaucgaacagcaggccgacaauaugauuacggagcugcuccaaaaggaguauaucgaucgccagggcaaaacaccgcuggggcuuguggaccuguuugucuucuccaccucuuuuuaccucauuagcaucuuccugcaccugguuaagauucccacccauagacacguggugggaaaaccuugccccaagccucaucggcuuaaccacaugggcaucuguuccugcggccucuauaagcaccccggggucccggugaaauggaagcgcugaggacuaguuauaagacugacuagcccgaugggccucccaacgggcccuccuccccuccuugcaccgagauuaaucaaaggcucuuuucagagccaccaaaaaaaaaaaaaaaaaaaaaaaaaaaaaaaaaaaaaaaaaaaaaaaaaaaaaaaaaaaaaaaaaaaaaaaaaaaaaaaaaaaaaaaaaaaaaaaaaaaaa

SEQ ID NO: 24502 - RNA, 1686 nt, Artificial Sequence
  mRNA product Design i-3 (hSL-A100) comprising derived and/or modified sequence from LASV(LASV221-NIG-2010;Clade II)__AIT17624__GPCmut2 (opt5)
aggagaaagcuuaccaugggccagaucauuaccuucuuucaagaggugccccacgucaucgaagagguuaugaacauugugcugaucgcccucagccugcuugcuauucugaaggggaucuacaauguggccacaugcggacucuucggccuggucuccuuucuucugcucugugggagaucuugcagcacgaccuauaaaggaguguacgaacugcagacacuggagcucgacauggcgucccugaacauguguaugccucuuucuugcaccaagaauaacagccaucacuauaucaugguuggcaaugaaacagggcuggagcucacccugacaaacaccuccauuaucaaucauaaauucuguaaccuuucugaugcucacaagaaaaaucuguacgaccaugcccucaugagcauuaucuccacguuucaccugagcauuccgaacuucaaucaguaugaggccaugucuugcgauuuuaacggaggcaagaucuccgugcaguacaaucugagccacaccuaugcuauugacgccgcuaaccauuguggcacaaucgccaaugggguccuccaaaccuucaugcggauggcguggggaggcucuuacaucgcccuggauuccgggaagggaagcugggacugcauuaugacaucuuaccaguaucuuaucauucagaacaccacgugggaagaucacugucaguuuucccgccccagcccuaucggcuaccuggggcuccugucccaaagaacacgggacauuuauaucucucgcagacggcgcggaaccuucacauggacccuuagcgauuccgagggcaacgaaacccccggcggguacugccugacaagauggaugcucaucgaggcugagcugaaauguuuuggaaauacggccguggcuaagugcaacgaaaaacaugacgaggaguucugcgauaugcugcggcucuuugacuucuguaagcaggccauucgcagacugaaaaccccugcgcagaugagcauccagcuuauuaauaaggccguuaacgcucugaucaaugaucaacucauuaugaagaaccaucugcgggacaucaugggcauccccuauugcaauuacucuaaauauugguaccuuaaccacacagugaccgggaagacaucccugccucgcuguuggcucgucagcaauggaucuuaccugaacgaaacccacuucagcgacgauauugaacagcaggccgacaauaugaucacggagaugcugcaaaaagaguauauggauagacagggcaagacaccgcucgggcugguggaccuuuuuguguucuccaccucuuuuuaccugauuagcaucuuccuccaccuggucaaaauucccacccaucggcacguuaucggaaagccuugccccaaaccucaucgccugaaccacaugggcauuuguuccugcggccuuuauaagcaccccggggugccggugaaguggaaaagaugaggacuaguuauaagacugacuagcccgaugggccucccaacgggcccuccuccccuccuugcaccgagauuaaucaaaggcucuuuucagagccaccaaaaaaaaaaaaaaaaaaaaaaaaaaaaaaaaaaaaaaaaaaaaaaaaaaaaaaaaaaaaaaaaaaaaaaaaaaaaaaaaaaaaaaaaaaaaaaaaaaaaa

SEQ ID NO: 24503 - RNA, 1686 nt, Artificial Sequence
  mRNA product Design i-3 (hSL-A100) comprising derived and/or modified sequence from LASV(LASV237-NIG-2010;Clade II)__AIT17638__GPCmut2 (opt5)
aggagaaagcuuaccaugggccagaucauuaccuucuuucaagaggugccccacgucaucgaagagguuaugaacauugugcugaucgcccucagccugcuugcuauucugaaggggaucuacaauguggccacaugcggacucuucggccuggucuccuuucuucugcucugugggagaucuugcagcacgaccuauaaaggaguguacgaacugcagacacuggagcucgacauggcgucccugaacauguguaugccucuuucuugcaccaagaauaacagccaucacuauaucaugguuggcaaugaaacagggcuggagcucacccugacaaacaccuccauuaucaaucauaaauucuguaaccuuucugaugcucacaagaaagaccuguacgaucaugcccucaugagcauuaucuccacguuucaccugagcauuccgaauuucaaccaguaugaggccaugucuugcgacuuuaauggaggcaagaucuccgugcaguacaaccugagccacaccuaugcugucgaugccgcuaaucauuguggcacaauugccaacggggugcuccaaaccuucaugcggauggcguggggaggcucuuacaucgcccuggacuccgggaagggaagcugggauugcaucaugacaucuuaccaguaucuuauuauccagaauaccacgugggaagaccacugucaguuuucccgccccagcccuauuggcuaccuggggcuccugucccaaagaacacgggauaucuauauuucucgcagacggcgcggaaccuucacauggacccuuagcgacuccgagggcaacgaaacccccggcggguacugccugacaagauggaugcucaucgaggcugagcugaaauguuuuggaaacacggccguugcuaagugcaaugaaaaacaugaugaggaguucugcgacaugcugcggcucuuugauuucuguaagcaggccauccgcagacugaaaaccccugcgcagaugagcauucagcuuaucaacaaggccgugaaugcucugauuaacgaccaacucaucaugaagaaucaucugcgggacauuaugggcauccccuauugcaacuacucuaaauauugguaccuuaaucacacagucaccgggaagacaucccugccucgcuguuggcucgugagcaacggaucuuaccugaaugaaacccacuucagcgaugacaucgaacagcaggccgauaacaugauuacggagcugcuccaaaaagaguauauggacagacagggcaagacaccgcuggggcuuguggaucuguuugucuucuccaccucuuuuuaccucaucagcauuuuccugcaccugaucaaaauucccacccaucggcacaucacaggaaagccuugccccaaaccucaucgccuuaaucacaugggcauuuguuccugcggccucuauaagcaccccgggguuccggugaaguggaaaagaugaggacuaguuauaagacugacuagcccgaugggccucccaacgggcccuccuccccuccuugcaccgagauuaaucaaaggcucuuuucagagccaccaaaaaaaaaaaaaaaaaaaaaaaaaaaaaaaaaaaaaaaaaaaaaaaaaaaaaaaaaaaaaaaaaaaaaaaaaaaaaaaaaaaaaaaaaaaaaaaaaaaaa

SEQ ID NO: 24504 - RNA, 1686 nt, Artificial Sequence
  mRNA product Design i-3 (hSL-A100) comprising derived and/or modified sequence from LASV(LASV253-NIG-2011;Clade II)__AIT17670__GPCmut2 (opt5)
aggagaaagcuuaccaugggccagaucauuaccuucuuucaagaggugccccacgucaucgaagagguuaugaacauugugcugaucgcccucagccugcuugcuauucugaaggggaucuacaauguggccacaugcggacucuucggccuggucuccuuucuucugcucugugggagaucuugcagcacgaccuauaaaggaguguacgaacugcagacacuggagcucgacauggcgucccugaacauguguaugccucuuucuugcaccaagaauaacagccaucacuauaucaugguuggcaaugaaacagggcuggagcucacccugacaaacaccuccauuaucaaucauaaauucuguaaccuuucugaugcucacaagaaaaaucuguacgaccaugcccucaugagcauuaucuccacguuucaccugagcauuccgaacuucaaucaguaugaggccaugucuugcgauuuuaacggaggcaagaucuccgugcaguacaaucugagccacaccuaugcugucgacgccgcuaaccauuguggcacaauugccaauggggugcuccaaaccuucaugcggauggcguggggaggcucuuacaucgcccuggauuccgggaagggaagcugggacugcaucaugacaucuuaccaguaucuuauuauccagaacaccacgugggaagaucacugucaguuuucccgccccagcccuauuggcuaccuggggcuccugucccaaagaacacgggacaucuauauuucucgcagacggcgcggaaccuucacauggacccuuagcgauuccgagggcaacgaaacccccggcggguacugccugacaagauggaugcucaucgaggcugagcugaaauguuuuggaaauacggccguugcuaagugcaacgaaaaacaugacgaggaguucugcgauaugcugcggcucuuugacuucuguaagcaggccauccgcagacugaaagcgccugcccagaugagcauucagcuuaucaauaaggcugugaacgcccugauuaaugaucaacucaucaugaagaaccaucugcgggacauuaugggcauccccuauugcaauuacucuaaauauugguaccuuaaccacaccgucacagggcgcaccucccugccuagauguuggcucgugagcaauggaucuuaccugaacgaaacacacuucagcgacgauaucgaacagcaggcugacaauaugauuaccgagcugcuccaaaaggaguauaucgaucggcagggcaaaacgccgcuggggcuuguggaccuguuugucuucuccacaucuuuuuaccucauuagcaucuuccugcaccugguuaagauucccacccaucgccacaucauuggaaaaccuugccccaagccucauagacuuaaccacaugggcaucuguuccugcggccucuauaaacaccccggggugccggugaaguggaagcggugaggacuaguuauaagacugacuagcccgaugggccucccaacgggcccuccuccccuccuugcaccgagauuaaucaaaggcucuuuucagagccaccaaaaaaaaaaaaaaaaaaaaaaaaaaaaaaaaaaaaaaaaaaaaaaaaaaaaaaaaaaaaaaaaaaaaaaaaaaaaaaaaaaaaaaaaaaaaaaaaaaaaa

SEQ ID NO: 24505 - RNA, 1686 nt, Artificial Sequence
  mRNA product Design i-3 (hSL-A100) comprising derived and/or modified sequence from LASV(LASV254-NIG-2011;Clade II)__AIT17674__GPCmut2 (opt5)
aggagaaagcuuaccaugggccagaucauuaccuucuuucaagaggugccccacgucaucgaagagguuaugaacauugugcugaucgcccucagccugcuugcuauucugaaggggaucuacaauguggccacaugcggacucuucggccuggucuccuuucuucugcucugugggagaucuugcagcacgaccuauaaaggaguguacgaacugcagacacuggagcucgacaugaccaaccugaauauguguaugccucuuuccugcacaaagaacaauucucaucacuauaucaugguuggcaacgaaaccgggcuggagcucacacugaccaauacgagcauuaucaaccauaaauucuguaaucuuuccgaugcgcacaagaaaaaccuguacaaucaugcucucaugucuauuaucagcaccuuucaccuguccauuccgaacuucaaucaguaugaggccaugagcugcgacuuuaacggaggcaagaucucugugcaguacaaucugucccacagcuaugccgucgaugcugccaaccauuguggcacaauugcuaacggggugcuccaaaccuucaugcggauggccuggggaggcucuuacaucgcgcuggacuccgggaagggaaauugggauugcaucaugacaagcuaccaguaucuuauuauccagaacaccacgugggaagaccacugucaguuuucucgccccuccccuauuggcuaccuggggcuccugagccaaagaacacgggauaucuauauuucccgcagacggcgcggaaccuucacauggacccuuucugacagcgagggcaaugaaacccccggcggguacugccugacaagauggaugcucaucgaggccgagcugaaauguuuuggaaacacggcuguugccaagugcaaugaaaaacaugaugaggaguucugcgacaugcugcggcucuuugauuucuguaagcaggcuauccgcagacugaaaaccccugcccaggcgaacauucagcuuaucaauaaggccgugaacgcucugauuaaugaccaacucaucaugaagaaccaucugcgggauauuaugggcauccccuauugcaauuacuccaaauauugguaccuuaaccacacagucaccgggaagacaagccugccucgcuguuggcucgugucuaauggauccuaccugaacgaaacccacuucagcgacgacaucgaacagcaggccgauaauaugauuacggagcugcuccaaaaagaguauauggacagacagggcaagacaccgcuggggcuuguggaucuguuugucuucucuaccagcuuuuaccucaucuccauuuuccugcaccugguuaaaauccccacccaucggcacgugauuggaaagccuugccccaaaccucaucgccuuaaccacaugggcaucuguucuugcggccucuauaagcaccccggggugccggucaaguggaaaagaugaggacuaguuauaagacugacuagcccgaugggccucccaacgggcccuccuccccuccuugcaccgagauuaaucaaaggcucuuuucagagccaccaaaaaaaaaaaaaaaaaaaaaaaaaaaaaaaaaaaaaaaaaaaaaaaaaaaaaaaaaaaaaaaaaaaaaaaaaaaaaaaaaaaaaaaaaaaaaaaaaaaaa

SEQ ID NO: 24506 - RNA, 1686 nt, Artificial Sequence
  mRNA product Design i-3 (hSL-A100) comprising derived and/or modified sequence from LASV(Nig08-A19;Clade III)__ADU56618__GPCmut2 (opt5)
aggagaaagcuuaccaugggccagaucgugaccuucuuucaagaggucccccacguuauugaagaggugaugaacaucgugcugauugcccucagcauccuggcuauucuuaaggggcuguacaauaucgccacaugcggacucaucggccuggucacguuccuucugcucuccgggagaucuuguagcaugaccuauaaaggaguguacgaacugcagacacuggagcucaacaugaauacccugaacaugugcaugccucuuuccuguacaaagaauaacucucaucacuauauuaugguuggcaaugaaaccgggcuggagcucacacugaccaacacgagccuucugcaucacaaauuuugcaaucucuccgacgcgcauaagaaaaaccuguacgaucacacccugaugucuaucauuagcacauuccaccucuccaucccgaauuuuaaccaguaugaggcuaugagcugugacuucaauggaggcaagauuaccgugcaguacaaccugucucauuccuaugccaucgaugccgcuaaucacugcggcacagucgccaacggggugcuucaaaccuuuaugcggauggcuuggggaggcagcuacauugcccuggacucugggcgcggaaagugggauuguaucaugacguccuaccaguaucucaucauucagaacacaaccugggaagaccauugccaguucagcagacccucuccuaucggcuaccuggggcuucugucccaacggacacgcgauauuuauaucagcagacggcgcagaggaaccuuuaccuggacacucuccgacucugagggcaaugaaacgcccggcggguacugucugacccgguggaugcugauugaggcggagcucaaaugcuucggaaacacagccguugcuaaguguaaugaaaaacacgaugaggaauuuugcgacaugcugcgccuuuucgauuuuugcaagcaggccaucagacggcugaaagcuccugcccagaugagcauccagcucauuaacaaggcggugaaugcccugaucaacgaccaacuuauuaugaagaaucaucugcgcgauaucaugggcauucccuauuguaacuacuccaaauauugguaccucaaucacaccagcacagggagaaccucucugccucggugcuggcuggucuccaacggaagcuaccucaaugagacgcacuucucugacgacaucgaacagcaggcugauaacaugaucacagagaugcugcaaaaggaguaucuugaccgccagggcaaaaccccgcuggggcucguggaucuguucguguuuagcaccuccuucuaccugauuucuaucuuucuucaucucgucaagauucccacacacagacauaucguuggaaaaccuugucccaagccucaccggcugaaucacaugggcauuugcagcuguggccuguauaaacagcccggggugccggugagauggaagcgcugaggacuaguuauaagacugacuagcccgaugggccucccaacgggcccuccuccccuccuugcaccgagauuaaucaaaggcucuuuucagagccaccaaaaaaaaaaaaaaaaaaaaaaaaaaaaaaaaaaaaaaaaaaaaaaaaaaaaaaaaaaaaaaaaaaaaaaaaaaaaaaaaaaaaaaaaaaaaaaaaaaaaa

SEQ ID NO: 24507 - RNA, 1689 nt, Artificial Sequence
  mRNA product Design i-3 (hSL-A100) comprising derived and/or modified sequence from LASV(G1180-SLE-2010;Clade IV)__AIT17168__GPCmut2 (opt5)
aggagaaagcuuaccaugggccagaucgugaccuucuuucaagaggucccccacguuauugaagaggugaugaacaucgugcugauugcccucagcauccuggcuguccuuaaggggcuguacaauuucgccacaugcggacucgugggccugcuuacguuucugcuccugugugggagauccugcaccgcgucucgguauaaaggaguuuacgaacugcagacacucgagcugaacauggaaacccuuaauauguguaugccucugagcugcacaaagaacaauucccaucacuauauuauggugggcaacgagaccgggcucgagcugacacuuaccaauacgucuaucaucaaccauaaauucuguaaucugagcgacgcucacaagaaaaaccucuacgaucaugcccugauguccauuaucucuaccuuucaccugagcauuccgaauuucaaccaguaugaagccauguccugcgacuuuaauggaggcaagaucagcguccaguacaaccucucucacuccuaugcuggcgaugccgcuaaucauugugggacaguggccaacggaguucugcaaaccuucaugcgcauggcguggggcgggagcuacauugcccuugacucuggacacggcuccugggauugcaucaugacaagcuaccaguaucugauuauccagaacaccacgugggaggaccauugucaguuuucuagacccuccccuaucggguaccucggacugcuuagccaacggacacgcgauauuuauaucuccagacggcgcagaggcaccuucacauggacccugucugacagcgaaggcaaggauacccccgggggauacugccucacacgguggaugcugauugaggcugagcugaaauguuuuggcaauacggccguggcuaagugcaacgaaaaacacgacgaggaguucugcgauaugcuccgccuguuugacuucuguaagcaggccauccagagacuuaaagcgccugcccagauguccauucaacugaucaauaaggcugucaacgcccucaucaaugaucagcugauuaugaagaaccaccuucgggacaucauggggauucccuauugcaauuacagcaaauauugguaccugaaccauaccacaaccggaaagacaucucucccuaaauguuggcugguguccaauggcagcuaccugaacgaaacccacuucucugacgauaucgaacagcaagcugacaauaugauuacggagaugcuccagaaggaguauauggaacgccaggggaaaacaccgcugggacuuguggaucuguuugucuucagcaccuccuuuuaccucaucucuaucuuccugcaucugguuaagauucccacccacagacauaucgugggcaaaagcugcccuaagccccaccggcuuaaccacaugggcauuuguuccugcgggcucuauaagcagccuggagugcccgucaaauggaagcgcugaggacuaguuauaagacugacuagcccgaugggccucccaacgggcccuccuccccuccuugcaccgagauuaaucaaaggcucuuuucagagccaccaaaaaaaaaaaaaaaaaaaaaaaaaaaaaaaaaaaaaaaaaaaaaaaaaaaaaaaaaaaaaaaaaaaaaaaaaaaaaaaaaaaaaaaaaaaaaaaaaaaaa

SEQ ID NO: 24508 - RNA, 1689 nt, Artificial Sequence
  mRNA product Design i-3 (hSL-A100) comprising derived and/or modified sequence from LASV(G1442-SLE-2011;Clade IV)__AIT17180__GPCmut2 (opt5)
aggagaaagcuuaccaugggccagaucgugaccuucuuucaagaggucccccacguuauugaagaggugaugaacaucgugcugauugcccucagcauccuggcuguccuuaaggggcuguacaauguggccacaugcggacucauuggccugguuacguuccuucugcucugugggagauccugcaccacaacccuguauaaaggaguguacgaacugcagacacucgagcugaacauggaaacccuuaauauguguaugccucugucuugcacaaagaacaauagccaucacuauauccgggucggcaacgagaccgggcucgagcugacgcuuaccaauacauccaucauuaaccauaaauuuuguaaucugucugacgcgcacaagaaaaaccucuacgaucaugcucugaugagcaucauuuccaccuuccaccugucuaucccgaauuuuaaccaguaugaagccaugagcugcgacuucaauggaggcaagauuuccgugcaguacaaccucagccacucuuaugccggcgaugcugccaaucauugugggacaguugcuaacggagugcugcaaaccuuuaugcgcauggccuggggcggguccuacaucgcgcuugacagcggaagaggcaacugggauugcauuaugacgucuuaccaguaucugaucauccagaauacaaccugggacgaucacugucaguucucccggcccagcccuauuggguaccucggacugcuuucucaacgcacaagagacgucuauaucucccggcgcagacggggcaccuuuaccuggacacugagcgauuccgagggcaaggacacgcccgggggauacugccucacccgcuggaugcugauugaagccgagcugaaauguuucggcaacacagcuguggccaagugcaaugagaaacaugaugaagaguuuugcgacaugcucagacuguucgauuuuuguaagcaggcuauccagcggcuuaaagccccugcgcagaugucuauucaacugaucaacaaggccgugaaugcucucaucaacgaccagcugauuaugaagaaucaccuucgcgacaucauggggauucccuauugcaacuacagcaaauauugguaccugaauaacaccgccacaggaaagaccucccucccuaaauguuggcugaucagcaauggcucuuaccugaacgaaacgcacuucuccgaugacauugagcaggaagcugauaauaugaucacagagaugcuccaaaaggaguauauggaaagacaggggaaaaccccgcugggacuugucgaccuguucguuuuuagcaccucuuucuaccucaucagcauuuuucugcaucuggugaagauccccacacaccggcauauugugggcaaauccugcccuaagccccaccgccuuaaccauaugggcaucuguucuugcgggcucuauaagcagccuggaguccccgugagauggaaacggugaggacuaguuauaagacugacuagcccgaugggccucccaacgggcccuccuccccuccuugcaccgagauuaaucaaaggcucuuuucagagccaccaaaaaaaaaaaaaaaaaaaaaaaaaaaaaaaaaaaaaaaaaaaaaaaaaaaaaaaaaaaaaaaaaaaaaaaaaaaaaaaaaaaaaaaaaaaaaaaaaaaaa

SEQ ID NO: 24509 - RNA, 1689 nt, Artificial Sequence
  mRNA product Design i-3 (hSL-A100) comprising derived and/or modified sequence from LASV(G3010-SLE-2013;Clade IV)__AIT17344__GPCmut2 (opt5)
aggagaaagcuuaccaugggccagaucgugaccuucuuucaagaggucccccacguuauugaagaggugaugaacaucgugcugauugcccucagcauccuggcuguccuuaaggggcuguacaauuucgccacaugcggacucgugggccugguuacguuucuucugcucugugggagauccugcaccacaucucuguauaaaggaguguacgaacugcagacccucgagcugaacauggaaacacuuaauauguguaugccucugagcugcaccaagaacaauucccaucacuauauuauggucggcaacgagacagggcucgagcugacccuuacgaauaccucuaucaucaaccauaaauucuguaaucugagcgacgcgcacaagaaaaaccucuacaaucaugcucugauguccauuaucucuacauuucaccugagcauuccgaacuucaaucaguaugaagccauguccugcgauuuuaacggaggcaagaucagcgugcaguacaaucucucucacuccuaugccggcgacgcugccagccauugugggaccguugcuaacggagugcugcaaacauucaugcggauggccuggggcgggucuuacauugcgcuugauuccggauacggcaagugggacugcaucaugaccagcuaucaguaccugauuauccagaacacgacaugggaggaucacugucaguuuucucgccccuccccuaucggguaucucggacugcuuagccaaagaacccgggacauuuacaucucccgcagacggcgcggcacauucaccuggacccugucugauagcgaaggcaaagacacacccgggggauauugccucacgagauggaugcugauugaggccgagcugaaguguuuuggcaauaccgcugucgccaaaugcaacgaaaagcaugaugaggaguucugcgacaugcuccggcuguuugauuucuguaaacaggcuauccagcgccuuaagaccccugcccagauguccauucaacugaucaauaaggcggugaacgcccucaucaaugaccagcugauuaugaaaaaccaccuuagagauaucauggggauucccuacugcaauuauagcaaguacugguaccugaaccacacaacaaccggaaaaacgucucucccuaaguguuggcugguguccaauggcagcuaucugaacgaaacacauuucucugacgacaucgaacagcaagcugauaauaugauuaccgagaugcuccagaaagaguacauggaacggcaggggaagaccccgcugggacuugucgaccuguuuguuuucagcacauccuuuuaucucaucucuaucuuccugcaccuggugaaaauucccacccaucgccacaucgugggcaagagcugcccuaagccccauagacuuaaccacaugggcauuuguuccugcgggcucuacaaacagccuggaguccccgugcgguggaagcgcugaggacuaguuauaagacugacuagcccgaugggccucccaacgggcccuccuccccuccuugcaccgagauuaaucaaaggcucuuuucagagccaccaaaaaaaaaaaaaaaaaaaaaaaaaaaaaaaaaaaaaaaaaaaaaaaaaaaaaaaaaaaaaaaaaaaaaaaaaaaaaaaaaaaaaaaaaaaaaaaaaaaaa

SEQ ID NO: 24510 - RNA, 1689 nt, Artificial Sequence
  mRNA product Design i-3 (hSL-A100) comprising derived and/or modified sequence from LASV(G502-SLE-2009;Clade IV)__AIT17126__GPCmut2 (opt5)
aggagaaagcuuaccaugggccagaucgugaccuucuuucaagaggucccccacguuauugaagaggugaugaacaucgugcugauugcccucagcauccuggcuguccuuaaggggcuguacaauuucgccacaugcggacucgugggccugcuuacguuucugcuccugugugggagauccugcaccacaggacuguauaaaggcguuuacgaacuccagacccuggagcuuaacauggaaacacugaauauguguaugccucucucuugcaccaagaacaauagccaucacuauauuaugguggggaacgagacaggacuggagcuuacccugacgaauaccuccaucaucaaccauaaauucuguaaucucucugacgcgcacaagaaaaaccuguacgaucaugcucugaugagcauuaucuccacauuucaccucucuauuccgaauuucaaccaguaugaagccaugagcugcgacuuuaauggcggcaagaucuccguccaguacaaccugagccacucuuaugccggggaugcugccgaccauuguggaaccguggcuaauggcguucuucaaacauucaugcggauggccuggggaggguccuacauugcgcuggauagcggccgcgggagaugggacugcaucaugaccucuuaccaguaucucauuauccagaacacgacaugggaggaucacugucaguuuucccggcccagcccuaucggauaccugggccuucugucucaacgcaccagagacauuuauaucucccggcgcagacggggcacauucaccuggacccucagcgauuccgaagggaaggacacacccggaggcuacugccugacgcgcuggaugcugauugaggccgagcucaaauguuuugggaacaccgcuguggccaagugcaaugaaaaacaugaugaggaguucugcgacaugcugagacuuuuugauuucuguaagcaggcuauccagcggcugaaagccccugcgcagaugucuauucaacucaucaacaaggccgucaaugcucugaucaacgaccagcuugugaugaagaaucaucugcgcgacauuaugggaauccccuauugcaacuacagcagauauugguaccucaaucacacaaccacaggccggaccucccugccuaaauguuggcuggugagcaacgggucuuaccucaaugaaacgcacuucuccgaugacauugaacagcaagccgauaacaugaucacagagaugcugcagaaggaguauauggaacgccagggaaaaaccccgcuuggccuggucgaccucuuuguuuucagcaccucuuuuuaccugauuagcaucuuccugcaccuugugaagauccccacacauagacacauugugggcaaauccugcccuaagccccaucggcucaaucacauggggaucuguucuugcggacuguauaaacagccuggcguccccgugaaguggaagagaugaggacuaguuauaagacugacuagcccgaugggccucccaacgggcccuccuccccuccuugcaccgagauuaaucaaaggcucuuuucagagccaccaaaaaaaaaaaaaaaaaaaaaaaaaaaaaaaaaaaaaaaaaaaaaaaaaaaaaaaaaaaaaaaaaaaaaaaaaaaaaaaaaaaaaaaaaaaaaaaaaaaaa

SEQ ID NO: 24511 - RNA, 1689 nt, Artificial Sequence
  mRNA product Design i-3 (hSL-A100) comprising derived and/or modified sequence from LASV(G733-SLE-2010;Clade IV)__AIT17154__GPCmut2 (opt5)
aggagaaagcuuaccaugggccagaucgugaccuucuuucaagaggucccccacguuauugaagaggugaugaacaucgugcugauugcccucagcauccuggcuguccuuaaggggcuguacaauuucgccacaugcggaauugugggccucguuuccuuucugcuucugugugggagaucuugcacgaccagccucuauaaaggaguguacgaacugcagacacuggagcucaacauggaaacccugaauauguguaugccucuuuccugcacaaagaacaauucucaucacuauaucauggucggcaacgagaccgggcuggagcucacacugaccaauacgagcaucauuaaccauaaauucuguaaucuuuccgacgcgcacaagaaaaaccuguacgaucaugcucucaugucuaucauuagcaccuuucaccuguccaucccgaauuucaaccaguaugaagccaugagcugcgacuuuaauggaggcaagauuucugugcaguacaaccugucccacagcuaugccggcgaugcugccaaucauugugggacaaucgcuaacggaguucuccaaaccuucaugcggauggccuggggcgggucuuacauugcgcuggacuccggacgcgauagaugggacugcaucaugacaagcuaccaguaucuuaucauucagaacaccacgugggaggaucacugucaguuuucucggcccuccccuaucggcuaccuggggcuccugagccaacgcacaagagacauuuauaucucccggcgcagacggggaaccuucacauggacccuuucugauagcgaaggcaaggacacccccggcggguacugccugacacgcuggaugcucauugaggccgagcugaaauguuuuggaaauacggcuguggccaagugcaacgaaaaacaugaugaggaguucugcgacaugcugagacucuuugauuucuguaagcaggcuauccagcggcugaaagccccugcgcagauguccauccaacuuauuaauaaggccgucaacgcucugaucaaugaccagcucauuaugaagaaccaucugcgcgacaucaugggcauucccuauugcaauuacagcaaauauugguaccuuaaccacaccacaaccgggaagacaucucugccuaaauguuggcucguguccaauggaagcuaccugaacgaaacccacuucucugaugacaucgaacagcaagccgauaauaugaucacggagaugcugcagaaggaguauauggaaagacagggcaaaacaccgcucgggcugguggaccuuuuugucuucagcaccuccuuuuaccugauuucuaucuuccuccaccugguuaagauucccacccaucggcacguggugggaaaaagcugcccuaagccccaucgccugaaccacaugggcaucuguuccugcggccuuuaugggcagccuggaguccccgugaaguggaaaagaugaggacuaguuauaagacugacuagcccgaugggccucccaacgggcccuccuccccuccuugcaccgagauuaaucaaaggcucuuuucagagccaccaaaaaaaaaaaaaaaaaaaaaaaaaaaaaaaaaaaaaaaaaaaaaaaaaaaaaaaaaaaaaaaaaaaaaaaaaaaaaaaaaaaaaaaaaaaaaaaaaaaaa

SEQ ID NO: 24512 - RNA, 1689 nt, Artificial Sequence
  mRNA product Design i-3 (hSL-A100) comprising derived and/or modified sequence from MOPV/LASV reassortant(IGS-1;Clade IV)__AFY05576__GPCmut2 (opt5)
aggagaaagcuuaccaugggccagaucgugaccuucuuucaagaggucccccacguuauugaagaggugaugaacaucgugcugauugcccucagcguccuggcugugcuuaaggggcuguacaauuucgccacaugcggacucguuggccuggugacguuucuucugcucugugggagauccugcaccacaucucuguauaaaggagucuacgaacugcagacccucgagcugaacauggaaacacuuaauauguguaugccucugagcugcaccaagaacaauucccaucacuauaucauggugggcaacgagacagggcucgagcugacccuuacgaauaccucuauuaucaaccauaaauucuguaaucugagcgacgcgcacaagaaaaaccucuacgaucaugcucugauguccaucauuucuacauuucaccugagcaucccgaauuucaaccaguaugaagccauguccugcgacuuuaauggaggcaagauuagcguucaguacaaccucucucacuccuaugccggcgaugcugccaaucauugugggaccguggcuaacggaguccugcaaacauucaugcggauggccuggggcgggagcuacaucgcgcuugacucuggacgcggcaacugggauugcauuaugaccuccuaccaguaucugaucauucagaauacgacaugggaggaccacugucaguuuagcagacccucuccuaucggguaccucggacugcuuucccaacggacccgcgauaucuauauuagcagacggcgcagaggcacauucaccuggacccuguccgacucugaaggcgaggauacacccgggggauacugccucacgcgguggaugcugaucgaggccgaacugaaguguuuuggcaacaccgcuguggccaaaugcaaugagaagcaugacgaagaguucugcgauaugcuccgccuguuugacuucuguaaacaggcuauucagagacuuaaggccccugcgcagaugagcauccaacugauuaacaaagccgugaaugcucucaucaacgaucagcugaucaugaagaaucaccuucgggacauuauggggauccccuauugcaacuacuccaaguauugguaccugaaucacacaaccacaggacgcaccagccucccuaaauguuggcuggucucuaacggcuccuaccugaaugaaacgcauuucagcgacgauauugagcagcaagccgacaacaugaucacagagaugcuccagaaggaauauauggagagacaggggaaaaccccgcugggacuuguugaucuguuuguguucucuaccagcuuuuaccucauuuccaucuuccugcaccuggugaagauccccacacaucggcacauugucggcaaaucuugcccuaagccccaucgccuuaaucacaugggcaucuguagcugcgggcucuauaaacagccuggagugcccguuaaguggaagagaugaggacuaguuauaagacugacuagcccgaugggccucccaacgggcccuccuccccuccuugcaccgagauuaaucaaaggcucuuuucagagccaccaaaaaaaaaaaaaaaaaaaaaaaaaaaaaaaaaaaaaaaaaaaaaaaaaaaaaaaaaaaaaaaaaaaaaaaaaaaaaaaaaaaaaaaaaaaaaaaaaaaaa

SEQ ID NO: 24513 - RNA, 1689 nt, Artificial Sequence
  mRNA product Design i-3 (hSL-A100) comprising derived and/or modified sequence from LASV(LM765-SLE-2012;Clade IV)__AIT17814__GPCmut2 (opt5)
aggagaaagcuuaccaugggccagaucgugaccuucuuucaagaggucccccacguuauugaagaggugaugaacaucgugcugauugcccucagcauccuggcuguccuuaaggggcuguacaauuucgccacaugcggacucgugggccugguuacguuucuucugcucugugggagauccugcaccacaucucuguauaaaggaguguacgaacugcagacccucgagcugaacauggaaacacuuaauauguguaugccucugagcugcaccaagaacaauucccaucacuauauuauggucggcaacgagacagggcucgagcugacccuuacgaauaccucuaucaucgaccauaaauucuguaaccugagcgaugcgcaccggaagaaucucuacgaccaugcucugauguccauuaucucuacauuucaccugagcauuccgaacuucaaucaguaugaagccauguccugcgauuuuaacggaggcaaaaucagcgugcaguacaaucucucucacuccuaugccaaggacgcugccgaucauuguggcaccguugcuaacggggugcugcaaacauucaugcgcauggccuggggaggcagcuacauugcgcuugacucugggagaggacggugggauugcaucaugaccuccuaccaguaucugauuauccagaauacgacaugggaggaccacugucaguuuagccgccccucuccuaucggcuaccucgggcugcuuucccaaagaacccgggauauuuauaucagccgcagacggcgcggaacauucaccuggacccuguccgacucugaaggcaaggauacacccggcggguacugccucacgagauggaugcugauugaggccgagcugaaauguuuuggaaacaccgcugucgccaagugcaacgaaaaacaugacgaggaguucugcgauaugcuccggcuguuugacuucuguaagcaggcuauccagcgccuuaaagccccugcgcagaugagcauucaacugaucaauaaggccgugaacgcucucaucaaugaccagcugauuaugaagaaccaccuuagagauaucaugggcauucccuauugcaauuacuccaaauauugguaccugaaccacacaaccacagggaagaccagccucccuaaauguuggcuggugucuaauggauccuaccugaacgaaacgcauuucagcgacgauaucgaacagcaagccgacaauaugauuacagagaugcuccagaaggaguauauggaacggcagggcaaaaccccgcuggggcuugucgaucuguuuguuuucucuaccagcuuuuaccucaucuccaucuuccugcaccuggugaagauucccacacaucgccacaucgugggaaaaccuugccccaagccucauagacuuaaccacaugggcauuuguucuugcggccucuauaagcagcccggggucccggugaaauggaagcggugaggacuaguuauaagacugacuagcccgaugggccucccaacgggcccuccuccccuccuugcaccgagauuaaucaaaggcucuuuucagagccaccaaaaaaaaaaaaaaaaaaaaaaaaaaaaaaaaaaaaaaaaaaaaaaaaaaaaaaaaaaaaaaaaaaaaaaaaaaaaaaaaaaaaaaaaaaaaaaaaaaaaa

SEQ ID NO: 24514 - RNA, 1689 nt, Artificial Sequence
  mRNA product Design i-3 (hSL-A100) comprising derived and/or modified sequence from LASV(LM776-SLE-2012;Clade IV)__AIT17824__GPCmut2 (opt5)
aggagaaagcuuaccaugggccagaucgugaccuucuuucaagaggucccccacguuauugaagaggugaugaacaucgugcugauugcccucagcauccuggcuguccuuaaggggcuguacaauuucgccacaugcggacucgugggccugguuacguuucuucugcucugugggagauccugcaccacaucuguguauaaaggagucuacgaacugcagacccuggagcucaacauggaaacacugaauauguguaugccucuuagcugcaccaagaacaauucccaucacuauauuauggugggcaacgagacagggcuggagcucacccugacgaauaccucuaucaucaaccauaaauucuguaaucuuagcgacgcgcacaagaaaaaccuguacgaucaugcucucauguccauuaucucuacauuucaccugagcauuccgaauuucaaccaguaugaagccauguccugcgacuuuaauggaggcaagaucagcguucaguacaaccugucucacuccuaugccggcgaugcugccaaucauugugggaccguggcuaacggaguccuccaaacauucaugcggauggccuggggcgggagcuacauugcgcuggacucuggacacggcaagugggauugcaucaugaccuccuaccaguaucuuauuauccagaacacgacaugggaggaccauugucaguuuagccgccccucuccuaucggguaccugggacuccugucccaaagaacccgggauauuuauaucagccgcagacggcgcggcacauucaccuggacccuuuccgacucugaaggcaaagauacacccgggggauacugccugacgagauggaugcucauugaggccgagcugaaguguuuuggcaauaccgcuguggccaaaugcaacgaaaagcacgacgaggaguucugcgauaugcugcggcucuuugacuucuguaaacaggcuauccagcgccugaaggccccugcgcagaugagcauucaacuuaucaauaaggccgugaacgcucugaucaaugaucagcucauuaugaaaaaccaccugagagacaucauggggauucccuauugcaauuacuccaaguauugguaccuuaaccauacaaccacaggaaaaaccagccugccuaaguguuggcucgucucuaauggcuccuaccugaacgaaacgcacuucagcgacgauaucgaacagcaagccgacaauaugauuacagagaugcugcagaaagaguauauggaacggcaggggaagaccccgcucggacugguugaucuuuuuguguucucuaccagcuuuuaccugaucuccaucuuccuccaucuggugaaaauucccacacaccgccauaucgucggcaagucuugcccuaagccccacagacugaaccacaugggcauuuguagcugcgggcuuuauaaacagccuggagugcccguucgguggaagcgcugaggacuaguuauaagacugacuagcccgaugggccucccaacgggcccuccuccccuccuugcaccgagauuaaucaaaggcucuuuucagagccaccaaaaaaaaaaaaaaaaaaaaaaaaaaaaaaaaaaaaaaaaaaaaaaaaaaaaaaaaaaaaaaaaaaaaaaaaaaaaaaaaaaaaaaaaaaaaaaaaaaaaa

SEQ ID NO: 24515 - RNA, 1689 nt, Artificial Sequence
  mRNA product Design i-3 (hSL-A100) comprising derived and/or modified sequence from LASV(Mad39;Clade IV)__ANH09722__GPCmut2 (opt5)
aggagaaagcuuaccaugggccagaucgugaccuucuuucaagaggucccccacguuauugaagaggugaugaacaucgugcugauugcccucagcauccuggcuguccuuaaggggcuguacaauguggccacaugcggacucauuggccugguuacguuccuucugcucugugggagauccugcaccacaacccuguauaaaggaguguacgaacugcaggcgcucgagcugaacauggaaacacuuaauauguguaugccucugucuugcaccaagaacaauagccaucacuauauccgggucggcaacgagacagggcucgagcugacccuuacgaauaccucccugaucaaccauaaauuuuguaaucucucugacgcucacaagaaaaaccuguacgaucaugcccugaugagcauuaucuccacauuccaccucucuauuccgaauuuuaaccaguaugaagccaugagcugcgacuucaaugauggaaagaucuccgugcaguacaaccugagccacaccuaugcuggcgacacagccaaucauuguggcaccguugcuaacggggugcuucaaacguuuaugcgcauggccuggggaggcucuuacauugcgcuggauuccgggagaggaggcugggacugcaucaugacaagcuaccaguaucucauuauccagaacaccacaugggaggaucacugucaguucucucggcccuccccuaucggguaccugggacuucugagccaacgcaccagagacauuuauaucucucggcgcagacggggcaccuuuacauggacgcucuccgauagcgaaggcaaggacacccccgggggauacugccugacacgcuggaugcugauugaggccgagcucaaauguuucggcaauaccgcugucgccaagugcaacgaaaaacaugaugaggaauuuugcgacaugcugagacuuuucgauuuuuguaagcaggcuauccagcggcugaaagccccugcgcagauguccauucaacucaucaauaaggccgugaacgcucugaucaaugaccagcuuauuaugaagaaccaucugcgcgacaucauggggauucccuauugcaauuacucuaaauauugguaccucaaccacacagugaccggaaagacgagccugccuaaauguuggcuggucuccaauggcagcuaccucaacgagacacacuucucugaugacaucgaacagcaagccgauaauaugauuaccgagaugcugcagaaggaguauauggaaagacaggggaaaaccccgcuuggacugguugaccucuucguguuuuccaccagcuucuaccugaucucuaucuuucugcaccuugugaagauucccacacaucggcacgucgugggcaaaccuugccccaagccucaucgccucaaccacaugggcaucuguagcugcggguucuauaagcagcccggaguuccggugagauggaaacggugaggacuaguuauaagacugacuagcccgaugggccucccaacgggcccuccuccccuccuugcaccgagauuaaucaaaggcucuuuucagagccaccaaaaaaaaaaaaaaaaaaaaaaaaaaaaaaaaaaaaaaaaaaaaaaaaaaaaaaaaaaaaaaaaaaaaaaaaaaaaaaaaaaaaaaaaaaaaaaaaaaaaa

SEQ ID NO: 24516 - RNA, 1689 nt, Artificial Sequence
  mRNA product Design i-3 (hSL-A100) comprising derived and/or modified sequence from LASV(Z0947-SLE-2011;Clade IV)__AIT17840__GPCmut2 (opt5)
aggagaaagcuuaccaugggccagaucgugaccuucuuucaagaggucccccacguuauugaagaggugaugaacaucgugcugauugcccucagcauccuggcuguccuuaaggggcuguacaauuucgccacaugcggacucgugggccugguuacguuucuucugcucugugggagauccugcaccauuucucuguauaaaggaguguacgaacugcagacacucgagcugaacauggaaacccuuaauauguguaugccucugagcugcacaaagaacaauucccaucacuauaucauggucggcaacgagaccgggcucgagcugacacuuaccaauacgucuaucauuaaccauaaauucuguaaucugagcgacgcgcacaagaaaaaccucuacgaucaugcucugauguccaucauuucuaccuuucaccugagcaucccgaauuucaaccaguaugaagccauguccugcgacuuuaauggaggcaagauuagcgugcaguacaaccucucucacuccuaugccggcgaugcugccaaucauugugggacaguugcuaacggagugcugcaaaccuucaugcggauggccuggggcgggagcuacaucgcgcuugacucuggacgcgauagaugggacugcauuaugacauccuaccaguaucugaucauccagaacaccacgugggaggaucacugucaguuuagccggcccucuccuauuggcuaccucgggcugcuuucccaacgcacaagagacaucuauauuagccggcgcagacggggaaccuucacauggacccuguccgauucugaaggcaaggacacccccggcggguacugccucacacgcuggaugcugaucgaggccgagcugaaauguuuuggaaauacggcugucgccaagugcaacgaaaaacaugaugaggaguucugcgacaugcucagacuguuugauuucuguaagcaggcuauucagcggcuuaaagccccugcgcagaugagcauccaacugaucaauaaggccgugaacgcucucauuaaugaccagcugaucaugaagaaccaccuucgcgacauuaugggcauccccuauugcaauuacuccaaauauugguaccugaaccacaccacaaccgggaagacaagccucccuaaauguuggcuggugucuaauggauccuaccugaacgaaacccauuucagcgaugacauugaacagcaagccgauaauaugaucacggagaugcuccagaaggaguauauggaaagacagggcaaaacaccgcuggggcuugucgaccuguuuguuuucucuaccagcuuuuaccucaucuccauuuuccugcaccuggugaagauccccacccaucggcacauugugggaaaaccuugccccaagccucaucgccuuaaccacaugggcaucuguucuugcggccucuauaagcagcccggggucccggugaaauggaagagaugaggacuaguuauaagacugacuagcccgaugggccucccaacgggcccuccuccccuccuugcaccgagauuaaucaaaggcucuuuucagagccaccaaaaaaaaaaaaaaaaaaaaaaaaaaaaaaaaaaaaaaaaaaaaaaaaaaaaaaaaaaaaaaaaaaaaaaaaaaaaaaaaaaaaaaaaaaaaaaaaaaaaa

SEQ ID NO: 24517 - RNA, 1665 nt, Artificial Sequence
  mRNA product Design i-3 (A100) comprising derived and/or modified sequence from LASV(Josiah;Clade IV)__NP_694870__GPCmut2 (opt1)
aggagaaagcuuaccaugggccagaucgugaccuucuuccaggaggucccccacgugaucgaggaggugaugaacaucguccugaucgcccucagcgugcuggccgugcugaaggggcucuacaacuucgcgaccugcggccuggucgggcuggugacguuccuccugcugugcggccgcuccugcaccaccagccucuacaaggggguguacgagcugcagacccuggagcucaacauggagacgcugaacaugugcaugccgcuguccugcaccaagaacaacagccaccacuacaucauggucggcaacgagaccggccucgagcugacgcugaccaacaccuccaucaucaaccacaaguucugcaaccucagcgacgcccacaagaagaaccuguacgaccacgcccugauguccaucaucagcaccuuccaccucuccauccccaacuucaaccaguacgaggccaugagcugcgacuucaacgggggcaagaucuccgugcaguacaaccugagccacuccuacgccggggacgcggccaaccacugcggcacgguggccaacgggguccugcagaccuucaugcggauggccuggggcggcagcuacaucgcgcucgacuccgggcgcggcaacugggacugcaucaugaccagcuaccaguaccugaucauccagaacaccacgugggaggaccacugccaguucucccggcccagccccaucggguaccugggccuccugucccagcgcacccgggacaucuacaucagccgccggcgccggggcaccuucaccuggacgcugagcgacuccgaggggaaggacaccccgggcggguacugccugacccgcuggaugcucaucgaggccgagcugaagugcuucggcaacaccgccguggccaagugcaacgagaagcacgacgaggaguucugcgacaugcugcggcuguucgacuucugcaagcaggccauccagcgccugaaggcgcccgcccagaugagcauccagcugaucaacaaggccgugaacgcccucaucaacgaccagcugaucaugaagaaccaccuccgggacaucauggggauccccuacugcaacuacuccaaguacugguaccucaaccacacgaccaccggccgcaccagccugcccaagugcuggcuggucuccaacggcagcuaccucaacgagacgcacuucuccgacgacaucgagcagcaggccgacaacaugaucaccgagaugcugcagaaggaguacauggagcggcaggggaagacgccccugggccucguggaccuguucguguucagcaccuccuucuaccugaucagcaucuuccugcaccucgucaagaucccgacccaccgccacaucguggggaaguccugccccaagccccaccggcugaaccacaugggcaucugcagcugcgggcuguacaagcagcccggcgugccggucaaguggaagcgcugaggacuaguuauaagacugacuagcccgaugggccucccaacgggcccuccuccccuccuugcaccgagauuaauaaaaaaaaaaaaaaaaaaaaaaaaaaaaaaaaaaaaaaaaaaaaaaaaaaaaaaaaaaaaaaaaaaaaaaaaaaaaaaaaaaaaaaaaaaaaaaaaaaaa

SEQ ID NO: 24518 - RNA, 1662 nt, Artificial Sequence
  mRNA product Design i-3 (A100) comprising derived and/or modified sequence from LASV(LP;Clade I)__AAF86701__GPCmut2 (opt1)
aggagaaagcuuaccaugggccagaucaucaccuucuuccaggaggugccccacgucaucgaggaggugaugaacaucgugcugaucgcccucagccugcuggccauccucaaggggcuguacaacaucgcgaccugcggcaucaucgggcuggucgccuuccucuuccugugcggcaaguccugcagccugacgcucaagggcggguacgagcugcagacccuggagcucaacauggagacccugaacaugugcaugccgcuguccugcacgaagaacagcucccaccacuacauccgcgugggcaacgagaccgggcucgagcugacccugaccaacacgagcaucaucaaccacaaguucugcaaccucuccgacgcccacaagaagaaccuguacgaccacgcccugaugagcaucaucuccaccuuccaccucagcauccccaacuucaaccaguacgaggccauguccugcgacuucaacggcgggaagaucagcgugcaguacaaccugucccacagcuacgcgggcgacgccgccgagcacugcgggaccgucgccaacggcgugcugcagaccuucaugcggauggcguggggcgggcgcuacaucgcccucgacuccggcaaggggaacugggacugcaucaugacgagcuaccaguaccugaucauccagaacaccaccugggaggaccacugccaguucucccggcccagccccaucggcuaccugggccuccugucccagcgcacccgggacaucuacaucagccgccggcgccgggggacguucaccuggacccugagcgacuccgagggcaacgagacccccgggggcuacugccugacgcgcuggaugcucaucgaggccgagcugaagugcuucgggaacaccgccguggccaagugcaacgagaagcacgacgaggaguucugcgacaugcugcggcuguucgacuucugcaagcaggcgauccgccggcugaaggcccccgcccagaugagcauccagcugaucaacaaggccgucaacgcccucaucaacgaccagcugaucaugaagaaccaccuccgcgacaucaugggcauccccuacugcaacuacuccaaguacugguaccucaaccacaccagcuccggccggaccagccugcccaagugcuggcugaucuccaacgggagcuaccucaacgagacgcaguucuccgacgacaucgagcagcaggcggacaacaugaucaccgagaugcugcagaaggaguacaucgagcgccagggcaagaccccgcuggggcucguggacaucuucaucuucagcaccuccuucuaccugaucagcaucuuccugcaccugaucaagaucccgacgcaccggcacaucgugggcaagcccugccccaagccccaccgccucaaccacaugggggucugcuccugcggccuguacaagcacccgggcgugcccaccaaguggaagcggugaggacuaguuauaagacugacuagcccgaugggccucccaacgggcccuccuccccuccuugcaccgagauuaauaaaaaaaaaaaaaaaaaaaaaaaaaaaaaaaaaaaaaaaaaaaaaaaaaaaaaaaaaaaaaaaaaaaaaaaaaaaaaaaaaaaaaaaaaaaaaaaaaaaa

SEQ ID NO: 24519 - RNA, 1662 nt, Artificial Sequence
  mRNA product Design i-3 (A100) comprising derived and/or modified sequence from LASV(803213;Clade II)__AAF86703__GPCmut2 (opt1)
aggagaaagcuuaccaugggccagaucaucaccuucuuccaggaggugccccacgucaucgaggaggugaugaacaucgugcugaucgcccucagccugcuggccauccucaaggggaucuacaacgucgcgaccugcggccuguucgggcugaucuccuuccuccugcugugcggccgcagcugcuccgugacguacaaggggguguacgagcuccagacccuggagcugaacauggccaaccucaacaugugcaugccgcugagcugcaccaagaacaacucccaccacuacaucauggucggcaacgagacgggccuggagcucacccugaccaacaccagcaucaucaaccacaaguucugcaaccuguccgacgcccacaagaagaaccucuacgaccacgcccugaugagcaucaucuccacguuccaccugagcauccccaacuucaaccaguacgaggccauguccugcgacuucaacgggggcaagaucagcgugcaguacaaccucucccacagcuucgcgguggacgccgccaaccacugcgggaccaucgccaacggcguccugcagaccuucaugcggauggcguggggcggguccuacaucgcccuggacagcggcaaggggaacugggacugcaucaugaccuccuaccaguaccucaucauccagaacacgaccugggaggaccacugccaguucagccgccccucccccaucggcuaccuggggcugcucagccagcggacccgcgacaucuacaucagccggcgccgccggggcaccuucacguggacccucuccgacagcgagggcaacgaggcccccgggggcuacugccugacccgguggaugcugaucgaggccgagcucaagugcuucgggaacaccgccguggcgaagugcaacgagaagcacgacgaggaguucugcgacaugcugcgccuguucgacuucugcaagcaggccaucaagcggcucaagacgcccgcccagauguccauccagcugaucaacaaggccgugaacgcccugaucaacgaccagcucaucaugaagaaccaccuccgcgacaucaugggcauccccuacugcaacuacagccgguacugguaccugaaccacaccgucaccgggaagaccucccugccccgcugcuggcuggugagcaacggcuccuaccugaacgagacgcacuucagcgacgacaucgagcagcaggcggacaacaugaucaccgagaugcuccagaaggaguacauggaccggcagggcaagaccccgcuggggcugguggaccucuucgucuucuccaccagcuucuaccugaucuccaucuuccugcaccuggugaagaucccgacgcaccgccacaucgugggcaagcccugccccaagccccaccggcucaaccacauggggaucugcagcugcggccuguacaagcacccggggguccccgugaaguggaagcgcugaggacuaguuauaagacugacuagcccgaugggccucccaacgggcccuccuccccuccuugcaccgagauuaauaaaaaaaaaaaaaaaaaaaaaaaaaaaaaaaaaaaaaaaaaaaaaaaaaaaaaaaaaaaaaaaaaaaaaaaaaaaaaaaaaaaaaaaaaaaaaaaaaaaa

SEQ ID NO: 24520 - RNA, 1662 nt, Artificial Sequence
  mRNA product Design i-3 (A100) comprising derived and/or modified sequence from LASV(GA391;Clade III)__CAA36645__GPCmut2 (opt1)
aggagaaagcuuaccaugggccagaucgugaccuucuuccaggaggucccccacgugaucgaggaggugaugaacaucguccugaucgcccucagcauccuggccauccugaaggggcucuacaacguggcgaccugcggccugaucgggcuggugacguuccuccugcuguccggccgcagcugcucccucaucuacaaggggaccuacgagcugcagacccuggagcucaacauggagacccugaacaugugcaugccgcugagcugcaccaagaacaacucccaccacuacauccgggucggcaacgagaccggccucgagcugacccugacgaacaccagcauccucaaccacaaguucugcaaccuguccgacgcccacaagcgcaaccuguacgaccacagccucauguccaucaucagcaccuuccaccuguccauccccaacuucaaccaguacgaggccaugagcugcgacuucaacgggggcaagaucaccgugcaguacaaccugucccacagcuucgccguggacgccgcggggcacugcggcacgcucgccaacgggguccugcagaccuucaugcggauggccuggggcggcuccuacaucgcccuggacagcgggcgcggcaacugggacugcaucaugaccuccuaccaguaccucaucauccagaacaccacgugggacgaccacugccaguucagccggcccucccccaucggguaccugggccugcucagccagcgcacccgggacaucuacaucagccgccggcgccggggcaccuucaccuggacgcucuccgacagcgaggggaacgagaccccgggcggguacugccugacccgcuggaugcugaucgaggcggagcucaagugcuucggcaacaccgccguggccaagugcaacgagaagcacgacgaggaguucugcgacaugcugcggcuguucgacuucugcaagcaggccauccgccggcucaagacgcccgcccagauguccauccagcugaucaacaaggcggugaacgcccugaucaacgaccagcucaucaugaagaaccaccuccgcgacaucauggggauccccuacugcaacuacagccgguacugguaccugaaccacaccuccaccggcaagaccagccugccccgcugcuggcugaucuccaacggcagcuaccugaacgagacgaaguucuccgacgacaucgagcagcaggccgacaacaugaucaccgagaugcuccagaaggaguacaucgaccggcaggggaagacgccccugggccuggucgaccuguucguguucagcaccuccuucuaccucaucagcaucuuccugcaccuggugaagaucccgacccaccgccacaucgucgggaagcccugccccaagccccaccggcucaaccacaugggcaucugcuccugcgggcuguacaagcagccgggcgugcccgugcgcuggaagcggugaggacuaguuauaagacugacuagcccgaugggccucccaacgggcccuccuccccuccuugcaccgagauuaauaaaaaaaaaaaaaaaaaaaaaaaaaaaaaaaaaaaaaaaaaaaaaaaaaaaaaaaaaaaaaaaaaaaaaaaaaaaaaaaaaaaaaaaaaaaaaaaaaaaa

SEQ ID NO: 24521 - RNA, 1665 nt, Artificial Sequence
  mRNA product Design i-3 (A100) comprising derived and/or modified sequence from LASV(AV;Clade V)__CCA30314__GPCmut2 (opt1)
aggagaaagcuuaccaugggccagaucgugaccuucuuccaggaggucccccacgugaucgaggaggugaugaacaucguccugaucgcccucagcauccuggccgugcugaaggggcucuacaacaucgcgaccugcggccugaucgggcugaucacguuccuccugcugugcggccgcuccugcagcuccaaccucuacaaggggguguacgagcugcagagccuggaccucaacauggagacccugaacaugugcaugccgcuguccugcaccaagaacaacagccaccacuacauccgggucggcaacgacacgggccucgagcugacccugaccaacaccuccauccucaaccacaaguucugcaaccugagcgacgcccacaagaaggaccuguacgaccacgcccucauguccaucaucagcacguuccaccuguccauccccaacuucaaccaguacgaggccaugagcugcgacuucaacgggggcaagaucuccgugcaguacaaccugagccacuccuacgccaucgacgcggccaaccacugcgggaccguggccaacggcauccuccagaccuucaugcgcauggccuggggcgggagcuacaucgcgcuggacuccggccgggggaacugggacugcaucaugaccagcuaccaguaccugaucauccagaacacgaccugggagaaccacugccaguucucccgccccagccccaucggcuaccucgggcugcugagccagcggacccgcgacaucuacaucucccggcgccgccggggcaccuucacguggacccugagcgacuccgagggcaacgccacccccgggggcuacugccucacccgguggaugcugaucgaggccgagcugaagugcuucgggaacacggccgucgccaagugcaacgagaagcacgacgaggaguucugcgacaugcuccgccuguucgacuucugcaagcaggcgaucagccggcugaagucccccgcccagaugagcauccagcucaucaacaaggccgugaacgcccugaucaacgaccagcugaucaugaagaaccaccuccgcgacaucaugggcauccccuacugcaacuacuccaaguacugguaccugaaccacaccaucaccgggaagaccagccugcccaagugcuggcucguguccaacggcagcuaccugaacgagacgcacuucuccgacgacaucgagcagcaggccgacaacaugaucaccgagaugcugcagaaggaguacauggagcggcagggcaagaccccgcucgggcuggucgaccuguucguguucagcaccuccuucuaccugaucagcaucuuccuccgccuggugaagaucccgacgcaccggcacaucgucggcaagcccugccccaagccccaccgccugaaccacauggggaucugcuccugcggccucuacaagcagccgggggugcccgugcgguggaagcgcugaggacuaguuauaagacugacuagcccgaugggccucccaacgggcccuccuccccuccuugcaccgagauuaauaaaaaaaaaaaaaaaaaaaaaaaaaaaaaaaaaaaaaaaaaaaaaaaaaaaaaaaaaaaaaaaaaaaaaaaaaaaaaaaaaaaaaaaaaaaaaaaaaaaa

SEQ ID NO: 24522 - RNA, 1662 nt, Artificial Sequence
  mRNA product Design i-3 (A100) comprising derived and/or modified sequence from LASV(Togo/2016/7082;Clade VI)__AMR44577__GPCmut2 (opt1)
aggagaaagcuuaccaugggccagaucaucaccuucuuccaggaggugccccacgucaucgaggaggugaugaacaucgugcugaucgcccucagccugcuggccauccucaagggggucuacaacguggcgaccugcggcaucaucgggcuggugacguuccuguuccucugcggccgcuccugcagccugaucuacaagggguccuacgagcugcagacccucgagcugaacauggagacccugaacaugugcaugccgcucagcugcacgaagaacuccagccaccacuacauccgggucggcaacgagaccggccuggagcugacccucaccaacacguccaucaucaaccacaaguucugcaaccugagcgacgcccacaagcgcaaccuguacgaccacgcccucauguccauccugagcaccuuccaccuguccauccccaacuucaaccaguacgaggccaugagcugcgacuucaacgggggcaagaucuccgugcaguacaaccucagccacgccuacgcgguggacgccgccgagcacugcgggaccgucgccaacggcgugcugcagaccuucaugcggauggcguggggcggguccuacaucgcccuggacagcggccgcgggaacugggacugcaucaugacguccuaccaguaccucaucauccagaacaccaccugggaggaccacugccaguucagccggcccucccccaucggcuaccuggggcugcucagccagcgcacccgggacaucuacaucagccgccggcgccggggcacguucaccuggacccucuccgacagcgagggcaacgagacccccgggggcuacugccugacgcgcuggaugcugaucgaggccgagcucaagugcuucgggaacaccgccguggccaagugcaacgagaagcacgacgaggaguucugcgacaugcugcggcuguucgacuucugcaagcaggcgauccagcgccucaagucccccgcccagaugagcauccagcugaucaacaaggccgucaacgcccugaucaacgaccagcucaucaugaagaaccaccuccgggacaugaugggcauccccuacugcaacuacuccaaguacugguaccugaaccacaccagcuccgggcgcaccagccugcccaagugcuggcugguguccaacggcagcuaccugaacgagacgcacuucuccgacgacaucgagcagcaggccgacaacaugaucaccgagaugcuccagaaggaguacaucgaccggcagggcaagaccccgcuggggcugguggaccucuucgucuucagcaccuccuucuaccugaucagcaucuuccugcaccugaucaagaucccgacgcaccgccacaucgugggcaagcccugccccaagccccaccggcucaaccacauggggaucugcuccugcggccuguacaagcagccgggggugcccacccgcuggaagcggugaggacuaguuauaagacugacuagcccgaugggccucccaacgggcccuccuccccuccuugcaccgagauuaauaaaaaaaaaaaaaaaaaaaaaaaaaaaaaaaaaaaaaaaaaaaaaaaaaaaaaaaaaaaaaaaaaaaaaaaaaaaaaaaaaaaaaaaaaaaaaaaaaaaa

SEQ ID NO: 24523 - RNA, 1662 nt, Artificial Sequence
  mRNA product Design i-3 (A100) comprising derived and/or modified sequence from LASV(KAK-428;Clade n.d. (VII))__ANH09740__GPCmut2 (opt1)
aggagaaagcuuaccaugggccagaucgugaccuucuuccaggaggucccccacgugaucgaggaggugaugaacaucguccugaucgcccucagccugcuggccauccucaaggggcuguacaacuucgcgaccugcggcgugaucgggcugaucacguuccuccugcugugcggccgcuccugcagcgccaccuacaaggggcaguacgagcuccagacccuggagcugaacauggagucccucaacaugugcaugccgcugagcugcacgaagaacaacucccaccacuacauccgggccggcaacaacaccggccuggagcucacccugaccaacacgagcaucaucucccacaaguucugcaaccugagcgacgcccacaagaagaaccucuacgaccacacccugauguccaucaucaccaccuuccaccugagcauccccaacuucaaccaguacgaggccauguccugcgacuucaacgggggcaagaucagcauccaguacaaccucucccacagcuacgcgggggacgccgcccagcacugcggcacgguggccaacgggguccugcagaccuucaugcgcauggcguggggcggcuccuaccuggcccucgacagcgggcggcgcggcugggacugcaucaucuccagcuaccaguaccugaucauccagaacaccaccugggacgaccacugccaguucucccggcccagccccaucggguaccugggcuucgugagccagaagacgcgcgacaucuacaucucccggcgccgccggggcaccuucaccuggacccugagcgacuccgaggggcacgacaugccgggcggguacugccucacgcgguggaugcugaucgaggccgaccugaagugcuucggcaacaccgccguggccaagugcaacgagaagcacgacgaggaguucugcgacauguggcgccucuucgacuucugcaagcaggcgauccagcggcugaaggcccccgcccagaugaacauccagcugaucaacaaggccgucaacgcccucaucaacgaccagcugaugaugaagaaccaccuccgcgacaucauggggauccccuacugcaacuacagcaaguucugguaccugaacaacaccaccacgggccggaccucccugccccgcugcuggcugaucagcaacggcuccuaccucaacgagacccacuucagcgacgacaucgagcagcaggcggacaacaugaucaccgagaugcugcagaaggaguacauggaccggcaggggaagacgccccugggccucguggaccuguucguguucuccaccagcuucuaccugaucaccaucuuccuccaccuggucaagaucccgacccaccgccacaucguggggaagcccugccccaagccccaccggcugaaccacaugggcaucugcuccugcgggcuguacaagcagccgggcgugcccguccgcuggaagcggugaggacuaguuauaagacugacuagcccgaugggccucccaacgggcccuccuccccuccuugcaccgagauuaauaaaaaaaaaaaaaaaaaaaaaaaaaaaaaaaaaaaaaaaaaaaaaaaaaaaaaaaaaaaaaaaaaaaaaaaaaaaaaaaaaaaaaaaaaaaaaaaaaaaa

SEQ ID NO: 24524 - RNA, 1662 nt, Artificial Sequence; identical to SEQ ID NO: 24518
  mRNA product Design i-3 (A100) comprising derived and/or modified sequence from LASV(Pinneo-NIG-1969;Clade I)__AIT17836__GPCmut2 (opt1)

SEQ ID NO: 24525 - RNA, 1662 nt, Artificial Sequence
  mRNA product Design i-3 (A100) comprising derived and/or modified sequence from LASV(ISTH0009-NIG-2011;Clade II)__AIT17404__GPCmut2 (opt1)
aggagaaagcuuaccaugggccagaucaucaccuucuuccaggaggugccccacgucaucgaggaggugaugaacaucgugcugaucgcccucagccugcuggccauccucaaggggaucuacaacgucgcgaccugcggccuguucgggcugguguccuuccuccugcugugcggccgcagcugcuccacgaccuacaaggggguguacgagcuccagacccuggagcuggacauggccagccucaacaugugcaugccgcuguccugcacgaagaacaacagccaccacuacaucauggucggcaacgagaccggccuggagcucacccugaccaacacguccaucaucaaccacaaguucugcaaccugagcgacgcccacaagaagaaccucuacgaccacgcccugauguccaucaucagcaccuuccaccuguccauccccaacuucaaccaguacgaggccaugagcugcgacuucaacgggggcaagaucuccgugcaguacaaccucagccacgcguacgccguggacgccgccaaccacugcgggaccaucgcgaacggcguccugcagaccuucaugcggauggccuggggcggguccuacaucgcccuggacagcggcaagggguccugggacugcaucaugacgagcuaccaguaccucaucauccagaacaccaccugggaggaccacugccaguucucccgccccagccccaucggcuaccuggggcugcucagccagcggacccgcgacaucuacaucucccggcgccgccggggcacguucaccuggacccucagcgacuccgagggcaacgagacccccgggggcuacugccugacgcgguggaugcugaucgaggccgagcucaagugcuucgggaacaccgccguggcgaagugcaacgagaagcacgacgaggaguucugcgacaugcugcgccuguucgacuucugcaagcaggccauccggcgccucaagacccccgcccagaugagcauccagcugaucaacaaggccgugaacgcccugaucaacgaccagcucaucaugaagaaccaccuccgggacaucaugggcaucccguacugcaacuacuccaaguacugguaccugaaccacaccgucacggggaagaccagccugccccgcugcuggcugguguccaacggcagcuaccugaacgagacccacuucuccgacgacaucgagcagcaggcggacaacaugaucaccgagcuccugcagaaggaguacauggaccggcagggcaagacgccccuggggcucguggaccuguucgucuucagcaccuccuucuaccugaucagcaucuuccugcaccucaucaagaucccgacccaccgccacaucaccggcaagcccugccccaagccccaccggcugaaccacauggggaucugcuccugcggccuguacaagcacccgggggugcccgugaaguggaagcgcugaggacuaguuauaagacugacuagcccgaugggccucccaacgggcccuccuccccuccuugcaccgagauuaauaaaaaaaaaaaaaaaaaaaaaaaaaaaaaaaaaaaaaaaaaaaaaaaaaaaaaaaaaaaaaaaaaaaaaaaaaaaaaaaaaaaaaaaaaaaaaaaaaaaa

SEQ ID NO: 24526 - RNA, 1662 nt, Artificial Sequence
  mRNA product Design i-3 (A100) comprising derived and/or modified sequence from LASV(ISTH2010-NIG-2012;Clade II)__AIT17482__GPCmut2 (opt1)
aggagaaagcuuaccaugggccagaucaucaccuucuuccaggaggugccccacgucaucgaggaggugaugaacaucgugcugaucgcccucagccugcuggccauccucaaggggaucuacaacgucgcgaccugcggccuguucgggcugguguccuuccuccugcugugcggccgcagcugcuccacgaccuacaaggggguguacgagcuccagacccuggagcuggacauggccagccucaacaugugcaugccgcuguccugcacgaagaacaacagccaccacuacaucauggucggcaacgagaccggccuggagcucacccugaccaacacguccaucaucaaccacaaguucugcaaccugagcgacgcccacaagaagaaccucuacgaccacgcccugauguccaucaucagcaccuuccaccuguccauccccaacuucaaccaguacgaggccaugagcugcgacuucaacgggggcaagaucuccgugcaguacaaccucagccacgcguacgccguggacgccgccaaccacugcgggaccaucgcgaacggcguccugcagaccuucaugcggauggccuggggcggguccuacaucgcccuggacagcggcaagggguccugggacugcaucaugacgagcuaccaguaccucaucauccagaacaucaccugggaggaccacugccaguucucccgccccagccccaucggcuaccuggggcugcucagccagcggacccgcgacaucuacaucucccggcgccgccggggcaccuucacguggacccucagcgacuccgagggcaacgagacccccgggggcuacugccugacccgguggaugcugaucgaggccgagcucaagugcuucgggaacacggccguggcgaagugcaacgagaagcacgacgaggaguucugcgacaugcugcgccuguucgacuucugcaagcaggccauccggcgccucaagacccccgcccagaugagcauccagcugaucaacaaggccgugaacgcccugaucaacgaccagcucaucaugaagaaccaccuccgggacaucaugggcauccccuacugcaacuacuccaaguacugguaccugaaccacaccgucaccgggaagacgagccugccccgcugcuggcugguguccaacggcagcuaccugaacgagacccacuucuccgacgacaucgagcagcaggcggacaacaugaucaccgagcuccugcagaaggaguacaucgaccggcagggcaagaccccgcuggggcucguggaccuguucgucuucagcacguccuucuaccugaucagcaucuuccugcaccucgugaagaucccgacccaccgccacguggucggcaagcccugccccaagccccaccggcugaaccacauggggaucugcuccugcggccuguacaagcacccgggggugcccgugaaguggaagcgcugaggacuaguuauaagacugacuagcccgaugggccucccaacgggcccuccuccccuccuugcaccgagauuaauaaaaaaaaaaaaaaaaaaaaaaaaaaaaaaaaaaaaaaaaaaaaaaaaaaaaaaaaaaaaaaaaaaaaaaaaaaaaaaaaaaaaaaaaaaaaaaaaaaaa

SEQ ID NO: 24527 - RNA, 1662 nt, Artificial Sequence
  mRNA product Design i-3 (A100) comprising derived and/or modified sequence from LASV(Lassa virus/H.sapiens-wt/NGA/2015/ISTH_0543;Clade II)__AVO03639__GPCmut2 (opt1)
aggagaaagcuuaccaugggccagaucaucaccuucuuccaggaggugccccacgucaucgaggaggugaugaacaucgugcugaucgcccucagccugcuggccauccucaaggggaucuacaacgucgcgaccugcggccuguucgggcugguguccuuccuccugcugugcggccgcagcugcuccacgaccuacaaggggguguacgagcuccagacccuggagcuggacauggccaaccucaacaugugcaugccgcugagcugcacgaagaacaacucccaccacuacaucauggucggcaacgagaccggccuggagcucacccugaccaacacgagcaucaucaaccacaaguucugcaaccuguccgacgcccacaagaagaaccucuacgaccacgcccugaugagcaucaucuccaccuuccaccugagcauccccaacuucaaccaguacgaggccauguccugcgacuucaacgggggcaagaucagcgugcaguacaaccucucccacaccuacgcgguggacgccgccaaccacugcgggaccaucgccaacggcguccugcagacguucaugcggauggcguggggcgggagcuacaucgcccuggacuccggcaaggggagcugggacugcaucaugaccuccuaccaguaccucgugauccagaacaccaccugggaggaccacugccaguucagccgccccucccccaucggcuaccuggggcugcucagccagcggacgcgcgacaucuacaucagccggcgccgccggggcaccuucaccuggacccucuccgacagcgagggcaacgagacgcccgggggcuacugccugacccgguggaugcugaucgaggccgagcucaagugcuucgggaacaccgccguggccaagugcaacgagaagcacgacgaggaguucugcgacaugcugcgccuguucgacuucugcaagcaggcgauccggcgccucaagacccccgcccagauguccauccagcugaucaacaaggccgucaacgcccugaucaacgaccagcucaucaugaagaaccaccuccgggacaucaugggcauccccuacugcaacuacagcaaguacugguaccugaaccacacggugaccgggaagaccucccugccccgcugcuggcuggugagcaacggcuccuaccugaacgagacccacuucagcgacgacaucgagcagcaggccgacaacaugaucacggagcuccugcagaaggaguacaucgaccggcagggcaagaccccgcuggggcucgucgaccuguucguguucuccaccagcuucuaccugaucuccaucuuccugcaccucgugaagaucccgacccaccgccacaucacgggcaagcccugccccaagccccaccggcugaaccacauggggaucugcagcugcggccuguacaagcacccggggguccccgugaaguggaagcgcugaggacuaguuauaagacugacuagcccgaugggccucccaacgggcccuccuccccuccuugcaccgagauuaauaaaaaaaaaaaaaaaaaaaaaaaaaaaaaaaaaaaaaaaaaaaaaaaaaaaaaaaaaaaaaaaaaaaaaaaaaaaaaaaaaaaaaaaaaaaaaaaaaaaa

SEQ ID NO: 24528 - RNA, 1662 nt, Artificial Sequence
  mRNA product Design i-3 (A100) comprising derived and/or modified sequence from LASV(Lassa virus/H.sapiens-wt/NGA/2016/ISTH_0009;Clade II)__AVO03571__GPCmut2 (opt1)
aggagaaagcuuaccaugggccagaucaucaccuucuuccaggaggugccccacgucaucgaggaggugaugaacaucgugcugaucgcccucagccugcuggccauccucaaggggaucuacaacgucgcgaccugcggccugcuggggcucguguccuuccugcugcucugcggccgcagcugcuccacgaccuacaaggggguguacgagcugcagacccuggagcucgacauggccagccugaacaugugcaugccgcuguccugcacgaagaacaacagccaccacuacaucauggucggcaacgagaccggccucgagcugacccugaccaacacguccaucaucaaccacaaguucugcaaccucagcgacgcccacaagaagaaccuguacgaccacgcccugauguccaucaucagcaccuuccaccucuccauccccaacuucaaccaguacgaggccaugagcugcgacuucaacgggggccggaucuccgugcaguacaaccugagccacuccuacgcgguggacgccgccaaccacugcgggaccaucgccaacggcguccugcagaccuucaugcgcauggcguggggcgggagcuacaucgcccucgacuccggcaaggggagcugggacugcaucaugacguccuaccaguaccugaucauccagaacaccaccugggaggaccacugccaguucagccggcccagccccaucggcuaccuggggcuccugucccagcgcacccgggacaucuacaucagccgccggcgccggggcacguucaccuggacccuguccgacagcgagggcaacgagacccccgggggcuacugccugacgcgcuggaugcucaucgaggccgagcugaagugcuucgggaacaccgccguggccaagugcaacgagaagcacgacgaggaguucugcgacaugcugcggcuguucgacuucugcaagcaggcgauccgccggcugaagacccccgcccagauguccauccagcugaucaacaaggccgugaacgcccucaucaacgaccagcugaucaugaagaaccaccuccgcgacaucaugggcaucccguacugcaacuacagcaaguacugguaccucaaccacaccgucacggggaagaccucccugccccggugcuggcuggugagcaacggcuccuaccucaacgagacccacuucagcgacgacaucgagcagcaggccgacaacaugaucaccgagcugcugcagaaggaguacaucgaccgccagggcaagacgccccucgggcugguggaccuguucgucuucuccaccagcuucuaccugaucuccaucuuccuccaccuggugaagaucccgacccaccggcacaucaccggcaagcccugccccaagccccaccgccugaaccacauggggaucugcagcugcggccucuacaaccacccgggggugcccgucaaguggaagcggugaggacuaguuauaagacugacuagcccgaugggccucccaacgggcccuccuccccuccuugcaccgagauuaauaaaaaaaaaaaaaaaaaaaaaaaaaaaaaaaaaaaaaaaaaaaaaaaaaaaaaaaaaaaaaaaaaaaaaaaaaaaaaaaaaaaaaaaaaaaaaaaaaaaa

SEQ ID NO: 24529 - RNA, 1662 nt, Artificial Sequence
  mRNA product Design i-3 (A100) comprising derived and/or modified sequence from LASV(Lassa virus/H.sapiens-wt/NGA/2016/ISTH_0017;Clade II)__AVO03567__GPCmut2 (opt1)
aggagaaagcuuaccaugggccagaucaucaccuucuuccaggaggugccccacgucaucgaggaggugaugaacaucgugcugaucgcccucagccugcuggccauccucaaggggaucuacaacgucgcgaccugcggccuguucgggcugguguccuuccuccugcugugcggccgcagcugcuccacgaccuacaaggggguguacgagcuccagacccuggagcuggacauggccagccucaacaugugcaugccgcuguccugcacgaagaacaacagccaccacuacaucauggucggcaacgagaccggccuggagcucacccugaccaacacguccaucaucaaccacaaguucugcaaccugagcgacgcccacaagaagaaccucuacgaccacgcccugauguccaucaucagcaccuuccaccuguccauccccaacuucaaccaguacgaggccaugagcugcgacuucaacgggggcaagaucuccgugcaguacaaccucagccacaccuacgcgaucgacgccgccaaccacugcgggaccaucgccaacggcgugcugcagacguucaugcggauggcguggggcggguccuacaucgcccuggacagcggcaagggguccugggacugcaucaugaccagcuaccaguaccucaucauccagaacaccaccugggaggaccacugccaguucucccgccccagccccaucggcuaccuggggcugcucagccagcggacgcgcgacaucuacaucucccggcgccgccggggcaccuucaccuggacccucagcgacuccgagggcaacgagacgcccgggggcuacugccugacccgguggaugcugaucgaggccgagcucaagugcuucgggaacaccgccgucgccaagugcaacgagaagcacgacgaggaguucugcgacaugcugcgccuguucgacuucugcaagcaggcgauccggcgccucaagacccccgcccagaugagcauccagcugaucaacaaggccgugaacgcccugaucaacgaccagcucaucaugaagaaccaccuccgggacaucaugggcauccccuacugcaacuacuccaaguacugguaccugaaccacacggugaccgggaagaccagccugccccgcugcuggcuggucuccaacggcagcuaccugaacgagacccacuucuccgacgacaucgagcagcaggccgacaacaugaucacggagcuccugcagaaggaguacauggaccggcagggcaagaccccgcuggggcucguggaccuguucguguucagcaccuccuucuaccugaucagcaucuuccugcaccucguccgcaucccgacccaccggcacgugaucggcaagcccugccccaagccccaccgccugaaccacauggggaucugcuccugcggccuguacaagcacccgggggugcccgucaaguggaagcggugaggacuaguuauaagacugacuagcccgaugggccucccaacgggcccuccuccccuccuugcaccgagauuaauaaaaaaaaaaaaaaaaaaaaaaaaaaaaaaaaaaaaaaaaaaaaaaaaaaaaaaaaaaaaaaaaaaaaaaaaaaaaaaaaaaaaaaaaaaaaaaaaaaaa

SEQ ID NO: 24530 - RNA, 1662 nt, Artificial Sequence
  mRNA product Design i-3 (A100) comprising derived and/or modified sequence from LASV(Lassa virus/H.sapiens-wt/NGA/2018/ISTH_0959;Clade II)__AVV65099__GPCmut2 (opt1)
aggagaaagcuuaccaugggccagaucaucaccuucuuccaggaggugccccacgucaucgaggaggugaugaacaucgugcugaucgcccucagccugcuggccauccucaaggggaucuacaacgucgugaccugcggccuguucgggcugguguccuuccuccugcugugcggccgcagcugcuccacgaccuacaagggggucuacgagcuccagacccuggagcuggacauggcgagccucaacaugugcaugccgcuguccugcacgaagaacaacagccaccacuacaucauggugggcaacgagaccggccuggagcucacccugaccaacacguccaucaucaaccacaaguucugcaaccugagcgacgcccacaagaagaaccucuacgaccacgcccugauguccaucaucagcaccuuccaccuguccauccccaacuucaaccaguacgaggccaugagcugcgacuucaacgggggcaagaucuccgugcaguacaaccucagccacgccuacgcgaucgacgccgccaaccacugcgggaccaucgccaacggcguccugcagaccuucaugcggauggcguggggcggguccuacaucgcccuggacagcggcaagggguccugggacugcaucaugacgagcuaccaguaccucaucauccagaacaccaccugggaggaccacugccaguucucccgccccagccccaucggcuaccuggggcugcucagccagcggacccgcgacaucuacaucucccggcgccgccggggcacguucaccuggacccucagcgacuccgagggcaacgagacccccgggggcuacugccugacgcgguggaugcugaucgaggccgagcucaagugcuucgggaacaccgccguggccaagugcaacgagaagcacgacgaggaguucugcgacaugcugcgccuguucgacuucugcaagcaggcgauccggcgccucaagacccccgcccagaugagcauccagcugaucaacaaggccgugaacgcccugaucaacgaccagcucaucaugaagaaccaccuccgggacaucaugggcaucccguacugcaacuacuccaaguacugguaccugaaccacaccgucacggggaagaccagccugccccgcugcuggcugguguccaacggcagcuaccugaacgagacccacuucuccgacgacaucgagcagcaggccgacaacaugaucaccgagcuccugcagaaggaguacaucgaccggcagggcaagacgccccuggggcucguggaccuguucgucuucagcaccuccuucuaccugaucagcaucuuccugcaccucgugaagaucccgacccaccgccacgugaucggcaagcccugccccaagccccaccggcugaaccacauggggaucugcuccugcggccuguacaagcacccggggguccccgugaaguggaagcgcugaggacuaguuauaagacugacuagcccgaugggccucccaacgggcccuccuccccuccuugcaccgagauuaauaaaaaaaaaaaaaaaaaaaaaaaaaaaaaaaaaaaaaaaaaaaaaaaaaaaaaaaaaaaaaaaaaaaaaaaaaaaaaaaaaaaaaaaaaaaaaaaaaaaa

SEQ ID NO: 24531 - RNA, 1662 nt, Artificial Sequence
  mRNA product Design i-3 (A100) comprising derived and/or modified sequence from LASV(LASV003-NIG-2008;Clade II)__AIT17580__GPCmut2 (opt1)
aggagaaagcuuaccaugggccagaucaucaccuucuuccaggaggugccccacgucaucgaggaggugaugaacaucgugcugaucgcccucagccugcuggccauccucaaggggaucuacaacgucgcgaccugcggccuguucgggcugguguccuuccuccugcugugcggccgcagcugcuccacgaccuacaaggggguguacgagcuccagacccuggagcuggacauggccagccucaacaugugcaugccgcuguccugcacgaagaacaacagccaccacuacaucauggucggcaacgagaccggccuggagcucacccugaccaacacguccaucaucaaccacaaguucugcaaccugagcgacgcccacaagaagaaccucuacgaccacgcccugauguccaucaucagcaccuuccaccuguccauccccaacuucaaccaguacgaggccaugagcugcgacuucaacgggggcaagaucuccgugcaguacaaccucagccacaccuacgcgguggacgccgccaaccacugcgggaccaucgccaacggcguccugcagacguucaugcggauggcguggggcggguccuacaucgcccuggacagcggcaagggguccugggacugcaucaugaccagcuaccaguaccucaucauccagaacaccaccugggaggaccacugccaguucucccgccccagccccaucggcuaccuggggcugcucagccagcggacgcgcgacaucuacaucucccggcgccgccggggcaccuucaccuggacccucagcgacuccgagagcaacgagacgccgggcggguacugccugacccgguggaugcugaucgaggccgagcucaagugcuucggcaacaccgccguggccaagugcaacgagaagcacgacgaggaguucugcgacaugcugcgccuguucgacuucugcaagcaggcgauccggcgccucaaggcccccgcccagauguccauccagcugaucaacaaggccgugaacgcccugaucaacgaccagcucaucaugaagaaccaccuccgggacaucauggggauccccuacugcaacuacagcaaguacugguaccugaaccacaccgucacgggccgcaccucccugccccggugcuggcuggugagcaacggguccuaccugaacgagacccacuucagcgacgacaucgagcagcaggcggacaacaugaucaccgagcuccugcagaaggaguacauggaccgccagggcaagacgccccugggccucguggaccuguucgucuucuccaccagcuucuaccugaucuccaucuuccugcaccucgugaagaucccgacccaccggcacgugaucgggaagcccugccccaagccccaccgccugaaccacaugggcaucugcagcugcgggcuguacaagcacccgggcguccccgugaaguggaagcggugaggacuaguuauaagacugacuagcccgaugggccucccaacgggcccuccuccccuccuugcaccgagauuaauaaaaaaaaaaaaaaaaaaaaaaaaaaaaaaaaaaaaaaaaaaaaaaaaaaaaaaaaaaaaaaaaaaaaaaaaaaaaaaaaaaaaaaaaaaaaaaaaaaaa

SEQ ID NO: 24532 - RNA, 1662 nt, Artificial Sequence
  mRNA product Design i-3 (A100) comprising derived and/or modified sequence from LASV(LASV035-NIG-2009;Clade II)__AIT17588__GPCmut2 (opt1)
aggagaaagcuuaccaugggccagaucaucaccuucuuccaggaggugccccacgucaucgaggaggugaugaacaucgugcugaucgcccucagccugcuggccauccucaaggggaucuacaacgucgcgaccugcggccuguucgggcugguguccuuccuccugcugugcggccgcagcugcuccacgaccuacaaggggguguacgagcuccagacccuggagcuggacauggccagccucaacaugugcaugccgcuguccugcacgaagaacaacagccaccacuacaucauggucggcaacgagaccggccuggagcucacccugaccaacacguccaucaucaaccacaaguucugcaaccugagcgacgcccacaagaagaaccucuacgaccacgcccugauguccaucaucagcaccuuccaccuguccauccccaacuucaaccaguacgaggccaugagcugcgacuucaacgggggcaagaucuccgugcaguacaaccucagccacgcguacgccguggacgccgccaaccacugcgggaccaucgcgaacggcguccugcagaccuucaugcggauggccuggggcggguccuacaucgcccuggacagcggcaagggguccugggacugcaucaugacgagcuaccaguaccucaucauccagaacaccaccugggaggaccacugccaguucucccgccccagccccaucggcuaccuggggcugcucagccagcggacccgcgacaucuacaucucccggcgccgccggggcacguucaccuggacccucagcgacuccgagggcaacgagacccccgggggcuacugccugacgcgguggaugcugaucgaggccgagcucaagugcuucgggaacaccgccguggcgaagugcaacgagaagcacgacgaggaguucugcgacaugcugcgccuguucgacuucugcaagcaggccauccggcgccucaaggcccccgcccagaugagcauccagcugaucaacaaggccgugaacgcgcugaucaacgaccagcucaucaugaagaaccaccuccgggacaucaugggcauccccuacugcaacuacuccaaguacugguaccugaaccacaccgucaccgggaagacgagccugccccgcugcuggcugguguccaacggcagcuaccugaacgagacccacuucuccgacgacaucgagcagcaggccgacaacaugaucaccgagcuccugcagaaggaguacaucgaccggcagggcaagaccccgcuggggcucguggaccuguucgucuucagcacguccuucuaccugaucagcaucuuccugcaccucgugaagaucccgacccaccgccacgugaucggcaagcccugccccaagccccaccggcugaaccacauggggaucugcuccugcggccuguacaagcacccggggguccccgugaaguggaagcgcugaggacuaguuauaagacugacuagcccgaugggccucccaacgggcccuccuccccuccuugcaccgagauuaauaaaaaaaaaaaaaaaaaaaaaaaaaaaaaaaaaaaaaaaaaaaaaaaaaaaaaaaaaaaaaaaaaaaaaaaaaaaaaaaaaaaaaaaaaaaaaaaaaaaa

SEQ ID NO: 24533 - RNA, 1662 nt, Artificial Sequence
  mRNA product Design i-3 (A100) comprising derived and/or modified sequence from LASV(LASV1000-NIG-2009;Clade II)__AIT17782__GPCmut2 (opt1)
aggagaaagcuuaccaugggccagaucaucaccuucuuccaggaggugccccacgucaucgaggaggugaugaacaucgugcugaucgcccucagccugcuggccauccucaaggggaucuacaacgucgcgaccugcggccuguucgggcugguguccuuccuccugcugugcggccgcagcugcuccacgaccuacaaggggguguacgagcuccagacccuggagcuggacauggccagccucaacaugugcaugccgcuguccugcacgaagaacaacagccaccacuacaucauggucggcaacgagaccggccuggagcucacccugaccaacacguccaucaucaaccacaaguucugcaaccugagcgacgcccacaagaagaaccucuacgaccacgcccugauguccaucaucagcaccuuccaccuguccauccccaacuucaaccaguacgaggccaugagcugcgacuucaacgggggcaagaucuccgugcaguacaaccucagccacaccuacgcgguggacgccgccaaccacugcgggaccaucgccaacggcguccugcagacguucaugcggauggcguggggcggguccuacaucgcccuggacagcggcaagggguccugggacugcaucaugaccagcuaccaguaccucaucauccagaacaccaccugggaggaccacugccaguucucccgccccagccccaucggcuaccuggggcugcucagccagcggacgcgcgacaucuacaucucccggcgccgccggggcaccuucaccuggacccucagcgacuccgagggcaacgagacgcccgggggcuacugccugacccgguggaugcugaucgaggccgagcucaagugcuucgggaacaccgccguggccaagugcaacgagaagcacgacgaggaguucugcgacaugcugcgccuguucgacuucugcaagcaggcgaucaagcggcucaagacccccgcccagaugagcauccagcugaucaacaaggccgugaacgcccugaucaacgaccagcucaucaugaagaaccaccuccgcgacaucaugggcauccccuacugcaacuacuccaaguacugguaccugaaccacacggucaccgggaagaccagccugccccggugcuggcugguguccaacggcagcuaccugaacgagacccacuucuccgacgacaucgagcagcaggccgacaacaugaucacggagcuccugcagaaggaguacaucgaccgccagggcaagaccccgcuggggcucguggaccuguucgucuucagcaccuccuucuaccugaucagcaucuuccugcaccucgugaagaucccgacccaccggcacguggucggcaagcccugccccaagccccaccgccugaaccacauggggaucugcuccugcggccuguacaagcacccgggggugcccgugaaguggaagcggugaggacuaguuauaagacugacuagcccgaugggccucccaacgggcccuccuccccuccuugcaccgagauuaauaaaaaaaaaaaaaaaaaaaaaaaaaaaaaaaaaaaaaaaaaaaaaaaaaaaaaaaaaaaaaaaaaaaaaaaaaaaaaaaaaaaaaaaaaaaaaaaaaaaa

SEQ ID NO: 24534 - RNA, 1662 nt, Artificial Sequence
  mRNA product Design i-3 (A100) comprising derived and/or modified sequence from LASV(LASV221-NIG-2010;Clade II)__AIT17624__GPCmut2 (opt1)
aggagaaagcuuaccaugggccagaucaucaccuucuuccaggaggugccccacgucaucgaggaggugaugaacaucgugcugaucgcccucagccugcuggccauccucaaggggaucuacaacgucgcgaccugcggccuguucgggcugguguccuuccuccugcugugcggccgcagcugcuccacgaccuacaaggggguguacgagcuccagacccuggagcuggacauggccagccucaacaugugcaugccgcuguccugcacgaagaacaacagccaccacuacaucauggucggcaacgagaccggccuggagcucacccugaccaacacguccaucaucaaccacaaguucugcaaccugagcgacgcccacaagaagaaccucuacgaccacgcccugauguccaucaucagcaccuuccaccuguccauccccaacuucaaccaguacgaggccaugagcugcgacuucaacgggggcaagaucuccgugcaguacaaccucagccacaccuacgcgaucgacgccgccaaccacugcgggaccaucgccaacggcgugcugcagacguucaugcggauggcguggggcggguccuacaucgcccuggacagcggcaagggguccugggacugcaucaugaccagcuaccaguaccucaucauccagaacaccaccugggaggaccacugccaguucucccgccccagccccaucggcuaccuggggcugcucagccagcggacgcgcgacaucuacaucucccggcgccgccggggcaccuucaccuggacccucagcgacuccgagggcaacgagacgcccgggggcuacugccugacccgguggaugcugaucgaggccgagcucaagugcuucgggaacaccgccgucgccaagugcaacgagaagcacgacgaggaguucugcgacaugcugcgccuguucgacuucugcaagcaggcgauccggcgccucaagacccccgcccagaugagcauccagcugaucaacaaggccgugaacgcccugaucaacgaccagcucaucaugaagaaccaccuccgggacaucaugggcauccccuacugcaacuacuccaaguacugguaccugaaccacacggugaccgggaagaccagccugccccgcugcuggcuggucuccaacggcagcuaccugaacgagacccacuucuccgacgacaucgagcagcaggccgacaacaugaucacggagaugcuccagaaggaguacauggaccggcagggcaagaccccgcuggggcugguggaccucuucguguucagcaccuccuucuaccugaucagcaucuuccugcaccuggucaagaucccgacccaccgccacgugaucggcaagcccugccccaagccccaccggcucaaccacauggggaucugcuccugcggccuguacaagcacccgggggugcccgucaaguggaagcgcugaggacuaguuauaagacugacuagcccgaugggccucccaacgggcccuccuccccuccuugcaccgagauuaauaaaaaaaaaaaaaaaaaaaaaaaaaaaaaaaaaaaaaaaaaaaaaaaaaaaaaaaaaaaaaaaaaaaaaaaaaaaaaaaaaaaaaaaaaaaaaaaaaaaa

SEQ ID NO: 24535 - RNA, 1662 nt, Artificial Sequence
  mRNA product Design i-3 (A100) comprising derived and/or modified sequence from LASV(LASV237-NIG-2010;Clade II)__AIT17638__GPCmut2 (opt1)
aggagaaagcuuaccaugggccagaucaucaccuucuuccaggaggugccccacgucaucgaggaggugaugaacaucgugcugaucgcccucagccugcuggccauccucaaggggaucuacaacgucgcgaccugcggccuguucgggcugguguccuuccuccugcugugcggccgcagcugcuccacgaccuacaaggggguguacgagcuccagacccuggagcuggacauggccagccucaacaugugcaugccgcuguccugcacgaagaacaacagccaccacuacaucauggucggcaacgagaccggccuggagcucacccugaccaacacguccaucaucaaccacaaguucugcaaccugagcgacgcccacaagaaggaccucuacgaccacgcccugauguccaucaucagcaccuuccaccuguccauccccaacuucaaccaguacgaggccaugagcugcgacuucaacgggggcaagaucuccgugcaguacaaccucagccacaccuacgcgguggacgccgccaaccacugcgggaccaucgccaacggcguccugcagacguucaugcggauggcguggggcggguccuacaucgcccuggacagcggcaagggguccugggacugcaucaugaccagcuaccaguaccucaucauccagaacaccaccugggaggaccacugccaguucucccgccccagccccaucggcuaccuggggcugcucagccagcggacgcgcgacaucuacaucucccggcgccgccggggcaccuucaccuggacccucagcgacuccgagggcaacgagacgcccgggggcuacugccugacccgguggaugcugaucgaggccgagcucaagugcuucgggaacaccgccguggccaagugcaacgagaagcacgacgaggaguucugcgacaugcugcgccuguucgacuucugcaagcaggcgauccggcgccucaagacccccgcccagaugagcauccagcugaucaacaaggccgugaacgcccugaucaacgaccagcucaucaugaagaaccaccuccgggacaucaugggcauccccuacugcaacuacuccaaguacugguaccugaaccacacggucaccgggaagaccagccugccccgcugcuggcugguguccaacggcagcuaccugaacgagacccacuucuccgacgacaucgagcagcaggccgacaacaugaucacggagcuccugcagaaggaguacauggaccggcagggcaagaccccgcuggggcucguggaccuguucgucuucagcaccuccuucuaccugaucagcaucuuccugcaccucaucaagaucccgacccaccgccacaucacgggcaagcccugccccaagccccaccggcugaaccacauggggaucugcuccugcggccuguacaagcacccgggggugcccgugaaguggaagcgcugaggacuaguuauaagacugacuagcccgaugggccucccaacgggcccuccuccccuccuugcaccgagauuaauaaaaaaaaaaaaaaaaaaaaaaaaaaaaaaaaaaaaaaaaaaaaaaaaaaaaaaaaaaaaaaaaaaaaaaaaaaaaaaaaaaaaaaaaaaaaaaaaaaaa

SEQ ID NO: 24536 - RNA, 1662 nt, Artificial Sequence
  mRNA product Design i-3 (A100) comprising derived and/or modified sequence from LASV(LASV253-NIG-2011;Clade II)__AIT17670__GPCmut2 (opt1)
aggagaaagcuuaccaugggccagaucaucaccuucuuccaggaggugccccacgucaucgaggaggugaugaacaucgugcugaucgcccucagccugcuggccauccucaaggggaucuacaacgucgcgaccugcggccuguucgggcugguguccuuccuccugcugugcggccgcagcugcuccacgaccuacaaggggguguacgagcuccagacccuggagcuggacauggccagccucaacaugugcaugccgcuguccugcacgaagaacaacagccaccacuacaucauggucggcaacgagaccggccuggagcucacccugaccaacacguccaucaucaaccacaaguucugcaaccugagcgacgcccacaagaagaaccucuacgaccacgcccugauguccaucaucagcaccuuccaccuguccauccccaacuucaaccaguacgaggccaugagcugcgacuucaacgggggcaagaucuccgugcaguacaaccucagccacaccuacgcgguggacgccgccaaccacugcgggaccaucgccaacggcguccugcagacguucaugcggauggcguggggcggguccuacaucgcccuggacagcggcaagggguccugggacugcaucaugaccagcuaccaguaccucaucauccagaacaccaccugggaggaccacugccaguucucccgccccagccccaucggcuaccuggggcugcucagccagcggacgcgcgacaucuacaucucccggcgccgccggggcaccuucaccuggacccucagcgacuccgagggcaacgagacgcccgggggcuacugccugacccgguggaugcugaucgaggccgagcucaagugcuucgggaacaccgccguggccaagugcaacgagaagcacgacgaggaguucugcgacaugcugcgccuguucgacuucugcaagcaggcgauccggcgccucaaggcccccgcccagaugagcauccagcugaucaacaaggccgugaacgcccugaucaacgaccagcucaucaugaagaaccaccuccgggacaucaugggcaucccguacugcaacuacuccaaguacugguaccugaaccacaccgucacggggcgcaccagccugccccggugcuggcugguguccaacggcagcuaccugaacgagacccacuucuccgacgacaucgagcagcaggcggacaacaugaucaccgagcuccugcagaaggaguacaucgaccgccagggcaagacgccccuggggcucguggaccuguucgucuucagcaccuccuucuaccugaucagcaucuuccugcaccucgugaagaucccgacccaccggcacaucaucggcaagcccugccccaagccccaccgccugaaccacauggggaucugcuccugcggccuguacaagcacccgggggugcccgucaaguggaagcggugaggacuaguuauaagacugacuagcccgaugggccucccaacgggcccuccuccccuccuugcaccgagauuaauaaaaaaaaaaaaaaaaaaaaaaaaaaaaaaaaaaaaaaaaaaaaaaaaaaaaaaaaaaaaaaaaaaaaaaaaaaaaaaaaaaaaaaaaaaaaaaaaaaaa

SEQ ID NO: 24537 - RNA, 1662 nt, Artificial Sequence
  mRNA product Design i-3 (A100) comprising derived and/or modified sequence from LASV(LASV254-NIG-2011;Clade II)__AIT17674__GPCmut2 (opt1)
aggagaaagcuuaccaugggccagaucaucaccuucuuccaggaggugccccacgucaucgaggaggugaugaacaucgugcugaucgcccucagccugcuggccauccucaaggggaucuacaacgucgcgaccugcggccuguucgggcugguguccuuccuccugcugugcggccgcagcugcuccacgaccuacaaggggguguacgagcuccagacccuggagcuggacaugaccaaccucaacaugugcaugccgcugagcugcaccaagaacaacucccaccacuacaucauggucggcaacgagaccggccuggagcucacccugacgaacaccagcaucaucaaccacaaguucugcaaccuguccgacgcccacaagaagaaccucuacaaccacgcccugaugagcaucaucuccaccuuccaccugagcauccccaacuucaaccaguacgaggccauguccugcgacuucaacgggggcaagaucagcgugcaguacaaccucucccacagcuacgccguggacgcggccaaccacugcgggaccaucgccaacggcguccugcagacguucaugcggauggccuggggcggguccuacaucgcgcuggacagcggcaaggggaacugggacugcaucaugaccuccuaccaguaccucaucauccagaacaccaccugggaggaccacugccaguucagccgccccucccccaucggcuaccuggggcugcucagccagcggacgcgcgacaucuacaucagccggcgccgccggggcaccuucaccuggacccucuccgacagcgagggcaacgagacgcccgggggcuacugccugacccgguggaugcugaucgaggccgagcucaagugcuucgggaacaccgccguggccaagugcaacgagaagcacgacgaggaguucugcgacaugcugcgccuguucgacuucugcaagcaggccauccggcgccucaagacccccgcgcaggccaacauccagcugaucaacaaggccgugaacgcccugaucaacgaccagcucaucaugaagaaccaccuccgggacaucaugggcauccccuacugcaacuacuccaaguacugguaccugaaccacacggucaccgggaagaccagccugccccgcugcuggcugguguccaacggcagcuaccugaacgagacccacuucuccgacgacaucgagcagcaggccgacaacaugaucacggagcuccugcagaaggaguacauggaccggcagggcaagaccccgcuggggcucguggaccuguucgucuucagcaccuccuucuaccugaucagcaucuuccugcaccucgugaagaucccgacccaccgccacgugaucggcaagcccugccccaagccccaccggcugaaccacauggggaucugcuccugcggccuguacaagcacccggggguccccgugaaguggaagcgcugaggacuaguuauaagacugacuagcccgaugggccucccaacgggcccuccuccccuccuugcaccgagauuaauaaaaaaaaaaaaaaaaaaaaaaaaaaaaaaaaaaaaaaaaaaaaaaaaaaaaaaaaaaaaaaaaaaaaaaaaaaaaaaaaaaaaaaaaaaaaaaaaaaaa

SEQ ID NO: 24538 - RNA, 1662 nt, Artificial Sequence
  mRNA product Design i-3 (A100) comprising derived and/or modified sequence from LASV(Nig08-A19;Clade III)__ADU56618__GPCmut2 (opt1)
aggagaaagcuuaccaugggccagaucgugaccuucuuccaggaggucccccacgugaucgaggaggugaugaacaucguccugaucgcccucagcauccuggccauccugaaggggcucuacaacaucgcgaccugcggccugaucgggcuggugacguuccuccugcuguccggccgcagcugcuccaugaccuacaaggggguguacgagcuccagacccuggagcugaacaugaacacccucaacaugugcaugccgcugagcugcaccaagaacaacucccaccacuacaucauggucggcaacgagaccggccuggagcucacccugacgaacaccagccugcuccaccacaaguucugcaaccuguccgacgcccacaagaagaaccuguacgaccacacccucaugagcaucaucuccaccuuccaccugagcauccccaacuucaaccaguacgaggccauguccugcgacuucaacgggggcaagaucacggugcaguacaaccugagccacuccuacgccaucgacgccgcgaaccacugcgggaccguggccaacggcguccuccagaccuucaugcggauggccuggggcgggagcuacaucgcccuggacuccggccgcgggaagugggacugcaucaugaccagcuaccaguaccugaucauccagaacacgaccugggaggaccacugccaguucucccggcccagccccaucggcuaccucgggcugcugucccagcgcacccgggacaucuacaucagccgccggcgccggggcaccuucacguggacccugagcgacuccgagggcaacgagacccccgggggcuacugccucacccgcuggaugcugaucgaggcggagcugaagugcuucgggaacacggccguggccaagugcaacgagaagcacgacgaggaguucugcgacaugcuccggcuguucgacuucugcaagcaggccauccgccggcugaaggcccccgcgcagaugagcauccagcucaucaacaaggccgugaacgcccugaucaacgaccagcugaucaugaagaaccaccuccgcgacaucaugggcauccccuacugcaacuacuccaaguacugguaccugaaccacaccagcaccgggcggaccucccugccccgcugcuggcucgucagcaacggcuccuaccugaacgagacgcacuucagcgacgacaucgagcagcaggccgacaacaugaucaccgagaugcugcagaaggaguaccucgaccggcagggcaagaccccgcuggggcugguggaccuguucguguucuccaccagcuucuaccucaucuccaucuuccugcaccuggucaagaucccgacgcaccgccacaucgugggcaagcccugccccaagccccaccggcucaaccacauggggaucugcagcugcggccuguacaagcagccgggggugcccguccgcuggaagcggugaggacuaguuauaagacugacuagcccgaugggccucccaacgggcccuccuccccuccuugcaccgagauuaauaaaaaaaaaaaaaaaaaaaaaaaaaaaaaaaaaaaaaaaaaaaaaaaaaaaaaaaaaaaaaaaaaaaaaaaaaaaaaaaaaaaaaaaaaaaaaaaaaaaa

SEQ ID NO: 24539 - RNA, 1665 nt, Artificial Sequence
  mRNA product Design i-3 (A100) comprising derived and/or modified sequence from LASV(G1180-SLE-2010;Clade IV)__AIT17168__GPCmut2 (opt1)
aggagaaagcuuaccaugggccagaucgugaccuucuuccaggaggucccccacgugaucgaggaggugaugaacaucguccugaucgcccucagcauccuggccgugcugaaggggcucuacaacuucgcgaccugcggccugguggggcugcucaccuuccugcugcucugcggccgcuccugcaccgccagccgguacaagggggucuacgagcugcagacccuggagcucaacauggagacccugaacaugugcaugccgcuguccugcaccaagaacaacagccaccacuacaucauggugggcaacgagaccggccucgagcugacccugacgaacaccuccaucaucaaccacaaguucugcaaccucagcgacgcccacaagaagaaccuguacgaccacgcccugauguccaucaucagcaccuuccaccucuccauccccaacuucaaccaguacgaggccaugagcugcgacuucaacgggggcaagaucuccgugcaguacaaccugagccacuccuacgcgggggacgccgccaaccacugcggcaccgucgccaacggggugcugcagacguucaugcgcauggcguggggcggcagcuacaucgcccucgacuccgggcacggcagcugggacugcaucaugaccuccuaccaguaccugaucauccagaacaccaccugggaggaccacugccaguucagccggcccucccccaucggguaccugggccuccugagccagcgcacgcgggacaucuacaucagccgccggcgccggggcaccuucaccuggacccuguccgacagcgaggggaaggacacgccgggcggguacugccugacccgcuggaugcucaucgaggccgagcugaagugcuucggcaacaccgccguggccaagugcaacgagaagcacgacgaggaguucugcgacaugcugcggcuguucgacuucugcaagcaggcgauccagcgccugaaggcccccgcccagauguccauccagcugaucaacaaggccgucaacgcccucaucaacgaccagcugaucaugaagaaccaccuccgggacaucauggggauccccuacugcaacuacagcaaguacugguaccucaaccacaccacgaccggcaagaccucccugcccaagugcuggcuggugagcaacggcuccuaccucaacgagacccacuucagcgacgacaucgagcagcaggcggacaacaugaucacggagaugcugcagaaggaguacauggagcgccaggggaagacgccccugggccucguggaccuguucgucuucuccaccagcuucuaccugaucuccaucuuccugcaccucgugaagaucccgacccaccggcacaucgugggcaagagcugccccaagccccaccgccugaaccacauggggaucugcuccugcgggcuguacaagcagcccggcgucccggugaaguggaagcggugaggacuaguuauaagacugacuagcccgaugggccucccaacgggcccuccuccccuccuugcaccgagauuaauaaaaaaaaaaaaaaaaaaaaaaaaaaaaaaaaaaaaaaaaaaaaaaaaaaaaaaaaaaaaaaaaaaaaaaaaaaaaaaaaaaaaaaaaaaaaaaaaaaaa

SEQ ID NO: 24540 - RNA, 1665 nt, Artificial Sequence
  mRNA product Design i-3 (A100) comprising derived and/or modified sequence from LASV(G1442-SLE-2011;Clade IV)__AIT17180__GPCmut2 (opt1)
aggagaaagcuuaccaugggccagaucgugaccuucuuccaggaggucccccacgugaucgaggaggugaugaacaucguccugaucgcccucagcauccuggccgugcugaaggggcucuacaacguggcgaccugcggccugaucgggcuggucacguuccuccugcugugcggccgcuccugcaccaccacccucuacaaggggguguacgagcugcagacgcuggagcucaacauggagacccugaacaugugcaugccgcugagcugcaccaagaacaacucccaccacuacauccgggugggcaacgagacgggccucgagcugacccugaccaacaccagcaucaucaaccacaaguucugcaaccucuccgacgcccacaagaagaaccuguacgaccacgcccugaugagcaucaucuccacguuccaccucagcauccccaacuucaaccaguacgaggccauguccugcgacuucaacgggggcaagaucagcguccaguacaaccugucccacagcuacgccggggacgcggccaaccacugcggcaccguggccaacggggugcugcagaccuucaugcgcauggccuggggcggcuccuacaucgcgcucgacagcgggcggggcaacugggacugcaucaugaccuccuaccaguaccugaucauccagaacacgaccugggacgaccacugccaguucagccgccccucccccaucggguaccugggccuccugagccagcggacccgcgacgucuacaucucccggcgccgccggggcaccuucacguggacccugagcgacagcgaggggaaggacaccccgggcggguacugccugacccgguggaugcucaucgaggccgagcugaagugcuucggcaacacggccguggccaagugcaacgagaagcacgacgaggaguucugcgacaugcugcgccucuucgacuucugcaagcaggccauccagcggcugaaggcgcccgcccagauguccauccagcugaucaacaaggccgugaacgcccucaucaacgaccagcugaucaugaagaaccaccuccgcgacaucauggggauccccuacugcaacuacagcaaguacugguaccugaacaacaccgccaccggcaagaccucccugcccaagugcuggcugaucagcaacggcuccuaccucaacgagacgcacuucagcgacgacaucgagcaggaggcggacaacaugaucaccgagaugcugcagaaggaguacauggagcggcaggggaagacgccccugggccucgucgaccuguucguguucuccaccagcuucuaccugaucuccaucuuccugcaccucgugaagaucccgacccaccgccacaucgucggcaagagcugccccaagccccaccggcugaaccacauggggaucugcuccugcgggcuguacaagcagcccggcgugccggugcgcuggaagcggugaggacuaguuauaagacugacuagcccgaugggccucccaacgggcccuccuccccuccuugcaccgagauuaauaaaaaaaaaaaaaaaaaaaaaaaaaaaaaaaaaaaaaaaaaaaaaaaaaaaaaaaaaaaaaaaaaaaaaaaaaaaaaaaaaaaaaaaaaaaaaaaaaaaa

SEQ ID NO: 24541 - RNA, 1665 nt, Artificial Sequence
  mRNA product Design i-3 (A100) comprising derived and/or modified sequence from LASV(G3010-SLE-2013;Clade IV)__AIT17344__GPCmut2 (opt1)
aggagaaagcuuaccaugggccagaucgugaccuucuuccaggaggucccccacgugaucgaggaggugaugaacaucguccugaucgcccucagcauccuggccgugcugaaggggcucuacaacuucgcgaccugcggccugguggggcuggucacguuccuccugcugugcggccgcuccugcaccaccagccucuacaaggggguguacgagcugcagacccuggagcucaacauggagacgcugaacaugugcaugccgcuguccugcaccaagaacaacagccaccacuacaucauggugggcaacgagaccggccucgagcugacgcugaccaacaccuccaucaucaaccacaaguucugcaaccucagcgacgcccacaagaagaaccuguacaaccacgcccugauguccaucaucagcaccuuccaccucuccauccccaacuucaaccaguacgaggccaugagcugcgacuucaacgggggcaagaucuccguccaguacaaccugagccacuccuacgccggggacgcggccagccacugcggcacgguggccaacggggugcugcagaccuucaugcggauggccuggggcggcuccuacaucgcgcucgacagcggguacggcaagugggacugcaucaugaccuccuaccaguaccugaucauccagaacaccacgugggaggaccacugccaguucagccgccccucccccaucggguaccugggccuccugagccagcggacccgcgacaucuacaucagccggcgccgccggggcaccuucaccuggacgcuguccgacagcgaggggaaggacaccccgggcggguacugccugacccgguggaugcucaucgaggccgagcugaagugcuucggcaacaccgccgucgccaagugcaacgagaagcacgacgaggaguucugcgacaugcugcgccucuucgacuucugcaagcaggccauccagcggcugaagacgcccgcgcagauguccauccagcugaucaacaaggccgugaacgcccucaucaacgaccagcugaucaugaagaaccaccuccgcgacaucauggggauccccuacugcaacuacagcaaguacugguaccugaaccacaccaccaccggcaagacgucccugcccaagugcuggcuggugagcaacggcuccuaccucaacgagacccacuucagcgacgacaucgagcagcaggccgacaacaugaucaccgagaugcugcagaaggaguacauggagcggcaggggaagacgccccugggccucgucgaccuguucguguucuccaccagcuucuaccugaucuccaucuuccugcaccucgugaagaucccgacccaccgccacaucgucggcaagagcugccccaagccccaccggcugaaccacauggggaucugcuccugcgggcuguacaagcagcccggcgugccggugcgcuggaagcggugaggacuaguuauaagacugacuagcccgaugggccucccaacgggcccuccuccccuccuugcaccgagauuaauaaaaaaaaaaaaaaaaaaaaaaaaaaaaaaaaaaaaaaaaaaaaaaaaaaaaaaaaaaaaaaaaaaaaaaaaaaaaaaaaaaaaaaaaaaaaaaaaaaaa

SEQ ID NO: 24542 - RNA, 1665 nt, Artificial Sequence
  mRNA product Design i-3 (A100) comprising derived and/or modified sequence from LASV(G502-SLE-2009;Clade IV)__AIT17126__GPCmut2 (opt1)
aggagaaagcuuaccaugggccagaucgugaccuucuuccaggaggucccccacgugaucgaggaggugaugaacaucguccugaucgcccucagcauccuggccgugcugaaggggcucuacaacuucgcgaccugcggccugguggggcugcucacguuccugcugcucugcggccgcuccugcaccaccgggcuguacaagggcgucuacgagcugcagacccucgagcugaacauggagacgcugaacaugugcaugccgcucagcugcaccaagaacaacucccaccacuacaucauggugggcaacgagaccgggcuggagcugacgcucaccaacaccagcaucaucaaccacaaguucugcaaccuguccgacgcccacaagaagaaccuguacgaccacgcccucaugagcaucaucuccaccuuccaccugagcauccccaacuucaaccaguacgaggccauguccugcgacuucaacggcgggaagaucagcgugcaguacaaccugucccacagcuacgccggcgacgcggccgaccacugcgggacggucgccaacggcgugcuccagaccuucaugcggauggccuggggcggguccuacaucgcgcuggacagcggccgcgggcggugggacugcaucaugaccuccuaccaguaccugaucauccagaacaccacgugggaggaccacugccaguucagccgccccucccccaucggcuaccucggccugcugagccagcggacccgcgacaucuacaucucccggcgccgccgggggaccuucaccuggacgcugagcgacagcgagggcaaggacacccccgggggcuacugccucacccgguggaugcugaucgaggccgagcugaagugcuucgggaacaccgccguggccaagugcaacgagaagcacgacgaggaguucugcgacaugcuccgccuguucgacuucugcaagcaggccauccagcggcugaaggcgcccgcccagauguccauccagcucaucaacaaggccgucaacgcccugaucaacgaccagcuggugaugaagaaccaccuccgcgacaucaugggcauccccuacugcaacuacagccgguacugguaccugaaccacacgaccaccggccgcaccucccugcccaagugcuggcucgugagcaacggguccuaccugaacgagacgcacuucagcgacgacaucgagcagcaggccgacaacaugaucaccgagaugcugcagaaggaguacauggagcggcagggcaagaccccgcucgggcuggucgaccuguucguguucuccaccagcuucuaccugaucuccaucuuccuccaccuggugaagaucccgacgcaccgccacaucgucggcaagagcugccccaagccccaccggcugaaccacauggggaucugcuccugcggccucuacaagcagcccggcgugccggugaaguggaagcgcugaggacuaguuauaagacugacuagcccgaugggccucccaacgggcccuccuccccuccuugcaccgagauuaauaaaaaaaaaaaaaaaaaaaaaaaaaaaaaaaaaaaaaaaaaaaaaaaaaaaaaaaaaaaaaaaaaaaaaaaaaaaaaaaaaaaaaaaaaaaaaaaaaaaa

SEQ ID NO: 24543 - RNA, 1665 nt, Artificial Sequence
  mRNA product Design i-3 (A100) comprising derived and/or modified sequence from LASV(G733-SLE-2010;Clade IV)__AIT17154__GPCmut2 (opt1)
aggagaaagcuuaccaugggccagaucgugaccuucuuccaggaggucccccacgugaucgaggaggugaugaacaucguccugaucgcccucagcauccuggccgugcugaaggggcucuacaacuucgcgaccugcggcaucguggggcuggucuccuuccugcuccugugcggccgcagcugcacgaccucccuguacaaggggguguacgagcuccagacccuggagcugaacauggagacccucaacaugugcaugccgcugagcugcaccaagaacaacucccaccacuacaucauggugggcaacgagaccggccuggagcucacccugacgaacaccagcaucaucaaccacaaguucugcaaccuguccgacgcccacaagaagaaccucuacgaccacgcccugaugagcaucaucuccaccuuccaccugagcauccccaacuucaaccaguacgaggccauguccugcgacuucaacgggggcaagaucagcguccaguacaaccucucccacagcuacgccggggacgcggccaaccacugcggcaccaucgccaacggggugcugcagacguucaugcggauggccuggggcggcuccuacaucgcgcuggacagcgggcgcgaccggugggacugcaucaugaccuccuaccaguaccucaucauccagaacaccaccugggaggaccacugccaguucagccgccccucccccaucggcuaccuggggcugcucagccagcggacgcgcgacaucuacaucagccggcgccgccggggcaccuucaccuggacccucuccgacagcgagggcaaggacacgcccgggggcuacugccugacccgguggaugcugaucgaggccgagcucaagugcuucgggaacaccgccguggccaagugcaacgagaagcacgacgaggaguucugcgacaugcugcgccuguucgacuucugcaagcaggccauccagcggcucaaggcgcccgcccagauguccauccagcugaucaacaaggccgucaacgcccugaucaacgaccagcucaucaugaagaaccaccuccgcgacaucaugggcauccccuacugcaacuacagcaaguacugguaccugaaccacaccacgaccgggaagaccucccugcccaagugcuggcuggugagcaacggcuccuaccugaacgagacccacuucagcgacgacaucgagcagcaggccgacaacaugaucacggagaugcuccagaaggaguacauggagcggcagggcaagaccccgcuggggcugguggaccucuucgucuucuccaccagcuucuaccugaucuccaucuuccugcaccuggugaagaucccgacccaccgccacguggucggcaagagcugccccaagccccaccggcucaaccacauggggaucugcuccugcggccuguacgggcagcccggcgugccggugaaguggaagcgcugaggacuaguuauaagacugacuagcccgaugggccucccaacgggcccuccuccccuccuugcaccgagauuaauaaaaaaaaaaaaaaaaaaaaaaaaaaaaaaaaaaaaaaaaaaaaaaaaaaaaaaaaaaaaaaaaaaaaaaaaaaaaaaaaaaaaaaaaaaaaaaaaaaaa

SEQ ID NO: 24544 - RNA, 1665 nt, Artificial Sequence
  mRNA product Design i-3 (A100) comprising derived and/or modified sequence from MOPV/LASV reassortant(IGS-1;Clade IV)__AFY05576__GPCmut2 (opt1)
aggagaaagcuuaccaugggccagaucgugaccuucuuccaggaggucccccacgugaucgaggaggugaugaacaucguccugaucgcccucagcgugcuggccgugcugaaggggcucuacaacuucgcgaccugcggccuggucgggcuggugacguuccuccugcugugcggccgcuccugcaccaccagccucuacaaggggguguacgagcugcagacccuggagcucaacauggagacgcugaacaugugcaugccgcuguccugcaccaagaacaacagccaccacuacaucauggucggcaacgagaccggccucgagcugacgcugaccaacaccuccaucaucaaccacaaguucugcaaccucagcgacgcccacaagaagaaccuguacgaccacgcccugauguccaucaucagcaccuuccaccucuccauccccaacuucaaccaguacgaggccaugagcugcgacuucaacgggggcaagaucuccgugcaguacaaccugagccacuccuacgccggggacgcggccaaccacugcggcacgguggccaacgggguccugcagaccuucaugcggauggccuggggcggcagcuacaucgcgcucgacuccgggcgcggcaacugggacugcaucaugaccagcuaccaguaccugaucauccagaacaccacgugggaggaccacugccaguucucccggcccagccccaucggguaccugggccuccugucccagcgcacccgggacaucuacaucagccgccggcgccggggcaccuucaccuggacgcugagcgacuccgagggggaggacaccccgggcggguacugccugacccgcuggaugcucaucgaggccgagcugaagugcuucggcaacaccgccguggccaagugcaacgagaagcacgacgaggaguucugcgacaugcugcggcuguucgacuucugcaagcaggccauccagcgccugaaggcgcccgcccagaugagcauccagcugaucaacaaggccgugaacgcccucaucaacgaccagcugaucaugaagaaccaccuccgggacaucauggggauccccuacugcaacuacuccaaguacugguaccucaaccacacgaccaccggccgcaccagccugcccaagugcuggcuggucuccaacggcagcuaccucaacgagacgcacuucuccgacgacaucgagcagcaggccgacaacaugaucaccgagaugcugcagaaggaguacauggagcggcaggggaagacgccccugggccucguggaccuguucguguucagcaccuccuucuaccugaucagcaucuuccugcaccucgucaagaucccgacccaccgccacaucguggggaaguccugccccaagccccaccggcugaaccacaugggcaucugcagcugcgggcuguacaagcagcccggcgugccggucaaguggaagcgcugaggacuaguuauaagacugacuagcccgaugggccucccaacgggcccuccuccccuccuugcaccgagauuaauaaaaaaaaaaaaaaaaaaaaaaaaaaaaaaaaaaaaaaaaaaaaaaaaaaaaaaaaaaaaaaaaaaaaaaaaaaaaaaaaaaaaaaaaaaaaaaaaaaaa

SEQ ID NO: 24545 - RNA, 1665 nt, Artificial Sequence
  mRNA product Design i-3 (A100) comprising derived and/or modified sequence from LASV(LM765-SLE-2012;Clade IV)__AIT17814__GPCmut2 (opt1)
aggagaaagcuuaccaugggccagaucgugaccuucuuccaggaggucccccacgugaucgaggaggugaugaacaucguccugaucgcccucagcauccuggccgugcugaaggggcucuacaacuucgcgaccugcggccugguggggcuggucacguuccuccugcugugcggccgcuccugcaccaccagccucuacaaggggguguacgagcugcagacccuggagcucaacauggagacgcugaacaugugcaugccgcuguccugcaccaagaacaacagccaccacuacaucauggugggcaacgagaccggccucgagcugacgcugaccaacaccuccaucaucgaccacaaguucugcaaccucagcgacgcccaccggaagaaccuguacgaccacgcccugauguccaucaucagcaccuuccaccucuccauccccaacuucaaccaguacgaggccaugagcugcgacuucaacgggggcaagaucuccguccaguacaaccugagccacuccuacgccaaggacgcggccgaccacugcgggacgguggccaacggcgugcugcagaccuucaugcgcauggccuggggcgggagcuacaucgcgcucgacuccggccgggggcgcugggacugcaucaugaccagcuaccaguaccugaucauccagaacaccacgugggaggaccacugccaguucucccggcccagccccaucggcuaccuggggcuccugucccagcgcacccgggacaucuacaucagccgccggcgccggggcaccuucaccuggacgcugagcgacuccgagggcaaggacacccccgggggcuacugccugacccgcuggaugcucaucgaggccgagcugaagugcuucgggaacaccgccgucgccaagugcaacgagaagcacgacgaggaguucugcgacaugcugcggcuguucgacuucugcaagcaggccauccagcgccugaaggcgcccgcccagaugagcauccagcugaucaacaaggccgugaacgcccucaucaacgaccagcugaucaugaagaaccaccuccgggacaucaugggcauccccuacugcaacuacuccaaguacugguaccucaaccacacgaccaccgggaagaccagccugcccaagugcuggcugguguccaacggcagcuaccucaacgagacgcacuucuccgacgacaucgagcagcaggccgacaacaugaucaccgagaugcugcagaaggaguacauggagcgccagggcaagaccccgcuggggcucgucgaccuguucguguucagcaccuccuucuaccugaucagcaucuuccugcaccucgugaagaucccgacgcaccggcacaucgucggcaagcccugccccaagccccaccgccugaaccacauggggaucugcuccugcggccuguacaagcagccgggggugcccgugaaguggaagcggugaggacuaguuauaagacugacuagcccgaugggccucccaacgggcccuccuccccuccuugcaccgagauuaauaaaaaaaaaaaaaaaaaaaaaaaaaaaaaaaaaaaaaaaaaaaaaaaaaaaaaaaaaaaaaaaaaaaaaaaaaaaaaaaaaaaaaaaaaaaaaaaaaaaa

SEQ ID NO: 24546 - RNA, 1665 nt, Artificial Sequence
  mRNA product Design i-3 (A100) comprising derived and/or modified sequence from LASV(LM776-SLE-2012;Clade IV)__AIT17824__GPCmut2 (opt1)
aggagaaagcuuaccaugggccagaucgugaccuucuuccaggaggucccccacgugaucgaggaggugaugaacaucguccugaucgcccucagcauccuggccgugcugaaggggcucuacaacuucgcgaccugcggccugguggggcuggucacguuccuccugcugugcggccgcuccugcaccaccagcguguacaaggggguguacgagcuccagacccuggagcugaacauggagacgcucaacaugugcaugccgcuguccugcaccaagaacaacagccaccacuacaucauggucggcaacgagaccggccuggagcucacgcugaccaacaccuccaucaucaaccacaaguucugcaaccugagcgacgcccacaagaagaaccucuacgaccacgcccugauguccaucaucagcaccuuccaccuguccauccccaacuucaaccaguacgaggccaugagcugcgacuucaacgggggcaagaucuccgugcaguacaaccucagccacuccuacgccggggacgcggccaaccacugcggcacgguggccaacgggguccugcagaccuucaugcggauggccuggggcggcagcuacaucgcgcuggacuccgggcacggcaagugggacugcaucaugaccagcuaccaguaccucaucauccagaacaccacgugggaggaccacugccaguucucccgccccagccccaucggguaccugggccugcucucccagcggacccgcgacaucuacaucagccggcgccgccggggcaccuucaccuggacgcucagcgacuccgaggggaaggacaccccgggcggguacugccugacccgguggaugcugaucgaggccgagcucaagugcuucggcaacaccgccguggccaagugcaacgagaagcacgacgaggaguucugcgacaugcugcgccuguucgacuucugcaagcaggccauccagcggcucaaggcgcccgcccagaugagcauccagcugaucaacaaggccgugaacgcccugaucaacgaccagcucaucaugaagaaccaccuccgcgacaucauggggauccccuacugcaacuacuccaaguacugguaccugaaccacacgaccaccggcaagaccagccugcccaagugcuggcuggucuccaacggcagcuaccugaacgagacgcacuucuccgacgacaucgagcagcaggccgacaacaugaucaccgagaugcuccagaaggaguacauggagcggcaggggaagacgccccugggccugguggaccucuucguguucagcaccuccuucuaccugaucagcaucuuccugcaccuggucaagaucccgacccaccgccacaucguggggaaguccugccccaagccccaccggcucaaccacaugggcaucugcagcugcgggcuguacaagcagcccggcgugccgguccgcuggaagcggugaggacuaguuauaagacugacuagcccgaugggccucccaacgggcccuccuccccuccuugcaccgagauuaauaaaaaaaaaaaaaaaaaaaaaaaaaaaaaaaaaaaaaaaaaaaaaaaaaaaaaaaaaaaaaaaaaaaaaaaaaaaaaaaaaaaaaaaaaaaaaaaaaaaa

SEQ ID NO: 24547 - RNA, 1665 nt, Artificial Sequence
  mRNA product Design i-3 (A100) comprising derived and/or modified sequence from LASV(Mad39;Clade IV)__ANH09722__GPCmut2 (opt1)
aggagaaagcuuaccaugggccagaucgugaccuucuuccaggaggucccccacgugaucgaggaggugaugaacaucguccugaucgcccucagcauccuggccgugcugaaggggcucuacaacguggcgaccugcggccugaucgggcuggucacguuccuccugcugugcggccgcuccugcaccaccacccucuacaaggggguguacgagcugcaggcccuggagcucaacauggagacgcugaacaugugcaugccgcugagcugcaccaagaacaacucccaccacuacauccgggugggcaacgagaccggccucgagcugacgcugaccaacaccagccucaucaaccacaaguucugcaaccuguccgacgcccacaagaagaaccuguacgaccacgcccucaugagcaucaucuccaccuuccaccugagcauccccaacuucaaccaguacgaggccauguccugcgacuucaacgacgggaagaucagcguccaguacaaccugucccacacguacgcgggcgacaccgccaaccacugcgggaccguggccaacggcgugcuccagaccuucaugcgcauggccuggggcgggagcuacaucgcgcuggacuccggccgcgggggcugggacugcaucaugacgagcuaccaguaccugaucauccagaacaccaccugggaggaccacugccaguucucccggcccagccccaucggguaccucggccugcugucccagcggacccgcgacaucuacaucagccggcgccgccggggcacguucaccuggacccuguccgacagcgaggggaaggacaccccgggcggguacugccucacgcgguggaugcugaucgaggccgagcugaagugcuucggcaacaccgccgucgccaagugcaacgagaagcacgacgaggaguucugcgacaugcuccgccuguucgacuucugcaagcaggccauccagcggcugaaggcgcccgcccagaugagcauccagcucaucaacaaggccgugaacgcccugaucaacgaccagcugaucaugaagaaccaccuccgcgacaucauggggauccccuacugcaacuacuccaaguacugguaccugaaccacaccgugaccggcaagacgagccugcccaagugcuggcucgucuccaacggcagcuaccugaacgagacccacuucuccgacgacaucgagcagcaggccgacaacaugaucaccgagaugcugcagaaggaguacauggagcggcaggggaagacgccccucggccugguggaccuguucguguucagcaccuccuucuaccugaucagcaucuuccuccaccuggucaagaucccgacccaccgccacgugguggggaagcccugccccaagccccaccggcugaaccacaugggcaucugcuccugcggguucuacaagcagccgggcguccccgugcgcuggaagcggugaggacuaguuauaagacugacuagcccgaugggccucccaacgggcccuccuccccuccuugcaccgagauuaauaaaaaaaaaaaaaaaaaaaaaaaaaaaaaaaaaaaaaaaaaaaaaaaaaaaaaaaaaaaaaaaaaaaaaaaaaaaaaaaaaaaaaaaaaaaaaaaaaaaa

SEQ ID NO: 24548 - RNA, 1665 nt, Artificial Sequence
  mRNA product Design i-3 (A100) comprising derived and/or modified sequence from LASV(Z0947-SLE-2011;Clade IV)__AIT17840__GPCmut2 (opt1)
aggagaaagcuuaccaugggccagaucgugaccuucuuccaggaggucccccacgugaucgaggaggugaugaacaucguccugaucgcccucagcauccuggccgugcugaaggggcucuacaacuucgcgaccugcggccugguggggcuggucacguuccuccugcugugcggccgcuccugcaccaucagccucuacaaggggguguacgagcugcagacccuggagcucaacauggagacccugaacaugugcaugccgcuguccugcaccaagaacaacagccaccacuacaucauggugggcaacgagaccggccucgagcugacccugacgaacaccuccaucaucaaccacaaguucugcaaccucagcgacgcccacaagaagaaccuguacgaccacgcccugauguccaucaucagcaccuuccaccucuccauccccaacuucaaccaguacgaggccaugagcugcgacuucaacgggggcaagaucuccguccaguacaaccugagccacuccuacgccggggacgcggccaaccacugcggcaccguggccaacggggugcugcagacguucaugcggauggccuggggcggcagcuacaucgcgcucgacuccgggcgcgaccggugggacugcaucaugaccagcuaccaguaccugaucauccagaacaccaccugggaggaccacugccaguucucccgccccagccccaucggcuaccuggggcuccugucccagcggacgcgcgacaucuacaucagccggcgccgccggggcaccuucaccuggacccugagcgacuccgagggcaaggacacgcccgggggcuacugccugacccgguggaugcucaucgaggccgagcugaagugcuucgggaacaccgccgucgccaagugcaacgagaagcacgacgaggaguucugcgacaugcugcgccucuucgacuucugcaagcaggccauccagcggcugaaggcgcccgcccagaugagcauccagcugaucaacaaggccgugaacgcccucaucaacgaccagcugaucaugaagaaccaccuccgcgacaucaugggcauccccuacugcaacuacuccaaguacugguaccugaaccacaccacgaccgggaagaccagccugcccaagugcuggcugguguccaacggcagcuaccucaacgagacccacuucuccgacgacaucgagcagcaggccgacaacaugaucacggagaugcugcagaaggaguacauggagcggcagggcaagaccccgcuggggcucgucgaccuguucguguucagcaccuccuucuaccugaucagcaucuuccugcaccucgugaagaucccgacccaccgccacaucgucggcaagcccugccccaagccccaccggcugaaccacauggggaucugcuccugcggccuguacaagcagccgggggugcccgugaaguggaagcgcugaggacuaguuauaagacugacuagcccgaugggccucccaacgggcccuccuccccuccuugcaccgagauuaauaaaaaaaaaaaaaaaaaaaaaaaaaaaaaaaaaaaaaaaaaaaaaaaaaaaaaaaaaaaaaaaaaaaaaaaaaaaaaaaaaaaaaaaaaaaaaaaaaaaa

SEQ ID NO: 24549 - RNA, 1665 nt, Artificial Sequence
  mRNA product Design i-3 (A100) comprising derived and/or modified sequence from LASV(Josiah;Clade IV)__NP_694870__GPCmut2 (opt1)
aggagaaagcuuaccaugggccagaucgugaccuucuuccaggaggucccccacgugaucgaggaggugaugaacaucguccugaucgcccucagcgugcuggccgugcugaaggggcucuacaacuucgcgaccugcggccuggucgggcuggugacguuccuccugcugugcggccgcuccugcaccaccagccucuacaaggggguguacgagcugcagacccuggagcucaacauggagacgcugaacaugugcaugccgcuguccugcaccaagaacaacagccaccacuacaucauggucggcaacgagaccggccucgagcugacccugacgaacaccuccaucaucaaccacaaguucugcaaccucagcgacgcccacaagaagaaccuguacgaccacgcccugauguccaucaucagcaccuuccaccucuccauccccaacuucaaccaguacgaggccaugagcugcgacuucaacgggggcaagaucuccgugcaguacaaccugagccacuccuacgccggggacgcggccaaccacugcggcaccguggccaacgggguccugcagacguucaugcggauggccuggggcggcagcuacaucgcgcucgacuccgggcgcggcaacugggacugcaucaugaccagcuaccaguaccugaucauccagaacaccaccugggaggaccacugccaguucucccggcccagccccaucggguaccugggccuccugucccagcgcacgcgggacaucuacaucagccgccggcgccggggcaccuucaccuggacccugagcgacuccgaggggaaggacacgccgggcggguacugccucacccgcuggaugcugaucgaggccgagcugaagugcuucggcaacaccgccguggccaagugcaacgagaagcacgacgaggaguucugcgacaugcuccggcuguucgacuucugcaagcaggccauccagcgccugaaggcgcccgcccagaugagcauccagcucaucaacaaggccgugaacgcccugaucaacgaccagcugaucaugaagaaccaccuccgggacaucauggggauccccuacugcaacuacuccaaguacugguaccugaaccacaccacgaccggccgcaccagccugcccaagugcuggcucgucuccaacggcagcuaccugaacgagacccacuucuccgacgacaucgagcagcaggccgacaacaugaucacggagaugcugcagaaggaguacauggagcggcaggggaagaccccgcucggccugguggaccuguucguguucagcaccuccuucuaccugaucagcaucuuccuccaccuggucaagauccccacccaccgccacaucguggggaaguccugccccaagccccaccggcugaaccacaugggcaucugcagcugcgggcucuacaagcagccgggcgugcccgucaaguggaagcgcugaggacuaguuauaagacugacuagcccgaugggccucccaacgggcccuccuccccuccuugcaccgagauuaauaaaaaaaaaaaaaaaaaaaaaaaaaaaaaaaaaaaaaaaaaaaaaaaaaaaaaaaaaaaaaaaaaaaaaaaaaaaaaaaaaaaaaaaaaaaaaaaaaaaa

SEQ ID NO: 24550 - RNA, 1662 nt, Artificial Sequence
  mRNA product Design i-3 (A100) comprising derived and/or modified sequence from LASV(LP;Clade I)__AAF86701__GPCmut2 (opt1)
aggagaaagcuuaccaugggccagaucaucaccuucuuccaggaggugccccacgucaucgaggaggugaugaacaucgugcugaucgcccucagccugcuggccauccucaaggggcuguacaacaucgcgaccugcggcaucaucgggcuggucgccuuccucuuccugugcggcaaguccugcagccugacgcucaagggcggguacgagcugcagacccuggagcucaacauggagacccugaacaugugcaugccgcuguccugcaccaagaacagcucccaccacuacauccgcgugggcaacgagacggggcucgagcugacccugaccaacaccagcaucaucaaccacaaguucugcaaccucuccgacgcccacaagaagaaccuguacgaccacgcccugaugagcaucaucuccacguuccaccucagcauccccaacuucaaccaguacgaggccauguccugcgacuucaacggcgggaagaucagcgugcaguacaaccugucccacagcuacgcgggcgacgccgccgagcacugcgggaccgucgccaacggcgugcugcagaccuucaugcggauggcguggggcgggcgcuacaucgcccucgacuccggcaaggggaacugggacugcaucaugaccagcuaccaguaccugaucauccagaacacgaccugggaggaccacugccaguucucccggcccagccccaucggcuaccugggccuccugucccagcgcacccgggacaucuacaucagccgccggcgccgggggaccuucacguggacccugagcgacuccgagggcaacgagacccccgggggcuacugccucacccgcuggaugcugaucgaggccgagcugaagugcuucgggaacacggccguggccaagugcaacgagaagcacgacgaggaguucugcgacaugcuccggcuguucgacuucugcaagcaggcgauccgccggcugaaggccccggcccagaugagcauccagcucaucaacaaggccgucaacgcccugaucaacgaccagcugaucaugaagaaccaccuccgcgacaucaugggcauccccuacugcaacuacuccaaguacugguaccugaaccacaccagcuccggccggaccagccugcccaagugcuggcucaucuccaacgggagcuaccugaacgagacccaguucuccgacgacaucgagcagcaggcggacaacaugaucacggagaugcugcagaaggaguacaucgagcgccagggcaagaccccgcucgggcugguggacaucuucaucuucagcaccuccuucuaccugaucagcaucuuccugcaccucaucaagauccccacccaccggcacaucgugggcaagcccugccccaagccgcaccgccugaaccacaugggggucugcuccugcggccuguacaagcaccccggcgugcccacgaaguggaagcggugaggacuaguuauaagacugacuagcccgaugggccucccaacgggcccuccuccccuccuugcaccgagauuaauaaaaaaaaaaaaaaaaaaaaaaaaaaaaaaaaaaaaaaaaaaaaaaaaaaaaaaaaaaaaaaaaaaaaaaaaaaaaaaaaaaaaaaaaaaaaaaaaaaaa

SEQ ID NO: 24551 - RNA, 1662 nt, Artificial Sequence
  mRNA product Design i-3 (A100) comprising derived and/or modified sequence from LASV(803213;Clade II)__AAF86703__GPCmut2 (opt1)
aggagaaagcuuaccaugggccagaucaucaccuucuuccaggaggugccccacgucaucgaggaggugaugaacaucgugcugaucgcccucagccugcuggccauccucaaggggaucuacaacgucgcgaccugcggccuguucgggcugaucuccuuccuccugcugugcggccgcagcugcuccgugacguacaaggggguguacgagcuccagacccuggagcugaacauggccaaccucaacaugugcaugccgcugagcugcaccaagaacaacucccaccacuacaucauggucggcaacgagaccggccuggagcucacgcugaccaacaccagcaucaucaaccacaaguucugcaaccuguccgacgcccacaagaagaaccucuacgaccacgcccugaugagcaucaucuccaccuuccaccugagcauccccaacuucaaccaguacgaggccauguccugcgacuucaacgggggcaagaucagcgugcaguacaaccucucccacagcuucgcgguggacgccgccaaccacugcgggacgaucgccaacggcguccugcagaccuucaugcggauggcguggggcggguccuacaucgcccuggacagcggcaaggggaacugggacugcaucaugaccuccuaccaguaccucaucauccagaacaccacgugggaggaccacugccaguucagccgccccucccccaucggcuaccuggggcugcucagccagcggacccgcgacaucuacaucagccggcgccggcgcggcaccuucaccuggacgcuguccgacagcgagggcaacgaggcccccgggggcuacugccugacccgguggaugcucaucgaggccgagcugaagugcuucgggaacaccgccguggcgaagugcaacgagaagcacgacgaggaguucugcgacaugcugcgccucuucgacuucugcaagcaggccaucaagcggcugaagaccccggcccagauguccauccagcugaucaacaaggccgugaacgcccucaucaacgaccagcugaucaugaagaaccaccuccgcgacaucaugggcauccccuacugcaacuacagccgguacugguaccugaaccacacggucaccgggaagaccucccugccccgcugcuggcuggugagcaacggcuccuaccucaacgagacccacuucagcgacgacaucgagcagcaggcggacaacaugaucacggagaugcugcagaaggaguacauggaccggcagggcaagaccccgcuggggcucguggaccuguucgucuucuccaccagcuucuaccugaucuccaucuuccugcaccucgugaagauccccacccaccgccacaucgugggcaagcccugccccaagccgcaccggcugaaccacauggggaucugcagcugcggccuguacaagcaccccgggguccccgugaaguggaagcgcugaggacuaguuauaagacugacuagcccgaugggccucccaacgggcccuccuccccuccuugcaccgagauuaauaaaaaaaaaaaaaaaaaaaaaaaaaaaaaaaaaaaaaaaaaaaaaaaaaaaaaaaaaaaaaaaaaaaaaaaaaaaaaaaaaaaaaaaaaaaaaaaaaaaa

SEQ ID NO: 24552 - RNA, 1662 nt, Artificial Sequence
  mRNA product Design i-3 (A100) comprising derived and/or modified sequence from LASV(GA391;Clade III)__CAA36645__GPCmut2 (opt1)
aggagaaagcuuaccaugggccagaucgugaccuucuuccaggaggucccccacgugaucgaggaggugaugaacaucguccugaucgcccucagcauccuggccauccugaaggggcucuacaacguggcgaccugcggccugaucgggcuggugacguuccuccugcuguccggccgcagcugcucccucaucuacaaggggaccuacgagcugcagacccuggagcucaacauggagacccugaacaugugcaugccgcugagcugcacgaagaacaacucccaccacuacauccgggucggcaacgagaccggccucgagcugacccugaccaacacgagcauccucaaccacaaguucugcaaccuguccgacgcccacaagcgcaaccuguacgaccacagccucauguccaucaucagcaccuuccaccuguccauccccaacuucaaccaguacgaggccaugagcugcgacuucaacgggggcaagaucaccgugcaguacaaccugucccacagcuucgccguggacgccgcggggcacugcggcacccucgccaacgggguccugcagacguucaugcggauggccuggggcggcuccuacaucgcccuggacagcgggcgcggcaacugggacugcaucaugaccuccuaccaguaccucaucauccagaacaccaccugggacgaccacugccaguucagccggcccucccccaucggguaccugggccugcucagccagcgcacgcgggacaucuacaucagccgccggcgccggggcaccuucaccuggacccuguccgacagcgaggggaacgagacgccgggcggguacugccugacccgcuggaugcucaucgaggcggagcugaagugcuucggcaacaccgccguggccaagugcaacgagaagcacgacgaggaguucugcgacaugcugcggcuguucgacuucugcaagcaggccauccgccggcugaagacccccgcccagauguccauccagcugaucaacaaggcggugaacgcccucaucaacgaccagcugaucaugaagaaccaccuccgcgacaucauggggauccccuacugcaacuacagccgguacugguaccucaaccacacguccaccggcaagaccagccugccccgcugcuggcugaucuccaacggcagcuaccucaacgagaccaaguucuccgacgacaucgagcagcaggccgacaacaugaucacggagaugcugcagaaggaguacaucgaccggcaggggaagaccccgcugggccuggucgaccucuucguguucagcaccuccuucuaccugaucagcaucuuccugcaccucgugaagauccccacccaccgccacaucgucgggaagcccugccccaagccgcaccggcugaaccacaugggcaucugcuccugcgggcuguacaagcagcccggcgugcccgugcgcuggaagcgcugaggacuaguuauaagacugacuagcccgaugggccucccaacgggcccuccuccccuccuugcaccgagauuaauaaaaaaaaaaaaaaaaaaaaaaaaaaaaaaaaaaaaaaaaaaaaaaaaaaaaaaaaaaaaaaaaaaaaaaaaaaaaaaaaaaaaaaaaaaaaaaaaaaaa

SEQ ID NO: 24553 - RNA, 1665 nt, Artificial Sequence
  mRNA product Design i-3 (A100) comprising derived and/or modified sequence from LASV(AV;Clade V)__CCA30314__GPCmut2 (opt1)
aggagaaagcuuaccaugggccagaucgugaccuucuuccaggaggucccccacgugaucgaggaggugaugaacaucguccugaucgcccucagcauccuggccgugcugaaggggcucuacaacaucgcgaccugcggccugaucgggcugaucacguuccuccugcugugcggccgcuccugcagcuccaaccucuacaaggggguguacgagcugcagagccuggaccucaacauggagacccugaacaugugcaugccgcuguccugcaccaagaacaacagccaccacuacauccgggucggcaacgacaccggccucgagcugacgcugaccaacaccuccauccucaaccacaaguucugcaaccugagcgacgcccacaagaaggaccuguacgaccacgcccucauguccaucaucagcaccuuccaccuguccauccccaacuucaaccaguacgaggccaugagcugcgacuucaacgggggcaagaucuccgugcaguacaaccugagccacuccuacgccaucgacgcggccaaccacugcgggacgguggccaacggcauccuccagaccuucaugcgcauggccuggggcgggagcuacaucgcgcuggacuccggccgggggaacugggacugcaucaugaccagcuaccaguaccugaucauccagaacaccacgugggagaaccacugccaguucucccgccccagccccaucggcuaccucgggcugcugagccagcggacccgcgacaucuacaucucccggcgccggcgcggcaccuucaccuggacgcucagcgacuccgagggcaacgccacccccgggggcuacugccugacccgguggaugcugaucgaggccgagcucaagugcuucgggaacaccgccgucgccaagugcaacgagaagcacgacgaggaguucugcgacaugcugcgccuguucgacuucugcaagcaggcgaucagccggcucaaguccccggcccagaugagcauccagcugaucaacaaggccgugaacgcccugaucaacgaccagcucaucaugaagaaccaccuccgcgacaucaugggcauccccuacugcaacuacuccaaguacugguaccugaaccacacgaucaccgggaagaccagccugcccaagugcuggcugguguccaacggcagcuaccugaacgagacccacuucuccgacgacaucgagcagcaggccgacaacaugaucacggagaugcuccagaaggaguacauggagcggcagggcaagaccccgcuggggcuggucgaccuguucguguucagcaccuccuucuaccucaucagcaucuuccugcgccuggugaagauccccacccaccggcacaucgucggcaagcccugccccaagccgcaccgccucaaccacauggggaucugcuccugcggccuguacaagcagcccggggugcccgugcgguggaagcgcugaggacuaguuauaagacugacuagcccgaugggccucccaacgggcccuccuccccuccuugcaccgagauuaauaaaaaaaaaaaaaaaaaaaaaaaaaaaaaaaaaaaaaaaaaaaaaaaaaaaaaaaaaaaaaaaaaaaaaaaaaaaaaaaaaaaaaaaaaaaaaaaaaaaa

SEQ ID NO: 24554 - RNA, 1662 nt, Artificial Sequence
  mRNA product Design i-3 (A100) comprising derived and/or modified sequence from LASV(Togo/2016/7082;Clade VI)__AMR44577__GPCmut2 (opt1)
aggagaaagcuuaccaugggccagaucaucaccuucuuccaggaggugccccacgucaucgaggaggugaugaacaucgugcugaucgcccucagccugcuggccauccucaagggggucuacaacguggcgaccugcggcaucaucgggcuggugacguuccuguuccucugcggccgcuccugcagccugaucuacaagggguccuacgagcugcagacccucgagcugaacauggagacccugaacaugugcaugccgcucagcugcaccaagaacuccagccaccacuacauccgggucggcaacgagacgggccuggagcugacccucaccaacaccuccaucaucaaccacaaguucugcaaccugagcgacgcccacaagcgcaaccuguacgaccacgcccucauguccauccugagcacguuccaccuguccauccccaacuucaaccaguacgaggccaugagcugcgacuucaacgggggcaagaucuccgugcaguacaaccucagccacgccuacgcgguggacgccgccgagcacugcgggaccgucgccaacggcgugcugcagaccuucaugcggauggcguggggcggguccuacaucgcccuggacagcggccgcgggaacugggacugcaucaugaccuccuaccaguaccucaucauccagaacacgaccugggaggaccacugccaguucagccggcccucccccaucggcuaccuggggcugcucagccagcgcacccgggacaucuacaucagccgccggcgccggggcaccuucacguggacccuguccgacagcgagggcaacgagacccccgggggcuacugccugacccgcuggaugcucaucgaggccgagcugaagugcuucgggaacacggccguggccaagugcaacgagaagcacgacgaggaguucugcgacaugcugcggcuguucgacuucugcaagcaggcgauccagcgccugaaguccccggcccagaugagcauccagcugaucaacaaggccgucaacgcccucaucaacgaccagcugaucaugaagaaccaccuccgggacaugaugggcauccccuacugcaacuacuccaaguacugguaccucaaccacaccagcuccgggcgcaccagccugcccaagugcuggcugguguccaacggcagcuaccucaacgagacccacuucuccgacgacaucgagcagcaggccgacaacaugaucacggagaugcugcagaaggaguacaucgaccggcagggcaagaccccgcuggggcucguggaccuguucgucuucagcaccuccuucuaccugaucagcaucuuccugcaccucaucaagauccccacccaccgccacaucgugggcaagcccugccccaagccgcaccggcugaaccacauggggaucugcuccugcggccuguacaagcagcccggggugcccacgcgcuggaagcggugaggacuaguuauaagacugacuagcccgaugggccucccaacgggcccuccuccccuccuugcaccgagauuaauaaaaaaaaaaaaaaaaaaaaaaaaaaaaaaaaaaaaaaaaaaaaaaaaaaaaaaaaaaaaaaaaaaaaaaaaaaaaaaaaaaaaaaaaaaaaaaaaaaaa

SEQ ID NO: 24555 - RNA, 1662 nt, Artificial Sequence
  mRNA product Design i-3 (A100) comprising derived and/or modified sequence from LASV(KAK-428;Clade n.d. (VII))__ANH09740__GPCmut2 (opt1)
aggagaaagcuuaccaugggccagaucgugaccuucuuccaggaggucccccacgugaucgaggaggugaugaacaucguccugaucgcccucagccugcuggccauccucaaggggcuguacaacuucgcgaccugcggcgugaucgggcugaucacguuccuccugcugugcggccgcuccugcagcgccaccuacaaggggcaguacgagcuccagacccuggagcugaacauggagucccucaacaugugcaugccgcugagcugcaccaagaacaacucccaccacuacauccgggccggcaacaacacgggccuggagcucacccugaccaacaccagcaucaucucccacaaguucugcaaccugagcgacgcccacaagaagaaccucuacgaccacacgcugauguccaucaucaccaccuuccaccugagcauccccaacuucaaccaguacgaggccauguccugcgacuucaacgggggcaagaucagcauccaguacaaccucucccacagcuacgcgggggacgccgcccagcacugcggcaccguggccaacgggguccugcagacguucaugcgcauggcguggggcggcuccuaccuggcccucgacagcgggcggcgcggcugggacugcaucaucuccagcuaccaguaccugaucauccagaacaccaccugggacgaccacugccaguucucccggcccagccccaucggguaccugggcuucgugagccagaagacccgcgacaucuacaucucccggcgccggcgcggcacguucaccuggacccucagcgacuccgaggggcacgacaugccgggcggguacugccugacccgguggaugcugaucgaggccgaccucaagugcuucggcaacacggccguggccaagugcaacgagaagcacgacgaggaguucugcgacauguggcgccuguucgacuucugcaagcaggcgauccagcggcugaaggcccccgcccagaugaacauccagcucaucaacaaggccgucaacgcccugaucaacgaccagcugaugaugaagaaccaccuccgcgacaucauggggauccccuacugcaacuacagcaaguucugguaccugaacaacaccaccaccggccggacgucccugccccgcugcuggcucaucagcaacggcuccuaccugaacgagacccacuucagcgacgacaucgagcagcaggcggacaacaugaucaccgagaugcugcagaaggaguacauggaccggcaggggaagaccccgcucggccugguggaccuguucguguucuccacgagcuucuaccucaucaccaucuuccugcaccuggucaagauccccacccaccgccacaucguggggaagcccugccccaagccgcaccggcugaaccacaugggcaucugcuccugcgggcucuacaagcagcccggcgugcccguccgcuggaagcggugaggacuaguuauaagacugacuagcccgaugggccucccaacgggcccuccuccccuccuugcaccgagauuaauaaaaaaaaaaaaaaaaaaaaaaaaaaaaaaaaaaaaaaaaaaaaaaaaaaaaaaaaaaaaaaaaaaaaaaaaaaaaaaaaaaaaaaaaaaaaaaaaaaaa

SEQ ID NO: 24556 - RNA, 1662 nt, Artificial Sequence; identical to SEQ ID NO: 24550
  mRNA product Design i-3 (A100) comprising derived and/or modified sequence from LASV(Pinneo-NIG-1969;Clade I)__AIT17836__GPCmut2 (opt1)

SEQ ID NO: 24557 - RNA, 1662 nt, Artificial Sequence
  mRNA product Design i-3 (A100) comprising derived and/or modified sequence from LASV(ISTH0009-NIG-2011;Clade II)__AIT17404__GPCmut2 (opt1)
aggagaaagcuuaccaugggccagaucaucaccuucuuccaggaggugccccacgucaucgaggaggugaugaacaucgugcugaucgcccucagccugcuggccauccucaaggggaucuacaacgucgcgaccugcggccuguucgggcugguguccuuccuccugcugugcggccgcagcugcuccacgaccuacaaggggguguacgagcuccagacccuggagcuggacauggccagccucaacaugugcaugccgcuguccugcaccaagaacaacagccaccacuacaucauggucggcaacgagacgggccuggagcucacccugaccaacaccuccaucaucaaccacaaguucugcaaccugagcgacgcccacaagaagaaccucuacgaccacgcccugauguccaucaucagcacguuccaccuguccauccccaacuucaaccaguacgaggccaugagcugcgacuucaacgggggcaagaucuccgugcaguacaaccucagccacgcguacgccguggacgccgccaaccacugcgggaccaucgcgaacggcguccugcagaccuucaugcggauggccuggggcggguccuacaucgcccuggacagcggcaagggguccugggacugcaucaugaccagcuaccaguaccucaucauccagaacacgaccugggaggaccacugccaguucucccgccccagccccaucggcuaccuggggcugcucagccagcggacccgcgacaucuacaucucccggcgccggcgcggcaccuucacguggacccugagcgacuccgagggcaacgagacccccgggggcuacugccugacccgguggaugcucaucgaggccgagcugaagugcuucgggaacacggccguggcgaagugcaacgagaagcacgacgaggaguucugcgacaugcugcgccucuucgacuucugcaagcaggccauccggcgccugaagaccccggcccagaugagcauccagcugaucaacaaggccgugaacgcccucaucaacgaccagcugaucaugaagaaccaccuccgggacaucaugggcauccccuacugcaacuacuccaaguacugguaccugaaccacaccgucaccgggaagacgagccugccccgcugcuggcugguguccaacggcagcuaccucaacgagacccacuucuccgacgacaucgagcagcaggcggacaacaugaucaccgagcugcugcagaaggaguacauggaccggcagggcaagaccccgcucgggcugguggaccuguucgucuucagcacguccuucuaccugaucagcaucuuccuccaccugaucaagauccccacccaccgccacaucaccggcaagcccugccccaagccgcaccggcugaaccacauggggaucugcuccugcggccucuacaagcaccccggggugcccgugaaguggaagcgcugaggacuaguuauaagacugacuagcccgaugggccucccaacgggcccuccuccccuccuugcaccgagauuaauaaaaaaaaaaaaaaaaaaaaaaaaaaaaaaaaaaaaaaaaaaaaaaaaaaaaaaaaaaaaaaaaaaaaaaaaaaaaaaaaaaaaaaaaaaaaaaaaaaaa

SEQ ID NO: 24558 - RNA, 1662 nt, Artificial Sequence
  mRNA product Design i-3 (A100) comprising derived and/or modified sequence from LASV(ISTH2010-NIG-2012;Clade II)__AIT17482__GPCmut2 (opt1)
aggagaaagcuuaccaugggccagaucaucaccuucuuccaggaggugccccacgucaucgaggaggugaugaacaucgugcugaucgcccucagccugcuggccauccucaaggggaucuacaacgucgcgaccugcggccuguucgggcugguguccuuccuccugcugugcggccgcagcugcuccacgaccuacaaggggguguacgagcuccagacccuggagcuggacauggccagccucaacaugugcaugccgcuguccugcaccaagaacaacagccaccacuacaucauggucggcaacgagacgggccuggagcucacccugaccaacaccuccaucaucaaccacaaguucugcaaccugagcgacgcccacaagaagaaccucuacgaccacgcccugauguccaucaucagcacguuccaccuguccauccccaacuucaaccaguacgaggccaugagcugcgacuucaacgggggcaagaucuccgugcaguacaaccucagccacgcguacgccguggacgccgccaaccacugcgggaccaucgcgaacggcguccugcagaccuucaugcggauggccuggggcggguccuacaucgcccuggacagcggcaagggguccugggacugcaucaugaccagcuaccaguaccucaucauccagaacaucacgugggaggaccacugccaguucucccgccccagccccaucggcuaccuggggcugcucagccagcggacccgcgacaucuacaucucccggcgccggcgcggcaccuucaccuggacgcugagcgacuccgagggcaacgagacccccgggggcuacugccugacccgguggaugcucaucgaggccgagcugaagugcuucgggaacaccgccguggcgaagugcaacgagaagcacgacgaggaguucugcgacaugcugcgccucuucgacuucugcaagcaggccauccggcgccugaagacgccggcccagaugagcauccagcugaucaacaaggccgugaacgcccucaucaacgaccagcugaucaugaagaaccaccuccgggacaucaugggcauccccuacugcaacuacuccaaguacugguaccugaaccacaccgucaccgggaagaccagccugccccgcugcuggcugguguccaacggcagcuaccucaacgagacgcacuucuccgacgacaucgagcagcaggcggacaacaugaucaccgagcugcugcagaaggaguacaucgaccggcagggcaagaccccgcucgggcugguggaccuguucgucuucagcaccuccuucuaccugaucagcaucuuccuccaccuggugaagauccccacgcaccgccacguggucggcaagcccugccccaagccgcaccggcugaaccacauggggaucugcuccugcggccucuacaagcaccccggggugcccgugaaguggaagcgcugaggacuaguuauaagacugacuagcccgaugggccucccaacgggcccuccuccccuccuugcaccgagauuaauaaaaaaaaaaaaaaaaaaaaaaaaaaaaaaaaaaaaaaaaaaaaaaaaaaaaaaaaaaaaaaaaaaaaaaaaaaaaaaaaaaaaaaaaaaaaaaaaaaaa

SEQ ID NO: 24559 - RNA, 1662 nt, Artificial Sequence
  mRNA product Design i-3 (A100) comprising derived and/or modified sequence from LASV(Lassa virus/H.sapiens-wt/NGA/2015/ISTH_0543;Clade II)__AVO03639__GPCmut2 (opt1)
aggagaaagcuuaccaugggccagaucaucaccuucuuccaggaggugccccacgucaucgaggaggugaugaacaucgugcugaucgcccucagccugcuggccauccucaaggggaucuacaacgucgcgaccugcggccuguucgggcugguguccuuccuccugcugugcggccgcagcugcuccacgaccuacaaggggguguacgagcuccagacccuggagcuggacauggccaaccucaacaugugcaugccgcugagcugcaccaagaacaacucccaccacuacaucauggucggcaacgagacgggccuggagcucacccugaccaacaccagcaucaucaaccacaaguucugcaaccuguccgacgcccacaagaagaaccucuacgaccacgcccugaugagcaucaucuccacguuccaccugagcauccccaacuucaaccaguacgaggccauguccugcgacuucaacgggggcaagaucagcgugcaguacaaccucucccacaccuacgcgguggacgccgccaaccacugcgggaccaucgccaacggcguccugcagaccuucaugcggauggcguggggcgggagcuacaucgcccuggacuccggcaaggggagcugggacugcaucaugacguccuaccaguaccucgugauccagaacaccaccugggaggaccacugccaguucagccgccccucccccaucggcuaccuggggcugcucagccagcggacccgcgacaucuacaucagccggcgccggcgcggcacguucaccuggacccuguccgacagcgagggcaacgagacccccgggggcuacugccugacgcgguggaugcucaucgaggccgagcugaagugcuucgggaacaccgccguggccaagugcaacgagaagcacgacgaggaguucugcgacaugcugcgccucuucgacuucugcaagcaggcgauccggcgccugaagaccccggcccagauguccauccagcugaucaacaaggccgucaacgcccucaucaacgaccagcugaucaugaagaaccaccuccgggacaucaugggcauccccuacugcaacuacagcaaguacugguaccugaaccacaccgugacggggaagaccucccugccccgcugcuggcuggugagcaacggcuccuaccucaacgagacccacuucagcgacgacaucgagcagcaggccgacaacaugaucaccgagcugcugcagaaggaguacaucgaccggcagggcaagacgccgcucgggcuggucgaccuguucguguucuccaccagcuucuaccugaucuccaucuuccuccaccuggugaagauccccacccaccgccacaucaccggcaagcccugccccaagccgcaccggcugaaccacauggggaucugcagcugcggccucuacaagcaccccgggguccccgugaaguggaagcgcugaggacuaguuauaagacugacuagcccgaugggccucccaacgggcccuccuccccuccuugcaccgagauuaauaaaaaaaaaaaaaaaaaaaaaaaaaaaaaaaaaaaaaaaaaaaaaaaaaaaaaaaaaaaaaaaaaaaaaaaaaaaaaaaaaaaaaaaaaaaaaaaaaaaa

SEQ ID NO: 24560 - RNA, 1662 nt, Artificial Sequence
  mRNA product Design i-3 (A100) comprising derived and/or modified sequence from LASV(Lassa virus/H.sapiens-wt/NGA/2016/ISTH_0009;Clade II)__AVO03571__GPCmut2 (opt1)
aggagaaagcuuaccaugggccagaucaucaccuucuuccaggaggugccccacgucaucgaggaggugaugaacaucgugcugaucgcccucagccugcuggccauccucaaggggaucuacaacgucgcgaccugcggccugcuggggcucguguccuuccugcugcucugcggccgcagcugcuccacgaccuacaaggggguguacgagcugcagacccuggagcucgacauggccagccugaacaugugcaugccgcuguccugcaccaagaacaacagccaccacuacaucauggucggcaacgagacgggccucgagcugacccugaccaacaccuccaucaucaaccacaaguucugcaaccucagcgacgcccacaagaagaaccuguacgaccacgcccugauguccaucaucagcacguuccaccucuccauccccaacuucaaccaguacgaggccaugagcugcgacuucaacgggggccggaucuccgugcaguacaaccugagccacuccuacgcgguggacgccgccaaccacugcgggaccaucgccaacggcguccugcagaccuucaugcgcauggcguggggcgggagcuacaucgcccucgacuccggcaaggggagcugggacugcaucaugaccuccuaccaguaccugaucauccagaacacgaccugggaggaccacugccaguucagccggcccagccccaucggcuaccuggggcuccugucccagcgcacccgggacaucuacaucagccgccggcgccggggcaccuucacguggacccuguccgacagcgagggcaacgagacccccgggggcuacugccucacccgcuggaugcugaucgaggccgagcugaagugcuucgggaacacggccguggccaagugcaacgagaagcacgacgaggaguucugcgacaugcuccggcuguucgacuucugcaagcaggcgauccgccggcugaagaccccggcccagauguccauccagcucaucaacaaggccgugaacgcccugaucaacgaccagcugaucaugaagaaccaccuccgcgacaucaugggcauccccuacugcaacuacagcaaguacugguaccugaaccacaccgucaccgggaagacgucccugccccggugcuggcucgugagcaacggcuccuaccugaacgagacccacuucagcgacgacaucgagcagcaggccgacaacaugaucaccgagcugcuccagaaggaguacaucgaccgccagggcaagaccccgcuggggcugguggaccuguucgucuucuccacgagcuucuaccucaucuccaucuuccugcaccuggugaagauccccacccaccggcacaucaccggcaagcccugccccaagccgcaccgccucaaccacauggggaucugcagcugcggccuguacaaccaccccggggugcccgucaaguggaagcggugaggacuaguuauaagacugacuagcccgaugggccucccaacgggcccuccuccccuccuugcaccgagauuaauaaaaaaaaaaaaaaaaaaaaaaaaaaaaaaaaaaaaaaaaaaaaaaaaaaaaaaaaaaaaaaaaaaaaaaaaaaaaaaaaaaaaaaaaaaaaaaaaaaaa

SEQ ID NO: 24561 - RNA, 1662 nt, Artificial Sequence
  mRNA product Design i-3 (A100) comprising derived and/or modified sequence from LASV(Lassa virus/H.sapiens-wt/NGA/2016/ISTH_0017;Clade II)__AVO03567__GPCmut2 (opt1)
aggagaaagcuuaccaugggccagaucaucaccuucuuccaggaggugccccacgucaucgaggaggugaugaacaucgugcugaucgcccucagccugcuggccauccucaaggggaucuacaacgucgcgaccugcggccuguucgggcugguguccuuccuccugcugugcggccgcagcugcuccacgaccuacaaggggguguacgagcuccagacccuggagcuggacauggccagccucaacaugugcaugccgcuguccugcaccaagaacaacagccaccacuacaucauggucggcaacgagacgggccuggagcucacccugaccaacaccuccaucaucaaccacaaguucugcaaccugagcgacgcccacaagaagaaccucuacgaccacgcccugauguccaucaucagcacguuccaccuguccauccccaacuucaaccaguacgaggccaugagcugcgacuucaacgggggcaagaucuccgugcaguacaaccucagccacaccuacgcgaucgacgccgccaaccacugcgggaccaucgccaacggcgugcugcagaccuucaugcggauggcguggggcggguccuacaucgcccuggacagcggcaagggguccugggacugcaucaugacgagcuaccaguaccucaucauccagaacaccaccugggaggaccacugccaguucucccgccccagccccaucggcuaccuggggcugcucagccagcggacccgcgacaucuacaucucccggcgccggcgcggcacguucaccuggacccugagcgacuccgagggcaacgagacccccgggggcuacugccugacgcgguggaugcucaucgaggccgagcugaagugcuucgggaacaccgccgucgccaagugcaacgagaagcacgacgaggaguucugcgacaugcugcgccucuucgacuucugcaagcaggcgauccggcgccugaagaccccggcccagaugagcauccagcugaucaacaaggccgugaacgcccucaucaacgaccagcugaucaugaagaaccaccuccgggacaucaugggcauccccuacugcaacuacuccaaguacugguaccugaaccacaccgugacggggaagaccagccugccccgcugcuggcuggucuccaacggcagcuaccucaacgagacccacuucuccgacgacaucgagcagcaggccgacaacaugaucaccgagcugcugcagaaggaguacauggaccggcagggcaagacgccgcucgggcugguggaccuguucguguucagcaccuccuucuaccugaucagcaucuuccuccaccugguccgcauccccacccaccggcacgugaucggcaagcccugccccaagccgcaccgccugaaccacauggggaucugcuccugcggccucuacaagcaccccggggugcccgucaaguggaagcggugaggacuaguuauaagacugacuagcccgaugggccucccaacgggcccuccuccccuccuugcaccgagauuaauaaaaaaaaaaaaaaaaaaaaaaaaaaaaaaaaaaaaaaaaaaaaaaaaaaaaaaaaaaaaaaaaaaaaaaaaaaaaaaaaaaaaaaaaaaaaaaaaaaaa

SEQ ID NO: 24562 - RNA, 1662 nt, Artificial Sequence
  mRNA product Design i-3 (A100) comprising derived and/or modified sequence from LASV(Lassa virus/H.sapiens-wt/NGA/2018/ISTH_0959;Clade II)__AVV65099__GPCmut2 (opt1)
aggagaaagcuuaccaugggccagaucaucaccuucuuccaggaggugccccacgucaucgaggaggugaugaacaucgugcugaucgcccucagccugcuggccauccucaaggggaucuacaacgucgugaccugcggccuguucgggcugguguccuuccuccugcugugcggccgcagcugcuccacgaccuacaagggggucuacgagcuccagacccuggagcuggacauggcgagccucaacaugugcaugccgcuguccugcaccaagaacaacagccaccacuacaucauggugggcaacgagacgggccuggagcucacccugaccaacaccuccaucaucaaccacaaguucugcaaccugagcgacgcccacaagaagaaccucuacgaccacgcccugauguccaucaucagcacguuccaccuguccauccccaacuucaaccaguacgaggccaugagcugcgacuucaacgggggcaagaucuccgugcaguacaaccucagccacgccuacgcgaucgacgccgccaaccacugcgggaccaucgccaacggcguccugcagaccuucaugcggauggcguggggcggguccuacaucgcccuggacagcggcaagggguccugggacugcaucaugaccagcuaccaguaccucaucauccagaacacgaccugggaggaccacugccaguucucccgccccagccccaucggcuaccuggggcugcucagccagcggacccgcgacaucuacaucucccggcgccggcgcggcaccuucacguggacccugagcgacuccgagggcaacgagacccccgggggcuacugccugacccgguggaugcucaucgaggccgagcugaagugcuucgggaacacggccguggccaagugcaacgagaagcacgacgaggaguucugcgacaugcugcgccucuucgacuucugcaagcaggcgauccggcgccugaagaccccggcccagaugagcauccagcugaucaacaaggccgugaacgcccucaucaacgaccagcugaucaugaagaaccaccuccgggacaucaugggcauccccuacugcaacuacuccaaguacugguaccugaaccacaccgucaccgggaagacgagccugccccgcugcuggcugguguccaacggcagcuaccucaacgagacccacuucuccgacgacaucgagcagcaggccgacaacaugaucaccgagcugcugcagaaggaguacaucgaccggcagggcaagaccccgcucgggcugguggaccuguucgucuucagcacguccuucuaccugaucagcaucuuccuccaccuggugaagauccccacccaccgccacgugaucggcaagcccugccccaagccgcaccggcugaaccacauggggaucugcuccugcggccucuacaagcaccccgggguccccgugaaguggaagcgcugaggacuaguuauaagacugacuagcccgaugggccucccaacgggcccuccuccccuccuugcaccgagauuaauaaaaaaaaaaaaaaaaaaaaaaaaaaaaaaaaaaaaaaaaaaaaaaaaaaaaaaaaaaaaaaaaaaaaaaaaaaaaaaaaaaaaaaaaaaaaaaaaaaaa

SEQ ID NO: 24563 - RNA, 1662 nt, Artificial Sequence
  mRNA product Design i-3 (A100) comprising derived and/or modified sequence from LASV(LASV003-NIG-2008;Clade II)__AIT17580__GPCmut2 (opt1)
aggagaaagcuuaccaugggccagaucaucaccuucuuccaggaggugccccacgucaucgaggaggugaugaacaucgugcugaucgcccucagccugcuggccauccucaaggggaucuacaacgucgcgaccugcggccuguucgggcugguguccuuccuccugcugugcggccgcagcugcuccacgaccuacaaggggguguacgagcuccagacccuggagcuggacauggccagccucaacaugugcaugccgcuguccugcaccaagaacaacagccaccacuacaucauggucggcaacgagacgggccuggagcucacccugaccaacaccuccaucaucaaccacaaguucugcaaccugagcgacgcccacaagaagaaccucuacgaccacgcccugauguccaucaucagcacguuccaccuguccauccccaacuucaaccaguacgaggccaugagcugcgacuucaacgggggcaagaucuccgugcaguacaaccucagccacaccuacgcgguggacgccgccaaccacugcgggaccaucgccaacggcguccugcagaccuucaugcggauggcguggggcggguccuacaucgcccuggacagcggcaagggguccugggacugcaucaugacgagcuaccaguaccucaucauccagaacaccaccugggaggaccacugccaguucucccgccccagccccaucggcuaccuggggcugcucagccagcggacccgcgacaucuacaucucccggcgccggcgcggcacguucaccuggacccugagcgacuccgagagcaacgagaccccgggcggguacugccugacgcgguggaugcucaucgaggccgagcugaagugcuucggcaacaccgccguggccaagugcaacgagaagcacgacgaggaguucugcgacaugcugcgccucuucgacuucugcaagcaggcgauccggcgccugaaggcccccgcccagauguccauccagcugaucaacaaggccgugaacgcccucaucaacgaccagcugaucaugaagaaccaccuccgggacaucauggggauccccuacugcaacuacagcaaguacugguaccugaaccacaccgucaccggccgcacgucccugccccggugcuggcuggugagcaacggguccuaccucaacgagacccacuucagcgacgacaucgagcagcaggcggacaacaugaucaccgagcugcugcagaaggaguacauggaccgccagggcaagaccccgcucggccugguggaccuguucgucuucuccacgagcuucuaccugaucuccaucuuccuccaccuggugaagauccccacccaccggcacgugaucgggaagcccugccccaagccgcaccgccugaaccacaugggcaucugcagcugcgggcucuacaagcaccccggcguccccgugaaguggaagcggugaggacuaguuauaagacugacuagcccgaugggccucccaacgggcccuccuccccuccuugcaccgagauuaauaaaaaaaaaaaaaaaaaaaaaaaaaaaaaaaaaaaaaaaaaaaaaaaaaaaaaaaaaaaaaaaaaaaaaaaaaaaaaaaaaaaaaaaaaaaaaaaaaaaa

SEQ ID NO: 24564 - RNA, 1662 nt, Artificial Sequence
  mRNA product Design i-3 (A100) comprising derived and/or modified sequence from LASV(LASV035-NIG-2009;Clade II)__AIT17588__GPCmut2 (opt1)
aggagaaagcuuaccaugggccagaucaucaccuucuuccaggaggugccccacgucaucgaggaggugaugaacaucgugcugaucgcccucagccugcuggccauccucaaggggaucuacaacgucgcgaccugcggccuguucgggcugguguccuuccuccugcugugcggccgcagcugcuccacgaccuacaaggggguguacgagcuccagacccuggagcuggacauggccagccucaacaugugcaugccgcuguccugcaccaagaacaacagccaccacuacaucauggucggcaacgagacgggccuggagcucacccugaccaacaccuccaucaucaaccacaaguucugcaaccugagcgacgcccacaagaagaaccucuacgaccacgcccugauguccaucaucagcacguuccaccuguccauccccaacuucaaccaguacgaggccaugagcugcgacuucaacgggggcaagaucuccgugcaguacaaccucagccacgcguacgccguggacgccgccaaccacugcgggaccaucgcgaacggcguccugcagaccuucaugcggauggccuggggcggguccuacaucgcccuggacagcggcaagggguccugggacugcaucaugaccagcuaccaguaccucaucauccagaacacgaccugggaggaccacugccaguucucccgccccagccccaucggcuaccuggggcugcucagccagcggacccgcgacaucuacaucucccggcgccggcgcggcaccuucacguggacccugagcgacuccgagggcaacgagacccccgggggcuacugccugacccgguggaugcucaucgaggccgagcugaagugcuucgggaacacggccguggcgaagugcaacgagaagcacgacgaggaguucugcgacaugcugcgccucuucgacuucugcaagcaggccauccggcgccugaaggccccggcccagaugagcauccagcugaucaacaaggccgugaacgcgcucaucaacgaccagcugaucaugaagaaccaccuccgggacaucaugggcauccccuacugcaacuacuccaaguacugguaccugaaccacaccgucaccgggaagaccagccugccccgcugcuggcugguguccaacggcagcuaccucaacgagacgcacuucuccgacgacaucgagcagcaggccgacaacaugaucaccgagcugcugcagaaggaguacaucgaccggcagggcaagaccccgcucgggcugguggaccuguucgucuucagcaccuccuucuaccugaucagcaucuuccuccaccuggugaagauccccacgcaccgccacgugaucggcaagcccugccccaagccgcaccggcugaaccacauggggaucugcuccugcggccucuacaagcaccccgggguccccgugaaguggaagcgcugaggacuaguuauaagacugacuagcccgaugggccucccaacgggcccuccuccccuccuugcaccgagauuaauaaaaaaaaaaaaaaaaaaaaaaaaaaaaaaaaaaaaaaaaaaaaaaaaaaaaaaaaaaaaaaaaaaaaaaaaaaaaaaaaaaaaaaaaaaaaaaaaaaaa

SEQ ID NO: 24565 - RNA, 1662 nt, Artificial Sequence
  mRNA product Design i-3 (A100) comprising derived and/or modified sequence from LASV(LASV1000-NIG-2009;Clade II)__AIT17782__GPCmut2 (opt1)
aggagaaagcuuaccaugggccagaucaucaccuucuuccaggaggugccccacgucaucgaggaggugaugaacaucgugcugaucgcccucagccugcuggccauccucaaggggaucuacaacgucgcgaccugcggccuguucgggcugguguccuuccuccugcugugcggccgcagcugcuccacgaccuacaaggggguguacgagcuccagacccuggagcuggacauggccagccucaacaugugcaugccgcuguccugcaccaagaacaacagccaccacuacaucauggucggcaacgagacgggccuggagcucacccugaccaacaccuccaucaucaaccacaaguucugcaaccugagcgacgcccacaagaagaaccucuacgaccacgcccugauguccaucaucagcacguuccaccuguccauccccaacuucaaccaguacgaggccaugagcugcgacuucaacgggggcaagaucuccgugcaguacaaccucagccacaccuacgcgguggacgccgccaaccacugcgggaccaucgccaacggcguccugcagaccuucaugcggauggcguggggcggguccuacaucgcccuggacagcggcaagggguccugggacugcaucaugacgagcuaccaguaccucaucauccagaacaccaccugggaggaccacugccaguucucccgccccagccccaucggcuaccuggggcugcucagccagcggacccgcgacaucuacaucucccggcgccggcgcggcacguucaccuggacccugagcgacuccgagggcaacgagacccccgggggcuacugccugacgcgguggaugcucaucgaggccgagcugaagugcuucgggaacaccgccguggccaagugcaacgagaagcacgacgaggaguucugcgacaugcugcgccucuucgacuucugcaagcaggcgaucaagcggcugaagaccccggcccagaugagcauccagcugaucaacaaggccgugaacgcccucaucaacgaccagcugaucaugaagaaccaccuccgcgacaucaugggcauccccuacugcaacuacuccaaguacugguaccugaaccacaccgucacggggaagaccagccugccccggugcuggcugguguccaacggcagcuaccucaacgagacccacuucuccgacgacaucgagcagcaggccgacaacaugaucaccgagcugcugcagaaggaguacaucgaccgccagggcaagacgccgcucgggcugguggaccuguucgucuucagcaccuccuucuaccugaucagcaucuuccuccaccuggugaagauccccacccaccggcacguggucggcaagcccugccccaagccgcaccgccugaaccacauggggaucugcuccugcggccucuacaagcaccccggggugcccgugaaguggaagcggugaggacuaguuauaagacugacuagcccgaugggccucccaacgggcccuccuccccuccuugcaccgagauuaauaaaaaaaaaaaaaaaaaaaaaaaaaaaaaaaaaaaaaaaaaaaaaaaaaaaaaaaaaaaaaaaaaaaaaaaaaaaaaaaaaaaaaaaaaaaaaaaaaaaa

SEQ ID NO: 24566 - RNA, 1662 nt, Artificial Sequence
  mRNA product Design i-3 (A100) comprising derived and/or modified sequence from LASV(LASV221-NIG-2010;Clade II)__AIT17624__GPCmut2 (opt1)
aggagaaagcuuaccaugggccagaucaucaccuucuuccaggaggugccccacgucaucgaggaggugaugaacaucgugcugaucgcccucagccugcuggccauccucaaggggaucuacaacgucgcgaccugcggccuguucgggcugguguccuuccuccugcugugcggccgcagcugcuccacgaccuacaaggggguguacgagcuccagacccuggagcuggacauggccagccucaacaugugcaugccgcuguccugcaccaagaacaacagccaccacuacaucauggucggcaacgagacgggccuggagcucacccugaccaacaccuccaucaucaaccacaaguucugcaaccugagcgacgcccacaagaagaaccucuacgaccacgcccugauguccaucaucagcacguuccaccuguccauccccaacuucaaccaguacgaggccaugagcugcgacuucaacgggggcaagaucuccgugcaguacaaccucagccacaccuacgcgaucgacgccgccaaccacugcgggaccaucgccaacggcgugcugcagaccuucaugcggauggcguggggcggguccuacaucgcccuggacagcggcaagggguccugggacugcaucaugacgagcuaccaguaccucaucauccagaacaccaccugggaggaccacugccaguucucccgccccagccccaucggcuaccuggggcugcucagccagcggacccgcgacaucuacaucucccggcgccggcgcggcacguucaccuggacccugagcgacuccgagggcaacgagacccccgggggcuacugccugacgcgguggaugcucaucgaggccgagcugaagugcuucgggaacaccgccgucgccaagugcaacgagaagcacgacgaggaguucugcgacaugcugcgccucuucgacuucugcaagcaggcgauccggcgccugaagaccccggcccagaugagcauccagcugaucaacaaggccgugaacgcccucaucaacgaccagcugaucaugaagaaccaccuccgggacaucaugggcauccccuacugcaacuacuccaaguacugguaccugaaccacaccgugacggggaagaccagccugccccgcugcuggcuggucuccaacggcagcuaccucaacgagacccacuucuccgacgacaucgagcagcaggccgacaacaugaucaccgagaugcugcagaaggaguacauggaccggcagggcaagacgccgcuggggcucguggaccuguucguguucagcaccuccuucuaccugaucagcaucuuccugcaccucgucaagauccccacccaccgccacgugaucggcaagcccugccccaagccgcaccggcugaaccacauggggaucugcuccugcggccuguacaagcaccccggggugcccgucaaguggaagcgcugaggacuaguuauaagacugacuagcccgaugggccucccaacgggcccuccuccccuccuugcaccgagauuaauaaaaaaaaaaaaaaaaaaaaaaaaaaaaaaaaaaaaaaaaaaaaaaaaaaaaaaaaaaaaaaaaaaaaaaaaaaaaaaaaaaaaaaaaaaaaaaaaaaaa

SEQ ID NO: 24567 - RNA, 1662 nt, Artificial Sequence
  mRNA product Design i-3 (A100) comprising derived and/or modified sequence from LASV(LASV237-NIG-2010;Clade II)__AIT17638__GPCmut2 (opt1)
aggagaaagcuuaccaugggccagaucaucaccuucuuccaggaggugccccacgucaucgaggaggugaugaacaucgugcugaucgcccucagccugcuggccauccucaaggggaucuacaacgucgcgaccugcggccuguucgggcugguguccuuccuccugcugugcggccgcagcugcuccacgaccuacaaggggguguacgagcuccagacccuggagcuggacauggccagccucaacaugugcaugccgcuguccugcaccaagaacaacagccaccacuacaucauggucggcaacgagacgggccuggagcucacccugaccaacaccuccaucaucaaccacaaguucugcaaccugagcgacgcccacaagaaggaccucuacgaccacgcccugauguccaucaucagcacguuccaccuguccauccccaacuucaaccaguacgaggccaugagcugcgacuucaacgggggcaagaucuccgugcaguacaaccucagccacaccuacgcgguggacgccgccaaccacugcgggaccaucgccaacggcguccugcagaccuucaugcggauggcguggggcggguccuacaucgcccuggacagcggcaagggguccugggacugcaucaugacgagcuaccaguaccucaucauccagaacaccaccugggaggaccacugccaguucucccgccccagccccaucggcuaccuggggcugcucagccagcggacccgcgacaucuacaucucccggcgccggcgcggcacguucaccuggacccugagcgacuccgagggcaacgagacccccgggggcuacugccugacgcgguggaugcucaucgaggccgagcugaagugcuucgggaacaccgccguggccaagugcaacgagaagcacgacgaggaguucugcgacaugcugcgccucuucgacuucugcaagcaggcgauccggcgccugaagaccccggcccagaugagcauccagcugaucaacaaggccgugaacgcccucaucaacgaccagcugaucaugaagaaccaccuccgggacaucaugggcauccccuacugcaacuacuccaaguacugguaccugaaccacaccgucacggggaagaccagccugccccgcugcuggcugguguccaacggcagcuaccucaacgagacccacuucuccgacgacaucgagcagcaggccgacaacaugaucaccgagcugcugcagaaggaguacauggaccggcagggcaagacgccgcucgggcugguggaccuguucgucuucagcaccuccuucuaccugaucagcaucuuccuccaccugaucaagauccccacccaccgccacaucaccggcaagcccugccccaagccgcaccggcugaaccacauggggaucugcuccugcggccucuacaagcaccccggggugcccgugaaguggaagcgcugaggacuaguuauaagacugacuagcccgaugggccucccaacgggcccuccuccccuccuugcaccgagauuaauaaaaaaaaaaaaaaaaaaaaaaaaaaaaaaaaaaaaaaaaaaaaaaaaaaaaaaaaaaaaaaaaaaaaaaaaaaaaaaaaaaaaaaaaaaaaaaaaaaaa

SEQ ID NO: 24568 - RNA, 1662 nt, Artificial Sequence
  mRNA product Design i-3 (A100) comprising derived and/or modified sequence from LASV(LASV253-NIG-2011;Clade II)__AIT17670__GPCmut2 (opt1)
aggagaaagcuuaccaugggccagaucaucaccuucuuccaggaggugccccacgucaucgaggaggugaugaacaucgugcugaucgcccucagccugcuggccauccucaaggggaucuacaacgucgcgaccugcggccuguucgggcugguguccuuccuccugcugugcggccgcagcugcuccacgaccuacaaggggguguacgagcuccagacccuggagcuggacauggccagccucaacaugugcaugccgcuguccugcaccaagaacaacagccaccacuacaucauggucggcaacgagacgggccuggagcucacccugaccaacaccuccaucaucaaccacaaguucugcaaccugagcgacgcccacaagaagaaccucuacgaccacgcccugauguccaucaucagcacguuccaccuguccauccccaacuucaaccaguacgaggccaugagcugcgacuucaacgggggcaagaucuccgugcaguacaaccucagccacaccuacgcgguggacgccgccaaccacugcgggaccaucgccaacggcguccugcagaccuucaugcggauggcguggggcggguccuacaucgcccuggacagcggcaagggguccugggacugcaucaugacgagcuaccaguaccucaucauccagaacaccaccugggaggaccacugccaguucucccgccccagccccaucggcuaccuggggcugcucagccagcggacccgcgacaucuacaucucccggcgccggcgcggcacguucaccuggacccugagcgacuccgagggcaacgagacccccgggggcuacugccugacgcgguggaugcucaucgaggccgagcugaagugcuucgggaacaccgccguggccaagugcaacgagaagcacgacgaggaguucugcgacaugcugcgccucuucgacuucugcaagcaggcgauccggcgccugaaggccccggcccagaugagcauccagcugaucaacaaggccgugaacgcccucaucaacgaccagcugaucaugaagaaccaccuccgggacaucaugggcauccccuacugcaacuacuccaaguacugguaccugaaccacaccgucaccgggcgcacgagccugccccggugcuggcugguguccaacggcagcuaccucaacgagacccacuucuccgacgacaucgagcagcaggcggacaacaugaucaccgagcugcugcagaaggaguacaucgaccgccagggcaagaccccgcucgggcugguggaccuguucgucuucagcacguccuucuaccugaucagcaucuuccuccaccuggugaagauccccacccaccggcacaucaucggcaagcccugccccaagccgcaccgccugaaccacauggggaucugcuccugcggccucuacaagcaccccggggugcccgucaaguggaagcggugaggacuaguuauaagacugacuagcccgaugggccucccaacgggcccuccuccccuccuugcaccgagauuaauaaaaaaaaaaaaaaaaaaaaaaaaaaaaaaaaaaaaaaaaaaaaaaaaaaaaaaaaaaaaaaaaaaaaaaaaaaaaaaaaaaaaaaaaaaaaaaaaaaaa

SEQ ID NO: 24569 - RNA, 1662 nt, Artificial Sequence
  mRNA product Design i-3 (A100) comprising derived and/or modified sequence from LASV(LASV254-NIG-2011;Clade II)__AIT17674__GPCmut2 (opt1)
aggagaaagcuuaccaugggccagaucaucaccuucuuccaggaggugccccacgucaucgaggaggugaugaacaucgugcugaucgcccucagccugcuggccauccucaaggggaucuacaacgucgcgaccugcggccuguucgggcugguguccuuccuccugcugugcggccgcagcugcuccacgaccuacaaggggguguacgagcuccagacccuggagcuggacaugaccaaccucaacaugugcaugccgcugagcugcacgaagaacaacucccaccacuacaucauggucggcaacgagaccggccuggagcucacccugaccaacacgagcaucaucaaccacaaguucugcaaccuguccgacgcccacaagaagaaccucuacaaccacgcccugaugagcaucaucuccaccuuccaccugagcauccccaacuucaaccaguacgaggccauguccugcgacuucaacgggggcaagaucagcgugcaguacaaccucucccacagcuacgccguggacgcggccaaccacugcgggaccaucgccaacggcguccugcagaccuucaugcggauggccuggggcggguccuacaucgcgcuggacagcggcaaggggaacugggacugcaucaugacguccuaccaguaccucaucauccagaacaccaccugggaggaccacugccaguucagccgccccucccccaucggcuaccuggggcugcucagccagcggacccgcgacaucuacaucagccggcgccggcgcggcacguucaccuggacccuguccgacagcgagggcaacgagacccccgggggcuacugccugacgcgguggaugcucaucgaggccgagcugaagugcuucgggaacaccgccguggccaagugcaacgagaagcacgacgaggaguucugcgacaugcugcgccucuucgacuucugcaagcaggccauccggcgccugaagaccccggcgcaggccaacauccagcugaucaacaaggccgugaacgcccucaucaacgaccagcugaucaugaagaaccaccuccgggacaucaugggcauccccuacugcaacuacuccaaguacugguaccugaaccacaccgucacggggaagaccagccugccccgcugcuggcugguguccaacggcagcuaccucaacgagacccacuucuccgacgacaucgagcagcaggccgacaacaugaucaccgagcugcugcagaaggaguacauggaccggcagggcaagacgccgcucgggcugguggaccuguucgucuucagcaccuccuucuaccugaucagcaucuuccuccaccuggugaagauccccacccaccgccacgugaucggcaagcccugccccaagccgcaccggcugaaccacauggggaucugcuccugcggccucuacaagcaccccgggguccccgugaaguggaagcgcugaggacuaguuauaagacugacuagcccgaugggccucccaacgggcccuccuccccuccuugcaccgagauuaauaaaaaaaaaaaaaaaaaaaaaaaaaaaaaaaaaaaaaaaaaaaaaaaaaaaaaaaaaaaaaaaaaaaaaaaaaaaaaaaaaaaaaaaaaaaaaaaaaaaa

SEQ ID NO: 24570 - RNA, 1662 nt, Artificial Sequence
  mRNA product Design i-3 (A100) comprising derived and/or modified sequence from LASV(Nig08-A19;Clade III)__ADU56618__GPCmut2 (opt1)
aggagaaagcuuaccaugggccagaucgugaccuucuuccaggaggucccccacgugaucgaggaggugaugaacaucguccugaucgcccucagcauccuggccauccugaaggggcucuacaacaucgcgaccugcggccugaucgggcuggugacguuccuccugcuguccggccgcagcugcuccaugaccuacaaggggguguacgagcuccagacccuggagcugaacaugaacacccucaacaugugcaugccgcugagcugcacgaagaacaacucccaccacuacaucauggucggcaacgagaccggccuggagcucacccugaccaacacgagccugcuccaccacaaguucugcaaccuguccgacgcccacaagaagaaccuguacgaccacacccucaugagcaucaucuccaccuuccaccugagcauccccaacuucaaccaguacgaggccauguccugcgacuucaacgggggcaagaucaccgugcaguacaaccugagccacuccuacgccaucgacgccgcgaaccacugcgggacgguggccaacggcguccuccagaccuucaugcggauggccuggggcgggagcuacaucgcccuggacuccggccgcgggaagugggacugcaucaugaccagcuaccaguaccugaucauccagaacaccacgugggaggaccacugccaguucucccggcccagccccaucggcuaccucgggcugcugucccagcgcacccgggacaucuacaucagccgccggcgccggggcaccuucaccuggacgcucagcgacuccgagggcaacgagacccccgggggcuacugccugacccgcuggaugcugaucgaggcggagcucaagugcuucgggaacaccgccguggccaagugcaacgagaagcacgacgaggaguucugcgacaugcugcggcuguucgacuucugcaagcaggccauccgccggcucaaggccccggcgcagaugagcauccagcugaucaacaaggccgugaacgcccugaucaacgaccagcucaucaugaagaaccaccuccgcgacaucaugggcauccccuacugcaacuacuccaaguacugguaccugaaccacacgagcaccgggcggaccucccugccccgcugcuggcuggucagcaacggcuccuaccugaacgagacccacuucagcgacgacaucgagcagcaggccgacaacaugaucacggagaugcuccagaaggaguaccuggaccggcagggcaagaccccgcuggggcugguggaccucuucguguucuccaccagcuucuaccugaucuccaucuuccugcaccucgucaagauccccacccaccgccacaucgugggcaagcccugccccaagccgcaccggcugaaccacauggggaucugcagcugcggccuguacaagcagcccggggugcccguccgcuggaagcggugaggacuaguuauaagacugacuagcccgaugggccucccaacgggcccuccuccccuccuugcaccgagauuaauaaaaaaaaaaaaaaaaaaaaaaaaaaaaaaaaaaaaaaaaaaaaaaaaaaaaaaaaaaaaaaaaaaaaaaaaaaaaaaaaaaaaaaaaaaaaaaaaaaaa

SEQ ID NO: 24571 - RNA, 1665 nt, Artificial Sequence
  mRNA product Design i-3 (A100) comprising derived and/or modified sequence from LASV(G1180-SLE-2010;Clade IV)__AIT17168__GPCmut2 (opt1)
aggagaaagcuuaccaugggccagaucgugaccuucuuccaggaggucccccacgugaucgaggaggugaugaacaucguccugaucgcccucagcauccuggccgugcugaaggggcucuacaacuucgcgaccugcggccugguggggcugcucacguuccugcugcucugcggccgcuccugcaccgccagccgguacaagggggucuacgagcugcagacccuggagcucaacauggagacccugaacaugugcaugccgcuguccugcacgaagaacaacagccaccacuacaucauggugggcaacgagaccggccucgagcugacccugaccaacacguccaucaucaaccacaaguucugcaaccucagcgacgcccacaagaagaaccuguacgaccacgcccugauguccaucaucagcaccuuccaccucuccauccccaacuucaaccaguacgaggccaugagcugcgacuucaacgggggcaagaucuccgugcaguacaaccugagccacuccuacgcgggggacgccgccaaccacugcggcaccgucgccaacggggugcugcagaccuucaugcgcauggcguggggcggcagcuacaucgcccucgacuccgggcacggcagcugggacugcaucaugacguccuaccaguaccugaucauccagaacaccaccugggaggaccacugccaguucagccggcccucccccaucggguaccugggccuccugagccagcgcacccgggacaucuacaucagccgccggcgccggggcacguucaccuggacccuguccgacagcgaggggaaggacaccccgggcggguacugccucacgcgcuggaugcugaucgaggccgagcugaagugcuucggcaacaccgccguggccaagugcaacgagaagcacgacgaggaguucugcgacaugcuccggcuguucgacuucugcaagcaggcgauccagcgccugaaggcccccgcccagauguccauccagcucaucaacaaggccgucaacgcccugaucaacgaccagcugaucaugaagaaccaccuccgggacaucauggggauccccuacugcaacuacagcaaguacugguaccugaaccacaccaccacgggcaagaccucccugcccaagugcuggcucgugagcaacggcuccuaccugaacgagacccacuucagcgacgacaucgagcagcaggcggacaacaugaucaccgagaugcugcagaaggaguacauggagcgccaggggaagacgccgcucggccugguggaccuguucgucuucuccaccagcuucuaccugaucuccaucuuccuccaccuggugaagauccccacccaccggcacaucgugggcaagagcugccccaagccccaccgccugaaccacauggggaucugcuccugcgggcucuacaagcagccgggcguccccgugaaguggaagcggugaggacuaguuauaagacugacuagcccgaugggccucccaacgggcccuccuccccuccuugcaccgagauuaauaaaaaaaaaaaaaaaaaaaaaaaaaaaaaaaaaaaaaaaaaaaaaaaaaaaaaaaaaaaaaaaaaaaaaaaaaaaaaaaaaaaaaaaaaaaaaaaaaaaa

SEQ ID NO: 24572 - RNA, 1665 nt, Artificial Sequence
  mRNA product Design i-3 (A100) comprising derived and/or modified sequence from LASV(G1442-SLE-2011;Clade IV)__AIT17180__GPCmut2 (opt1)
aggagaaagcuuaccaugggccagaucgugaccuucuuccaggaggucccccacgugaucgaggaggugaugaacaucguccugaucgcccucagcauccuggccgugcugaaggggcucuacaacguggcgaccugcggccugaucgggcuggucacguuccuccugcugugcggccgcuccugcaccaccacccucuacaaggggguguacgagcugcagacgcuggagcucaacauggagacccugaacaugugcaugccgcugagcugcaccaagaacaacucccaccacuacauccgggugggcaacgagaccggccucgagcugacgcugaccaacaccagcaucaucaaccacaaguucugcaaccucuccgacgcccacaagaagaaccuguacgaccacgcccugaugagcaucaucuccaccuuccaccucagcauccccaacuucaaccaguacgaggccauguccugcgacuucaacgggggcaagaucagcguccaguacaaccugucccacagcuacgccggggacgcggccaaccacugcggcacgguggccaacggggugcugcagaccuucaugcgcauggccuggggcggcuccuacaucgcgcucgacagcgggcggggcaacugggacugcaucaugaccuccuaccaguaccugaucauccagaacaccacgugggacgaccacugccaguucagccgccccucccccaucggguaccugggccuccugagccagcggacccgcgacgucuacaucucccggcgccggcgcggcaccuucaccuggacgcugagcgacagcgaggggaaggacaccccgggcggguacugccucacccgguggaugcugaucgaggccgagcugaagugcuucggcaacaccgccguggccaagugcaacgagaagcacgacgaggaguucugcgacaugcuccgccuguucgacuucugcaagcaggccauccagcggcugaaggcgcccgcccagauguccauccagcucaucaacaaggccgugaacgcccugaucaacgaccagcugaucaugaagaaccaccuccgcgacaucauggggauccccuacugcaacuacagcaaguacugguaccugaacaacacggccaccggcaagaccucccugcccaagugcuggcucaucagcaacggcuccuaccugaacgagacccacuucagcgacgacaucgagcaggaggcggacaacaugaucacggagaugcugcagaaggaguacauggagcggcaggggaagaccccgcucggccuggucgaccuguucguguucuccaccagcuucuaccugaucuccaucuuccuccaccuggugaagauccccacccaccgccacaucgucggcaagagcugccccaagccccaccggcugaaccacauggggaucugcuccugcgggcucuacaagcagccgggcgugcccgugcgcuggaagcggugaggacuaguuauaagacugacuagcccgaugggccucccaacgggcccuccuccccuccuugcaccgagauuaauaaaaaaaaaaaaaaaaaaaaaaaaaaaaaaaaaaaaaaaaaaaaaaaaaaaaaaaaaaaaaaaaaaaaaaaaaaaaaaaaaaaaaaaaaaaaaaaaaaaa

SEQ ID NO: 24573 - RNA, 1665 nt, Artificial Sequence
  mRNA product Design i-3 (A100) comprising derived and/or modified sequence from LASV(G3010-SLE-2013;Clade IV)__AIT17344__GPCmut2 (opt1)
aggagaaagcuuaccaugggccagaucgugaccuucuuccaggaggucccccacgugaucgaggaggugaugaacaucguccugaucgcccucagcauccuggccgugcugaaggggcucuacaacuucgcgaccugcggccugguggggcuggucacguuccuccugcugugcggccgcuccugcaccaccagccucuacaaggggguguacgagcugcagacccuggagcucaacauggagacgcugaacaugugcaugccgcuguccugcaccaagaacaacagccaccacuacaucauggugggcaacgagaccggccucgagcugacccugacgaacaccuccaucaucaaccacaaguucugcaaccucagcgacgcccacaagaagaaccuguacaaccacgcccugauguccaucaucagcaccuuccaccucuccauccccaacuucaaccaguacgaggccaugagcugcgacuucaacgggggcaagaucuccguccaguacaaccugagccacuccuacgccggggacgcggccagccacugcggcaccguggccaacggggugcugcagacguucaugcggauggccuggggcggcuccuacaucgcgcucgacagcggguacggcaagugggacugcaucaugaccuccuaccaguaccugaucauccagaacaccaccugggaggaccacugccaguucagccgccccucccccaucggguaccugggccuccugagccagcggacgcgcgacaucuacaucagccggcgccggcgcggcaccuucaccuggacccuguccgacagcgaggggaaggacacgccgggcggguacugccucacccgguggaugcugaucgaggccgagcugaagugcuucggcaacaccgccgucgccaagugcaacgagaagcacgacgaggaguucugcgacaugcuccgccuguucgacuucugcaagcaggccauccagcggcugaagacccccgcgcagauguccauccagcucaucaacaaggccgugaacgcccugaucaacgaccagcugaucaugaagaaccaccuccgcgacaucauggggauccccuacugcaacuacagcaaguacugguaccugaaccacacgaccaccggcaagaccucccugcccaagugcuggcucgugagcaacggcuccuaccugaacgagacgcacuucagcgacgacaucgagcagcaggccgacaacaugaucaccgagaugcugcagaaggaguacauggagcggcaggggaagaccccgcucggccuggucgaccuguucguguucuccaccagcuucuaccugaucuccaucuuccuccaccuggugaagauccccacgcaccgccacaucgucggcaagagcugccccaagccccaccggcugaaccacauggggaucugcuccugcgggcucuacaagcagccgggcgugcccgugcgcuggaagcggugaggacuaguuauaagacugacuagcccgaugggccucccaacgggcccuccuccccuccuugcaccgagauuaauaaaaaaaaaaaaaaaaaaaaaaaaaaaaaaaaaaaaaaaaaaaaaaaaaaaaaaaaaaaaaaaaaaaaaaaaaaaaaaaaaaaaaaaaaaaaaaaaaaaa

SEQ ID NO: 24574 - RNA, 1665 nt, Artificial Sequence
  mRNA product Design i-3 (A100) comprising derived and/or modified sequence from LASV(G502-SLE-2009;Clade IV)__AIT17126__GPCmut2 (opt1)
aggagaaagcuuaccaugggccagaucgugaccuucuuccaggaggucccccacgugaucgaggaggugaugaacaucguccugaucgcccucagcauccuggccgugcugaaggggcucuacaacuucgcgaccugcggccugguggggcugcucacguuccugcugcucugcggccgcuccugcaccaccgggcuguacaagggcgucuacgagcugcagacccucgagcugaacauggagacgcugaacaugugcaugccgcucagcugcaccaagaacaacucccaccacuacaucauggugggcaacgagaccgggcuggagcugacccucacgaacaccagcaucaucaaccacaaguucugcaaccuguccgacgcccacaagaagaaccuguacgaccacgcccucaugagcaucaucuccaccuuccaccugagcauccccaacuucaaccaguacgaggccauguccugcgacuucaacggcgggaagaucagcgugcaguacaaccugucccacagcuacgccggcgacgcggccgaccacugcgggaccgucgccaacggcgugcuccagacguucaugcggauggccuggggcggguccuacaucgcgcuggacagcggccgcgggcggugggacugcaucaugaccuccuaccaguaccugaucauccagaacaccaccugggaggaccacugccaguucagccgccccucccccaucggcuaccucggccugcugagccagcggacgcgcgacaucuacaucucccggcgccggcgcgggaccuucaccuggacccucagcgacagcgagggcaaggacacgcccgggggcuacugccugacccgguggaugcugaucgaggccgagcucaagugcuucgggaacaccgccguggccaagugcaacgagaagcacgacgaggaguucugcgacaugcugcgccuguucgacuucugcaagcaggccauccagcggcucaaggcgccggcccagauguccauccagcugaucaacaaggccgucaacgcccugaucaacgaccagcucgugaugaagaaccaccuccgcgacaucaugggcauccccuacugcaacuacagccgguacugguaccugaaccacaccacgaccggccgcaccucccugcccaagugcuggcuggugagcaacggguccuaccugaacgagacccacuucagcgacgacaucgagcagcaggccgacaacaugaucacggagaugcuccagaaggaguacauggagcggcagggcaagaccccgcuggggcuggucgaccuguucguguucuccaccagcuucuaccucaucuccaucuuccugcaccuggugaagauccccacccaccgccacaucgucggcaagagcugccccaagccccaccggcucaaccacauggggaucugcuccugcggccuguacaagcagccgggcgugcccgugaaguggaagcgcugaggacuaguuauaagacugacuagcccgaugggccucccaacgggcccuccuccccuccuugcaccgagauuaauaaaaaaaaaaaaaaaaaaaaaaaaaaaaaaaaaaaaaaaaaaaaaaaaaaaaaaaaaaaaaaaaaaaaaaaaaaaaaaaaaaaaaaaaaaaaaaaaaaaa

SEQ ID NO: 24575 - RNA, 1665 nt, Artificial Sequence
  mRNA product Design i-3 (A100) comprising derived and/or modified sequence from LASV(G733-SLE-2010;Clade IV)__AIT17154__GPCmut2 (opt1)
aggagaaagcuuaccaugggccagaucgugaccuucuuccaggaggucccccacgugaucgaggaggugaugaacaucguccugaucgcccucagcauccuggccgugcugaaggggcucuacaacuucgcgaccugcggcaucguggggcuggucuccuuccugcuccugugcggccgcagcugcacgaccucccuguacaaggggguguacgagcuccagacccuggagcugaacauggagacccucaacaugugcaugccgcugagcugcacgaagaacaacucccaccacuacaucauggugggcaacgagaccggccuggagcucacccugaccaacacgagcaucaucaaccacaaguucugcaaccuguccgacgcccacaagaagaaccucuacgaccacgcccugaugagcaucaucuccaccuuccaccugagcauccccaacuucaaccaguacgaggccauguccugcgacuucaacgggggcaagaucagcguccaguacaaccucucccacagcuacgccggggacgcggccaaccacugcggcaccaucgccaacggggugcugcagaccuucaugcggauggccuggggcggcuccuacaucgcgcuggacagcgggcgcgaccggugggacugcaucaugacguccuaccaguaccucaucauccagaacaccaccugggaggaccacugccaguucagccgccccucccccaucggcuaccuggggcugcucagccagcggacccgcgacaucuacaucagccggcgccggcgcggcacguucaccuggacccuguccgacagcgagggcaaggacacccccgggggcuacugccugacgcgguggaugcucaucgaggccgagcugaagugcuucgggaacaccgccguggccaagugcaacgagaagcacgacgaggaguucugcgacaugcugcgccucuucgacuucugcaagcaggccauccagcggcugaaggcgccggcccagauguccauccagcugaucaacaaggccgucaacgcccucaucaacgaccagcugaucaugaagaaccaccuccgcgacaucaugggcauccccuacugcaacuacagcaaguacugguaccugaaccacaccaccacggggaagaccucccugcccaagugcuggcuggugagcaacggcuccuaccucaacgagacccacuucagcgacgacaucgagcagcaggccgacaacaugaucaccgagaugcugcagaaggaguacauggagcggcagggcaagacgccgcuggggcucguggaccuguucgucuucuccaccagcuucuaccugaucuccaucuuccugcaccucgugaagauccccacccaccgccacguggucggcaagagcugccccaagccccaccggcugaaccacauggggaucugcuccugcggccuguacgggcagccgggcgugcccgugaaguggaagcgcugaggacuaguuauaagacugacuagcccgaugggccucccaacgggcccuccuccccuccuugcaccgagauuaauaaaaaaaaaaaaaaaaaaaaaaaaaaaaaaaaaaaaaaaaaaaaaaaaaaaaaaaaaaaaaaaaaaaaaaaaaaaaaaaaaaaaaaaaaaaaaaaaaaaa

SEQ ID NO: 24576 - RNA, 1665 nt, Artificial Sequence
  mRNA product Design i-3 (A100) comprising derived and/or modified sequence from MOPV/LASV reassortant(IGS-1;Clade IV)__AFY05576__GPCmut2 (opt1)
aggagaaagcuuaccaugggccagaucgugaccuucuuccaggaggucccccacgugaucgaggaggugaugaacaucguccugaucgcccucagcgugcuggccgugcugaaggggcucuacaacuucgcgaccugcggccuggucgggcuggugacguuccuccugcugugcggccgcuccugcaccaccagccucuacaaggggguguacgagcugcagacccuggagcucaacauggagacgcugaacaugugcaugccgcuguccugcaccaagaacaacagccaccacuacaucauggucggcaacgagaccggccucgagcugacccugacgaacaccuccaucaucaaccacaaguucugcaaccucagcgacgcccacaagaagaaccuguacgaccacgcccugauguccaucaucagcaccuuccaccucuccauccccaacuucaaccaguacgaggccaugagcugcgacuucaacgggggcaagaucuccgugcaguacaaccugagccacuccuacgccggggacgcggccaaccacugcggcaccguggccaacgggguccugcagacguucaugcggauggccuggggcggcagcuacaucgcgcucgacuccgggcgcggcaacugggacugcaucaugaccagcuaccaguaccugaucauccagaacaccaccugggaggaccacugccaguucucccggcccagccccaucggguaccugggccuccugucccagcgcacgcgggacaucuacaucagccgccggcgccggggcaccuucaccuggacccugagcgacuccgagggggaggacacgccgggcggguacugccucacccgcuggaugcugaucgaggccgagcugaagugcuucggcaacaccgccguggccaagugcaacgagaagcacgacgaggaguucugcgacaugcuccggcuguucgacuucugcaagcaggccauccagcgccugaaggcgcccgcccagaugagcauccagcucaucaacaaggccgugaacgcccugaucaacgaccagcugaucaugaagaaccaccuccgggacaucauggggauccccuacugcaacuacuccaaguacugguaccugaaccacaccacgaccggccgcaccagccugcccaagugcuggcucgucuccaacggcagcuaccugaacgagacccacuucuccgacgacaucgagcagcaggccgacaacaugaucacggagaugcugcagaaggaguacauggagcggcaggggaagaccccgcucggccugguggaccuguucguguucagcaccuccuucuaccugaucagcaucuuccuccaccuggucaagauccccacccaccgccacaucguggggaaguccugccccaagccccaccggcugaaccacaugggcaucugcagcugcgggcucuacaagcagccgggcgugcccgucaaguggaagcgcugaggacuaguuauaagacugacuagcccgaugggccucccaacgggcccuccuccccuccuugcaccgagauuaauaaaaaaaaaaaaaaaaaaaaaaaaaaaaaaaaaaaaaaaaaaaaaaaaaaaaaaaaaaaaaaaaaaaaaaaaaaaaaaaaaaaaaaaaaaaaaaaaaaaa

SEQ ID NO: 24577 - RNA, 1665 nt, Artificial Sequence
  mRNA product Design i-3 (A100) comprising derived and/or modified sequence from LASV(LM765-SLE-2012;Clade IV)__AIT17814__GPCmut2 (opt1)
aggagaaagcuuaccaugggccagaucgugaccuucuuccaggaggucccccacgugaucgaggaggugaugaacaucguccugaucgcccucagcauccuggccgugcugaaggggcucuacaacuucgcgaccugcggccugguggggcuggucacguuccuccugcugugcggccgcuccugcaccaccagccucuacaaggggguguacgagcugcagacccuggagcucaacauggagacgcugaacaugugcaugccgcuguccugcaccaagaacaacagccaccacuacaucauggugggcaacgagaccggccucgagcugacccugacgaacaccuccaucaucgaccacaaguucugcaaccucagcgacgcccaccggaagaaccuguacgaccacgcccugauguccaucaucagcaccuuccaccucuccauccccaacuucaaccaguacgaggccaugagcugcgacuucaacgggggcaagaucuccguccaguacaaccugagccacuccuacgccaaggacgcggccgaccacugcgggaccguggccaacggcgugcugcagacguucaugcgcauggccuggggcgggagcuacaucgcgcucgacuccggccgggggcgcugggacugcaucaugaccagcuaccaguaccugaucauccagaacaccaccugggaggaccacugccaguucucccggcccagccccaucggcuaccuggggcuccugucccagcgcacgcgggacaucuacaucagccgccggcgccggggcaccuucaccuggacccugagcgacuccgagggcaaggacacgcccgggggcuacugccucacccgcuggaugcugaucgaggccgagcugaagugcuucgggaacaccgccgucgccaagugcaacgagaagcacgacgaggaguucugcgacaugcuccggcuguucgacuucugcaagcaggccauccagcgccugaaggcgccggcccagaugagcauccagcucaucaacaaggccgugaacgcccugaucaacgaccagcugaucaugaagaaccaccuccgggacaucaugggcauccccuacugcaacuacuccaaguacugguaccugaaccacaccacgaccgggaagaccagccugcccaagugcuggcucguguccaacggcagcuaccugaacgagacccacuucuccgacgacaucgagcagcaggccgacaacaugaucacggagaugcugcagaaggaguacauggagcgccagggcaagaccccgcucgggcuggucgaccuguucguguucagcaccuccuucuaccugaucagcaucuuccuccaccuggugaagauccccacccaccggcacaucgucggcaagcccugccccaagccgcaccgccugaaccacauggggaucugcuccugcggccucuacaagcagcccggggugcccgugaaguggaagcggugaggacuaguuauaagacugacuagcccgaugggccucccaacgggcccuccuccccuccuugcaccgagauuaauaaaaaaaaaaaaaaaaaaaaaaaaaaaaaaaaaaaaaaaaaaaaaaaaaaaaaaaaaaaaaaaaaaaaaaaaaaaaaaaaaaaaaaaaaaaaaaaaaaaa

SEQ ID NO: 24578 - RNA, 1665 nt, Artificial Sequence
  mRNA product Design i-3 (A100) comprising derived and/or modified sequence from LASV(LM776-SLE-2012;Clade IV)__AIT17824__GPCmut2 (opt1)
aggagaaagcuuaccaugggccagaucgugaccuucuuccaggaggucccccacgugaucgaggaggugaugaacaucguccugaucgcccucagcauccuggccgugcugaaggggcucuacaacuucgcgaccugcggccugguggggcuggucacguuccuccugcugugcggccgcuccugcaccaccagcguguacaaggggguguacgagcuccagacccuggagcugaacauggagacgcucaacaugugcaugccgcuguccugcaccaagaacaacagccaccacuacaucauggucggcaacgagaccggccuggagcucacccugacgaacaccuccaucaucaaccacaaguucugcaaccugagcgacgcccacaagaagaaccucuacgaccacgcccugauguccaucaucagcaccuuccaccuguccauccccaacuucaaccaguacgaggccaugagcugcgacuucaacgggggcaagaucuccgugcaguacaaccucagccacuccuacgccggggacgcggccaaccacugcggcaccguggccaacgggguccugcagacguucaugcggauggccuggggcggcagcuacaucgcgcuggacuccgggcacggcaagugggacugcaucaugaccagcuaccaguaccucaucauccagaacaccaccugggaggaccacugccaguucucccgccccagccccaucggguaccugggccugcucucccagcggacgcgcgacaucuacaucagccggcgccggcgcggcaccuucaccuggacccugagcgacuccgaggggaaggacacgccgggcggguacugccugacccgguggaugcucaucgaggccgagcugaagugcuucggcaacaccgccguggccaagugcaacgagaagcacgacgaggaguucugcgacaugcugcgccucuucgacuucugcaagcaggccauccagcggcugaaggcgcccgcccagaugagcauccagcugaucaacaaggccgugaacgcccucaucaacgaccagcugaucaugaagaaccaccuccgcgacaucauggggauccccuacugcaacuacuccaaguacugguaccugaaccacaccacgaccggcaagaccagccugcccaagugcuggcuggucuccaacggcagcuaccucaacgagacccacuucuccgacgacaucgagcagcaggccgacaacaugaucacggagaugcugcagaaggaguacauggagcggcaggggaagaccccgcugggccucguggaccuguucguguucagcaccuccuucuaccugaucagcaucuuccugcaccucgucaagauccccacccaccgccacaucguggggaaguccugccccaagccccaccggcugaaccacaugggcaucugcagcugcgggcuguacaagcagccgggcgugcccguccgcuggaagcggugaggacuaguuauaagacugacuagcccgaugggccucccaacgggcccuccuccccuccuugcaccgagauuaauaaaaaaaaaaaaaaaaaaaaaaaaaaaaaaaaaaaaaaaaaaaaaaaaaaaaaaaaaaaaaaaaaaaaaaaaaaaaaaaaaaaaaaaaaaaaaaaaaaaa

SEQ ID NO: 24579 - RNA, 1665 nt, Artificial Sequence
  mRNA product Design i-3 (A100) comprising derived and/or modified sequence from LASV(Mad39;Clade IV)__ANH09722__GPCmut2 (opt1)
aggagaaagcuuaccaugggccagaucgugaccuucuuccaggaggucccccacgugaucgaggaggugaugaacaucguccugaucgcccucagcauccuggccgugcugaaggggcucuacaacguggcgaccugcggccugaucgggcuggucacguuccuccugcugugcggccgcuccugcaccaccacccucuacaaggggguguacgagcugcaggcccuggagcucaacauggagacgcugaacaugugcaugccgcugagcugcaccaagaacaacucccaccacuacauccgggugggcaacgagaccggccucgagcugacccugacgaacaccagccucaucaaccacaaguucugcaaccuguccgacgcccacaagaagaaccuguacgaccacgcccucaugagcaucaucuccaccuuccaccugagcauccccaacuucaaccaguacgaggccauguccugcgacuucaacgacgggaagaucagcguccaguacaaccugucccacaccuacgcgggcgacacggccaaccacugcgggaccguggccaacggcgugcuccagaccuucaugcgcauggccuggggcgggagcuacaucgcgcuggacuccggccgcgggggcugggacugcaucaugaccagcuaccaguaccugaucauccagaacacgaccugggaggaccacugccaguucucccggcccagccccaucggguaccucggccugcugucccagcggacccgcgacaucuacaucagccggcgccggcgcggcaccuucacguggacccucuccgacagcgaggggaaggacaccccgggcggguacugccugacccgguggaugcugaucgaggccgagcucaagugcuucggcaacacggccgucgccaagugcaacgagaagcacgacgaggaguucugcgacaugcugcgccuguucgacuucugcaagcaggccauccagcggcucaaggcgcccgcccagaugagcauccagcugaucaacaaggccgugaacgcccugaucaacgaccagcucaucaugaagaaccaccuccgcgacaucauggggauccccuacugcaacuacuccaaguacugguaccugaaccacaccgugaccggcaagaccagccugcccaagugcuggcuggucuccaacggcagcuaccugaacgagacgcacuucuccgacgacaucgagcagcaggccgacaacaugaucaccgagaugcuccagaaggaguacauggagcggcaggggaagaccccgcugggccugguggaccuguucguguucagcaccuccuucuaccucaucagcaucuuccugcaccuggucaagauccccacgcaccgccacgugguggggaagcccugccccaagccgcaccggcucaaccacaugggcaucugcuccugcggguucuacaagcagcccggcguccccgugcgcuggaagcggugaggacuaguuauaagacugacuagcccgaugggccucccaacgggcccuccuccccuccuugcaccgagauuaauaaaaaaaaaaaaaaaaaaaaaaaaaaaaaaaaaaaaaaaaaaaaaaaaaaaaaaaaaaaaaaaaaaaaaaaaaaaaaaaaaaaaaaaaaaaaaaaaaaaa

SEQ ID NO: 24580 - RNA, 1665 nt, Artificial Sequence
  mRNA product Design i-3 (A100) comprising derived and/or modified sequence from LASV(Z0947-SLE-2011;Clade IV)__AIT17840__GPCmut2 (opt1)
aggagaaagcuuaccaugggccagaucgugaccuucuuccaggaggucccccacgugaucgaggaggugaugaacaucguccugaucgcccucagcauccuggccgugcugaaggggcucuacaacuucgcgaccugcggccugguggggcuggucacguuccuccugcugugcggccgcuccugcaccaucagccucuacaaggggguguacgagcugcagacccuggagcucaacauggagacccugaacaugugcaugccgcuguccugcacgaagaacaacagccaccacuacaucauggugggcaacgagaccggccucgagcugacccugaccaacacguccaucaucaaccacaaguucugcaaccucagcgacgcccacaagaagaaccuguacgaccacgcccugauguccaucaucagcaccuuccaccucuccauccccaacuucaaccaguacgaggccaugagcugcgacuucaacgggggcaagaucuccguccaguacaaccugagccacuccuacgccggggacgcggccaaccacugcggcaccguggccaacggggugcugcagaccuucaugcggauggccuggggcggcagcuacaucgcgcucgacuccgggcgcgaccggugggacugcaucaugacgagcuaccaguaccugaucauccagaacaccaccugggaggaccacugccaguucucccgccccagccccaucggcuaccuggggcuccugucccagcggacccgcgacaucuacaucagccggcgccggcgcggcacguucaccuggacccugagcgacuccgagggcaaggacacccccgggggcuacugccucacgcgguggaugcugaucgaggccgagcugaagugcuucgggaacaccgccgucgccaagugcaacgagaagcacgacgaggaguucugcgacaugcuccgccuguucgacuucugcaagcaggccauccagcggcugaaggcgccggcccagaugagcauccagcucaucaacaaggccgugaacgcccugaucaacgaccagcugaucaugaagaaccaccuccgcgacaucaugggcauccccuacugcaacuacuccaaguacugguaccugaaccacaccaccacggggaagaccagccugcccaagugcuggcucguguccaacggcagcuaccugaacgagacccacuucuccgacgacaucgagcagcaggccgacaacaugaucaccgagaugcugcagaaggaguacauggagcggcagggcaagacgccgcucgggcuggucgaccuguucguguucagcaccuccuucuaccugaucagcaucuuccuccaccuggugaagauccccacccaccgccacaucgucggcaagcccugccccaagccgcaccggcugaaccacauggggaucugcuccugcggccucuacaagcagcccggggugcccgugaaguggaagcgcugaggacuaguuauaagacugacuagcccgaugggccucccaacgggcccuccuccccuccuugcaccgagauuaauaaaaaaaaaaaaaaaaaaaaaaaaaaaaaaaaaaaaaaaaaaaaaaaaaaaaaaaaaaaaaaaaaaaaaaaaaaaaaaaaaaaaaaaaaaaaaaaaaaaa

SEQ ID NO: 24581 - RNA, 1665 nt, Artificial Sequence
  mRNA product Design i-3 (A100) comprising derived and/or modified sequence from LASV(Josiah;Clade IV)__NP_694870__GPCmut2 (opt4)
aggagaaagcuuaccaugggccagaucgugaccuucuuccaggaggugccccacgugaucgaggaggugaugaacaucgugcugaucgcccugagcgugcuggccgugcugaagggccuguacaacuucgccaccugcggccuggugggccuggugaccuuccugcugcugugcggcagaagcugcaccaccagccuguacaagggcguguacgagcugcagacccuggagcugaacauggagacccugaacaugugcaugccccugagcugcaccaagaacaacagccaccacuacaucauggugggcaacgagaccggccuggagcugacccugaccaacaccagcaucaucaaccacaaguucugcaaccugagcgacgcccacaagaagaaccuguacgaccacgcccugaugagcaucaucagcaccuuccaccugagcauccccaacuucaaccaguacgaggccaugagcugcgacuucaacggcggcaagaucagcgugcaguacaaccugagccacagcuacgccggcgacgccgccaaccacugcggcaccguggccaacggcgugcugcagaccuucaugagaauggccuggggcggcagcuacaucgcccuggacagcggcagaggcaacugggacugcaucaugaccagcuaccaguaccugaucauccagaacaccaccugggaggaccacugccaguucagcagacccagccccaucggcuaccugggccugcugagccagagaaccagagacaucuacaucagcagaagaagaagaggcaccuucaccuggacccugagcgacagcgagggcaaggacacccccggcggcuacugccugaccagauggaugcugaucgaggccgagcugaagugcuucggcaacaccgccguggccaagugcaacgagaagcacgacgaggaguucugcgacaugcugagacuguucgacuucugcaagcaggccauccagagacugaaggcccccgcccagaugagcauccagcugaucaacaaggccgugaacgcccugaucaacgaccagcugaucaugaagaaccaccugagagacaucaugggcauccccuacugcaacuacagcaaguacugguaccugaaccacaccaccaccggcagaaccagccugcccaagugcuggcuggugagcaacggcagcuaccugaacgagacccacuucagcgacgacaucgagcagcaggccgacaacaugaucaccgagaugcugcagaaggaguacauggagagacagggcaagaccccccugggccugguggaccuguucguguucagcaccagcuucuaccugaucagcaucuuccugcaccuggugaagauccccacccacagacacaucgugggcaagagcugccccaagccccacagacugaaccacaugggcaucugcagcugcggccuguacaagcagcccggcgugcccgugaaguggaagagaugaggacuaguuauaagacugacuagcccgaugggccucccaacgggcccuccuccccuccuugcaccgagauuaauaaaaaaaaaaaaaaaaaaaaaaaaaaaaaaaaaaaaaaaaaaaaaaaaaaaaaaaaaaaaaaaaaaaaaaaaaaaaaaaaaaaaaaaaaaaaaaaaaaaa

SEQ ID NO: 24582 - RNA, 1662 nt, Artificial Sequence
  mRNA product Design i-3 (A100) comprising derived and/or modified sequence from LASV(LP;Clade I)__AAF86701__GPCmut2 (opt4)
aggagaaagcuuaccaugggccagaucaucaccuucuuccaggaggugccccacgugaucgaggaggugaugaacaucgugcugaucgcccugagccugcuggccauccugaagggccuguacaacaucgccaccugcggcaucaucggccugguggccuuccuguuccugugcggcaagagcugcagccugacccugaagggcggcuacgagcugcagacccuggagcugaacauggagacccugaacaugugcaugccccugagcugcaccaagaacagcagccaccacuacaucagagugggcaacgagaccggccuggagcugacccugaccaacaccagcaucaucaaccacaaguucugcaaccugagcgacgcccacaagaagaaccuguacgaccacgcccugaugagcaucaucagcaccuuccaccugagcauccccaacuucaaccaguacgaggccaugagcugcgacuucaacggcggcaagaucagcgugcaguacaaccugagccacagcuacgccggcgacgccgccgagcacugcggcaccguggccaacggcgugcugcagaccuucaugagaauggccuggggcggcagauacaucgcccuggacagcggcaagggcaacugggacugcaucaugaccagcuaccaguaccugaucauccagaacaccaccugggaggaccacugccaguucagcagacccagccccaucggcuaccugggccugcugagccagagaaccagagacaucuacaucagcagaagaagaagaggcaccuucaccuggacccugagcgacagcgagggcaacgagacccccggcggcuacugccugaccagauggaugcugaucgaggccgagcugaagugcuucggcaacaccgccguggccaagugcaacgagaagcacgacgaggaguucugcgacaugcugagacuguucgacuucugcaagcaggccaucagaagacugaaggcccccgcccagaugagcauccagcugaucaacaaggccgugaacgcccugaucaacgaccagcugaucaugaagaaccaccugagagacaucaugggcauccccuacugcaacuacagcaaguacugguaccugaaccacaccagcagcggcagaaccagccugcccaagugcuggcugaucagcaacggcagcuaccugaacgagacccaguucagcgacgacaucgagcagcaggccgacaacaugaucaccgagaugcugcagaaggaguacaucgagagacagggcaagaccccccugggccugguggacaucuucaucuucagcaccagcuucuaccugaucagcaucuuccugcaccugaucaagauccccacccacagacacaucgugggcaagcccugccccaagccccacagacugaaccacaugggcgugugcagcugcggccuguacaagcaccccggcgugcccaccaaguggaagagaugaggacuaguuauaagacugacuagcccgaugggccucccaacgggcccuccuccccuccuugcaccgagauuaauaaaaaaaaaaaaaaaaaaaaaaaaaaaaaaaaaaaaaaaaaaaaaaaaaaaaaaaaaaaaaaaaaaaaaaaaaaaaaaaaaaaaaaaaaaaaaaaaaaaa

SEQ ID NO: 24583 - RNA, 1662 nt, Artificial Sequence
  mRNA product Design i-3 (A100) comprising derived and/or modified sequence from LASV(803213;Clade II)__AAF86703__GPCmut2 (opt4)
aggagaaagcuuaccaugggccagaucaucaccuucuuccaggaggugccccacgugaucgaggaggugaugaacaucgugcugaucgcccugagccugcuggccauccugaagggcaucuacaacguggccaccugcggccuguucggccugaucagcuuccugcugcugugcggcagaagcugcagcgugaccuacaagggcguguacgagcugcagacccuggagcugaacauggccaaccugaacaugugcaugccccugagcugcaccaagaacaacagccaccacuacaucauggugggcaacgagaccggccuggagcugacccugaccaacaccagcaucaucaaccacaaguucugcaaccugagcgacgcccacaagaagaaccuguacgaccacgcccugaugagcaucaucagcaccuuccaccugagcauccccaacuucaaccaguacgaggccaugagcugcgacuucaacggcggcaagaucagcgugcaguacaaccugagccacagcuucgccguggacgccgccaaccacugcggcaccaucgccaacggcgugcugcagaccuucaugagaauggccuggggcggcagcuacaucgcccuggacagcggcaagggcaacugggacugcaucaugaccagcuaccaguaccugaucauccagaacaccaccugggaggaccacugccaguucagcagacccagccccaucggcuaccugggccugcugagccagagaaccagagacaucuacaucagcagaagaagaagaggcaccuucaccuggacccugagcgacagcgagggcaacgaggcccccggcggcuacugccugaccagauggaugcugaucgaggccgagcugaagugcuucggcaacaccgccguggccaagugcaacgagaagcacgacgaggaguucugcgacaugcugagacuguucgacuucugcaagcaggccaucaagagacugaagacccccgcccagaugagcauccagcugaucaacaaggccgugaacgcccugaucaacgaccagcugaucaugaagaaccaccugagagacaucaugggcauccccuacugcaacuacagcagauacugguaccugaaccacaccgugaccggcaagaccagccugcccagaugcuggcuggugagcaacggcagcuaccugaacgagacccacuucagcgacgacaucgagcagcaggccgacaacaugaucaccgagaugcugcagaaggaguacauggacagacagggcaagaccccccugggccugguggaccuguucguguucagcaccagcuucuaccugaucagcaucuuccugcaccuggugaagauccccacccacagacacaucgugggcaagcccugccccaagccccacagacugaaccacaugggcaucugcagcugcggccuguacaagcaccccggcgugcccgugaaguggaagagaugaggacuaguuauaagacugacuagcccgaugggccucccaacgggcccuccuccccuccuugcaccgagauuaauaaaaaaaaaaaaaaaaaaaaaaaaaaaaaaaaaaaaaaaaaaaaaaaaaaaaaaaaaaaaaaaaaaaaaaaaaaaaaaaaaaaaaaaaaaaaaaaaaaaa

SEQ ID NO: 24584 - RNA, 1662 nt, Artificial Sequence
  mRNA product Design i-3 (A100) comprising derived and/or modified sequence from LASV(GA391;Clade III)__CAA36645__GPCmut2 (opt4)
aggagaaagcuuaccaugggccagaucgugaccuucuuccaggaggugccccacgugaucgaggaggugaugaacaucgugcugaucgcccugagcauccuggccauccugaagggccuguacaacguggccaccugcggccugaucggccuggugaccuuccugcugcugagcggcagaagcugcagccugaucuacaagggcaccuacgagcugcagacccuggagcugaacauggagacccugaacaugugcaugccccugagcugcaccaagaacaacagccaccacuacaucagagugggcaacgagaccggccuggagcugacccugaccaacaccagcauccugaaccacaaguucugcaaccugagcgacgcccacaagagaaaccuguacgaccacagccugaugagcaucaucagcaccuuccaccugagcauccccaacuucaaccaguacgaggccaugagcugcgacuucaacggcggcaagaucaccgugcaguacaaccugagccacagcuucgccguggacgccgccggccacugcggcacccuggccaacggcgugcugcagaccuucaugagaauggccuggggcggcagcuacaucgcccuggacagcggcagaggcaacugggacugcaucaugaccagcuaccaguaccugaucauccagaacaccaccugggacgaccacugccaguucagcagacccagccccaucggcuaccugggccugcugagccagagaaccagagacaucuacaucagcagaagaagaagaggcaccuucaccuggacccugagcgacagcgagggcaacgagacccccggcggcuacugccugaccagauggaugcugaucgaggccgagcugaagugcuucggcaacaccgccguggccaagugcaacgagaagcacgacgaggaguucugcgacaugcugagacuguucgacuucugcaagcaggccaucagaagacugaagacccccgcccagaugagcauccagcugaucaacaaggccgugaacgcccugaucaacgaccagcugaucaugaagaaccaccugagagacaucaugggcauccccuacugcaacuacagcagauacugguaccugaaccacaccagcaccggcaagaccagccugcccagaugcuggcugaucagcaacggcagcuaccugaacgagaccaaguucagcgacgacaucgagcagcaggccgacaacaugaucaccgagaugcugcagaaggaguacaucgacagacagggcaagaccccccugggccugguggaccuguucguguucagcaccagcuucuaccugaucagcaucuuccugcaccuggugaagauccccacccacagacacaucgugggcaagcccugccccaagccccacagacugaaccacaugggcaucugcagcugcggccuguacaagcagcccggcgugcccgugagauggaagagaugaggacuaguuauaagacugacuagcccgaugggccucccaacgggcccuccuccccuccuugcaccgagauuaauaaaaaaaaaaaaaaaaaaaaaaaaaaaaaaaaaaaaaaaaaaaaaaaaaaaaaaaaaaaaaaaaaaaaaaaaaaaaaaaaaaaaaaaaaaaaaaaaaaaa

SEQ ID NO: 24585 - RNA, 1665 nt, Artificial Sequence
  mRNA product Design i-3 (A100) comprising derived and/or modified sequence from LASV(AV;Clade V)__CCA30314__GPCmut2 (opt4)
aggagaaagcuuaccaugggccagaucgugaccuucuuccaggaggugccccacgugaucgaggaggugaugaacaucgugcugaucgcccugagcauccuggccgugcugaagggccuguacaacaucgccaccugcggccugaucggccugaucaccuuccugcugcugugcggcagaagcugcagcagcaaccuguacaagggcguguacgagcugcagagccuggaccugaacauggagacccugaacaugugcaugccccugagcugcaccaagaacaacagccaccacuacaucagagugggcaacgacaccggccuggagcugacccugaccaacaccagcauccugaaccacaaguucugcaaccugagcgacgcccacaagaaggaccuguacgaccacgcccugaugagcaucaucagcaccuuccaccugagcauccccaacuucaaccaguacgaggccaugagcugcgacuucaacggcggcaagaucagcgugcaguacaaccugagccacagcuacgccaucgacgccgccaaccacugcggcaccguggccaacggcauccugcagaccuucaugagaauggccuggggcggcagcuacaucgcccuggacagcggcagaggcaacugggacugcaucaugaccagcuaccaguaccugaucauccagaacaccaccugggagaaccacugccaguucagcagacccagccccaucggcuaccugggccugcugagccagagaaccagagacaucuacaucagcagaagaagaagaggcaccuucaccuggacccugagcgacagcgagggcaacgccacccccggcggcuacugccugaccagauggaugcugaucgaggccgagcugaagugcuucggcaacaccgccguggccaagugcaacgagaagcacgacgaggaguucugcgacaugcugagacuguucgacuucugcaagcaggccaucagcagacugaagagccccgcccagaugagcauccagcugaucaacaaggccgugaacgcccugaucaacgaccagcugaucaugaagaaccaccugagagacaucaugggcauccccuacugcaacuacagcaaguacugguaccugaaccacaccaucaccggcaagaccagccugcccaagugcuggcuggugagcaacggcagcuaccugaacgagacccacuucagcgacgacaucgagcagcaggccgacaacaugaucaccgagaugcugcagaaggaguacauggagagacagggcaagaccccccugggccugguggaccuguucguguucagcaccagcuucuaccugaucagcaucuuccugagacuggugaagauccccacccacagacacaucgugggcaagcccugccccaagccccacagacugaaccacaugggcaucugcagcugcggccuguacaagcagcccggcgugcccgugagauggaagagaugaggacuaguuauaagacugacuagcccgaugggccucccaacgggcccuccuccccuccuugcaccgagauuaauaaaaaaaaaaaaaaaaaaaaaaaaaaaaaaaaaaaaaaaaaaaaaaaaaaaaaaaaaaaaaaaaaaaaaaaaaaaaaaaaaaaaaaaaaaaaaaaaaaaa

SEQ ID NO: 24586 - RNA, 1662 nt, Artificial Sequence
  mRNA product Design i-3 (A100) comprising derived and/or modified sequence from LASV(Togo/2016/7082;Clade VI)__AMR44577__GPCmut2 (opt4)
aggagaaagcuuaccaugggccagaucaucaccuucuuccaggaggugccccacgugaucgaggaggugaugaacaucgugcugaucgcccugagccugcuggccauccugaagggcguguacaacguggccaccugcggcaucaucggccuggugaccuuccuguuccugugcggcagaagcugcagccugaucuacaagggcagcuacgagcugcagacccuggagcugaacauggagacccugaacaugugcaugccccugagcugcaccaagaacagcagccaccacuacaucagagugggcaacgagaccggccuggagcugacccugaccaacaccagcaucaucaaccacaaguucugcaaccugagcgacgcccacaagagaaaccuguacgaccacgcccugaugagcauccugagcaccuuccaccugagcauccccaacuucaaccaguacgaggccaugagcugcgacuucaacggcggcaagaucagcgugcaguacaaccugagccacgccuacgccguggacgccgccgagcacugcggcaccguggccaacggcgugcugcagaccuucaugagaauggccuggggcggcagcuacaucgcccuggacagcggcagaggcaacugggacugcaucaugaccagcuaccaguaccugaucauccagaacaccaccugggaggaccacugccaguucagcagacccagccccaucggcuaccugggccugcugagccagagaaccagagacaucuacaucagcagaagaagaagaggcaccuucaccuggacccugagcgacagcgagggcaacgagacccccggcggcuacugccugaccagauggaugcugaucgaggccgagcugaagugcuucggcaacaccgccguggccaagugcaacgagaagcacgacgaggaguucugcgacaugcugagacuguucgacuucugcaagcaggccauccagagacugaagagccccgcccagaugagcauccagcugaucaacaaggccgugaacgcccugaucaacgaccagcugaucaugaagaaccaccugagagacaugaugggcauccccuacugcaacuacagcaaguacugguaccugaaccacaccagcagcggcagaaccagccugcccaagugcuggcuggugagcaacggcagcuaccugaacgagacccacuucagcgacgacaucgagcagcaggccgacaacaugaucaccgagaugcugcagaaggaguacaucgacagacagggcaagaccccccugggccugguggaccuguucguguucagcaccagcuucuaccugaucagcaucuuccugcaccugaucaagauccccacccacagacacaucgugggcaagcccugccccaagccccacagacugaaccacaugggcaucugcagcugcggccuguacaagcagcccggcgugcccaccagauggaagagaugaggacuaguuauaagacugacuagcccgaugggccucccaacgggcccuccuccccuccuugcaccgagauuaauaaaaaaaaaaaaaaaaaaaaaaaaaaaaaaaaaaaaaaaaaaaaaaaaaaaaaaaaaaaaaaaaaaaaaaaaaaaaaaaaaaaaaaaaaaaaaaaaaaaa

SEQ ID NO: 24587 - RNA, 1662 nt, Artificial Sequence
  mRNA product Design i-3 (A100) comprising derived and/or modified sequence from LASV(KAK-428;Clade n.d. (VII))__ANH09740__GPCmut2 (opt4)
aggagaaagcuuaccaugggccagaucgugaccuucuuccaggaggugccccacgugaucgaggaggugaugaacaucgugcugaucgcccugagccugcuggccauccugaagggccuguacaacuucgccaccugcggcgugaucggccugaucaccuuccugcugcugugcggcagaagcugcagcgccaccuacaagggccaguacgagcugcagacccuggagcugaacauggagagccugaacaugugcaugccccugagcugcaccaagaacaacagccaccacuacaucagagccggcaacaacaccggccuggagcugacccugaccaacaccagcaucaucagccacaaguucugcaaccugagcgacgcccacaagaagaaccuguacgaccacacccugaugagcaucaucaccaccuuccaccugagcauccccaacuucaaccaguacgaggccaugagcugcgacuucaacggcggcaagaucagcauccaguacaaccugagccacagcuacgccggcgacgccgcccagcacugcggcaccguggccaacggcgugcugcagaccuucaugagaauggccuggggcggcagcuaccuggcccuggacagcggcagaagaggcugggacugcaucaucagcagcuaccaguaccugaucauccagaacaccaccugggacgaccacugccaguucagcagacccagccccaucggcuaccugggcuucgugagccagaagaccagagacaucuacaucagcagaagaagaagaggcaccuucaccuggacccugagcgacagcgagggccacgacaugcccggcggcuacugccugaccagauggaugcugaucgaggccgaccugaagugcuucggcaacaccgccguggccaagugcaacgagaagcacgacgaggaguucugcgacauguggagacuguucgacuucugcaagcaggccauccagagacugaaggcccccgcccagaugaacauccagcugaucaacaaggccgugaacgcccugaucaacgaccagcugaugaugaagaaccaccugagagacaucaugggcauccccuacugcaacuacagcaaguucugguaccugaacaacaccaccaccggcagaaccagccugcccagaugcuggcugaucagcaacggcagcuaccugaacgagacccacuucagcgacgacaucgagcagcaggccgacaacaugaucaccgagaugcugcagaaggaguacauggacagacagggcaagaccccccugggccugguggaccuguucguguucagcaccagcuucuaccugaucaccaucuuccugcaccuggugaagauccccacccacagacacaucgugggcaagcccugccccaagccccacagacugaaccacaugggcaucugcagcugcggccuguacaagcagcccggcgugcccgugagauggaagagaugaggacuaguuauaagacugacuagcccgaugggccucccaacgggcccuccuccccuccuugcaccgagauuaauaaaaaaaaaaaaaaaaaaaaaaaaaaaaaaaaaaaaaaaaaaaaaaaaaaaaaaaaaaaaaaaaaaaaaaaaaaaaaaaaaaaaaaaaaaaaaaaaaaaa

SEQ ID NO: 24588 - RNA, 1662 nt, Artificial Sequence; identical to SEQ ID NO: 24582
  mRNA product Design i-3 (A100) comprising derived and/or modified sequence from LASV(Pinneo-NIG-1969;Clade I)__AIT17836__GPCmut2 (opt4)

SEQ ID NO: 24589 - RNA, 1662 nt, Artificial Sequence
  mRNA product Design i-3 (A100) comprising derived and/or modified sequence from LASV(ISTH0009-NIG-2011;Clade II)__AIT17404__GPCmut2 (opt4)
aggagaaagcuuaccaugggccagaucaucaccuucuuccaggaggugccccacgugaucgaggaggugaugaacaucgugcugaucgcccugagccugcuggccauccugaagggcaucuacaacguggccaccugcggccuguucggccuggugagcuuccugcugcugugcggcagaagcugcagcaccaccuacaagggcguguacgagcugcagacccuggagcuggacauggccagccugaacaugugcaugccccugagcugcaccaagaacaacagccaccacuacaucauggugggcaacgagaccggccuggagcugacccugaccaacaccagcaucaucaaccacaaguucugcaaccugagcgacgcccacaagaagaaccuguacgaccacgcccugaugagcaucaucagcaccuuccaccugagcauccccaacuucaaccaguacgaggccaugagcugcgacuucaacggcggcaagaucagcgugcaguacaaccugagccacgccuacgccguggacgccgccaaccacugcggcaccaucgccaacggcgugcugcagaccuucaugagaauggccuggggcggcagcuacaucgcccuggacagcggcaagggcagcugggacugcaucaugaccagcuaccaguaccugaucauccagaacaccaccugggaggaccacugccaguucagcagacccagccccaucggcuaccugggccugcugagccagagaaccagagacaucuacaucagcagaagaagaagaggcaccuucaccuggacccugagcgacagcgagggcaacgagacccccggcggcuacugccugaccagauggaugcugaucgaggccgagcugaagugcuucggcaacaccgccguggccaagugcaacgagaagcacgacgaggaguucugcgacaugcugagacuguucgacuucugcaagcaggccaucagaagacugaagacccccgcccagaugagcauccagcugaucaacaaggccgugaacgcccugaucaacgaccagcugaucaugaagaaccaccugagagacaucaugggcauccccuacugcaacuacagcaaguacugguaccugaaccacaccgugaccggcaagaccagccugcccagaugcuggcuggugagcaacggcagcuaccugaacgagacccacuucagcgacgacaucgagcagcaggccgacaacaugaucaccgagcugcugcagaaggaguacauggacagacagggcaagaccccccugggccugguggaccuguucguguucagcaccagcuucuaccugaucagcaucuuccugcaccugaucaagauccccacccacagacacaucaccggcaagcccugccccaagccccacagacugaaccacaugggcaucugcagcugcggccuguacaagcaccccggcgugcccgugaaguggaagagaugaggacuaguuauaagacugacuagcccgaugggccucccaacgggcccuccuccccuccuugcaccgagauuaauaaaaaaaaaaaaaaaaaaaaaaaaaaaaaaaaaaaaaaaaaaaaaaaaaaaaaaaaaaaaaaaaaaaaaaaaaaaaaaaaaaaaaaaaaaaaaaaaaaaa

SEQ ID NO: 24590 - RNA, 1662 nt, Artificial Sequence
  mRNA product Design i-3 (A100) comprising derived and/or modified sequence from LASV(ISTH2010-NIG-2012;Clade II)__AIT17482__GPCmut2 (opt4)
aggagaaagcuuaccaugggccagaucaucaccuucuuccaggaggugccccacgugaucgaggaggugaugaacaucgugcugaucgcccugagccugcuggccauccugaagggcaucuacaacguggccaccugcggccuguucggccuggugagcuuccugcugcugugcggcagaagcugcagcaccaccuacaagggcguguacgagcugcagacccuggagcuggacauggccagccugaacaugugcaugccccugagcugcaccaagaacaacagccaccacuacaucauggugggcaacgagaccggccuggagcugacccugaccaacaccagcaucaucaaccacaaguucugcaaccugagcgacgcccacaagaagaaccuguacgaccacgcccugaugagcaucaucagcaccuuccaccugagcauccccaacuucaaccaguacgaggccaugagcugcgacuucaacggcggcaagaucagcgugcaguacaaccugagccacgccuacgccguggacgccgccaaccacugcggcaccaucgccaacggcgugcugcagaccuucaugagaauggccuggggcggcagcuacaucgcccuggacagcggcaagggcagcugggacugcaucaugaccagcuaccaguaccugaucauccagaacaucaccugggaggaccacugccaguucagcagacccagccccaucggcuaccugggccugcugagccagagaaccagagacaucuacaucagcagaagaagaagaggcaccuucaccuggacccugagcgacagcgagggcaacgagacccccggcggcuacugccugaccagauggaugcugaucgaggccgagcugaagugcuucggcaacaccgccguggccaagugcaacgagaagcacgacgaggaguucugcgacaugcugagacuguucgacuucugcaagcaggccaucagaagacugaagacccccgcccagaugagcauccagcugaucaacaaggccgugaacgcccugaucaacgaccagcugaucaugaagaaccaccugagagacaucaugggcauccccuacugcaacuacagcaaguacugguaccugaaccacaccgugaccggcaagaccagccugcccagaugcuggcuggugagcaacggcagcuaccugaacgagacccacuucagcgacgacaucgagcagcaggccgacaacaugaucaccgagcugcugcagaaggaguacaucgacagacagggcaagaccccccugggccugguggaccuguucguguucagcaccagcuucuaccugaucagcaucuuccugcaccuggugaagauccccacccacagacacguggugggcaagcccugccccaagccccacagacugaaccacaugggcaucugcagcugcggccuguacaagcaccccggcgugcccgugaaguggaagagaugaggacuaguuauaagacugacuagcccgaugggccucccaacgggcccuccuccccuccuugcaccgagauuaauaaaaaaaaaaaaaaaaaaaaaaaaaaaaaaaaaaaaaaaaaaaaaaaaaaaaaaaaaaaaaaaaaaaaaaaaaaaaaaaaaaaaaaaaaaaaaaaaaaaa

SEQ ID NO: 24591 - RNA, 1662 nt, Artificial Sequence
  mRNA product Design i-3 (A100) comprising derived and/or modified sequence from LASV(Lassa virus/H.sapiens-wt/NGA/2015/ISTH_0543;Clade II)__AVO03639__GPCmut2 (opt4)
aggagaaagcuuaccaugggccagaucaucaccuucuuccaggaggugccccacgugaucgaggaggugaugaacaucgugcugaucgcccugagccugcuggccauccugaagggcaucuacaacguggccaccugcggccuguucggccuggugagcuuccugcugcugugcggcagaagcugcagcaccaccuacaagggcguguacgagcugcagacccuggagcuggacauggccaaccugaacaugugcaugccccugagcugcaccaagaacaacagccaccacuacaucauggugggcaacgagaccggccuggagcugacccugaccaacaccagcaucaucaaccacaaguucugcaaccugagcgacgcccacaagaagaaccuguacgaccacgcccugaugagcaucaucagcaccuuccaccugagcauccccaacuucaaccaguacgaggccaugagcugcgacuucaacggcggcaagaucagcgugcaguacaaccugagccacaccuacgccguggacgccgccaaccacugcggcaccaucgccaacggcgugcugcagaccuucaugagaauggccuggggcggcagcuacaucgcccuggacagcggcaagggcagcugggacugcaucaugaccagcuaccaguaccuggugauccagaacaccaccugggaggaccacugccaguucagcagacccagccccaucggcuaccugggccugcugagccagagaaccagagacaucuacaucagcagaagaagaagaggcaccuucaccuggacccugagcgacagcgagggcaacgagacccccggcggcuacugccugaccagauggaugcugaucgaggccgagcugaagugcuucggcaacaccgccguggccaagugcaacgagaagcacgacgaggaguucugcgacaugcugagacuguucgacuucugcaagcaggccaucagaagacugaagacccccgcccagaugagcauccagcugaucaacaaggccgugaacgcccugaucaacgaccagcugaucaugaagaaccaccugagagacaucaugggcauccccuacugcaacuacagcaaguacugguaccugaaccacaccgugaccggcaagaccagccugcccagaugcuggcuggugagcaacggcagcuaccugaacgagacccacuucagcgacgacaucgagcagcaggccgacaacaugaucaccgagcugcugcagaaggaguacaucgacagacagggcaagaccccccugggccugguggaccuguucguguucagcaccagcuucuaccugaucagcaucuuccugcaccuggugaagauccccacccacagacacaucaccggcaagcccugccccaagccccacagacugaaccacaugggcaucugcagcugcggccuguacaagcaccccggcgugcccgugaaguggaagagaugaggacuaguuauaagacugacuagcccgaugggccucccaacgggcccuccuccccuccuugcaccgagauuaauaaaaaaaaaaaaaaaaaaaaaaaaaaaaaaaaaaaaaaaaaaaaaaaaaaaaaaaaaaaaaaaaaaaaaaaaaaaaaaaaaaaaaaaaaaaaaaaaaaaa

SEQ ID NO: 24592 - RNA, 1662 nt, Artificial Sequence
  mRNA product Design i-3 (A100) comprising derived and/or modified sequence from LASV(Lassa virus/H.sapiens-wt/NGA/2016/ISTH_0009;Clade II)__AVO03571__GPCmut2 (opt4)
aggagaaagcuuaccaugggccagaucaucaccuucuuccaggaggugccccacgugaucgaggaggugaugaacaucgugcugaucgcccugagccugcuggccauccugaagggcaucuacaacguggccaccugcggccugcugggccuggugagcuuccugcugcugugcggcagaagcugcagcaccaccuacaagggcguguacgagcugcagacccuggagcuggacauggccagccugaacaugugcaugccccugagcugcaccaagaacaacagccaccacuacaucauggugggcaacgagaccggccuggagcugacccugaccaacaccagcaucaucaaccacaaguucugcaaccugagcgacgcccacaagaagaaccuguacgaccacgcccugaugagcaucaucagcaccuuccaccugagcauccccaacuucaaccaguacgaggccaugagcugcgacuucaacggcggcagaaucagcgugcaguacaaccugagccacagcuacgccguggacgccgccaaccacugcggcaccaucgccaacggcgugcugcagaccuucaugagaauggccuggggcggcagcuacaucgcccuggacagcggcaagggcagcugggacugcaucaugaccagcuaccaguaccugaucauccagaacaccaccugggaggaccacugccaguucagcagacccagccccaucggcuaccugggccugcugagccagagaaccagagacaucuacaucagcagaagaagaagaggcaccuucaccuggacccugagcgacagcgagggcaacgagacccccggcggcuacugccugaccagauggaugcugaucgaggccgagcugaagugcuucggcaacaccgccguggccaagugcaacgagaagcacgacgaggaguucugcgacaugcugagacuguucgacuucugcaagcaggccaucagaagacugaagacccccgcccagaugagcauccagcugaucaacaaggccgugaacgcccugaucaacgaccagcugaucaugaagaaccaccugagagacaucaugggcauccccuacugcaacuacagcaaguacugguaccugaaccacaccgugaccggcaagaccagccugcccagaugcuggcuggugagcaacggcagcuaccugaacgagacccacuucagcgacgacaucgagcagcaggccgacaacaugaucaccgagcugcugcagaaggaguacaucgacagacagggcaagaccccccugggccugguggaccuguucguguucagcaccagcuucuaccugaucagcaucuuccugcaccuggugaagauccccacccacagacacaucaccggcaagcccugccccaagccccacagacugaaccacaugggcaucugcagcugcggccuguacaaccaccccggcgugcccgugaaguggaagagaugaggacuaguuauaagacugacuagcccgaugggccucccaacgggcccuccuccccuccuugcaccgagauuaauaaaaaaaaaaaaaaaaaaaaaaaaaaaaaaaaaaaaaaaaaaaaaaaaaaaaaaaaaaaaaaaaaaaaaaaaaaaaaaaaaaaaaaaaaaaaaaaaaaaa

SEQ ID NO: 24593 - RNA, 1662 nt, Artificial Sequence
  mRNA product Design i-3 (A100) comprising derived and/or modified sequence from LASV(Lassa virus/H.sapiens-wt/NGA/2016/ISTH_0017;Clade II)__AVO03567__GPCmut2 (opt4)
aggagaaagcuuaccaugggccagaucaucaccuucuuccaggaggugccccacgugaucgaggaggugaugaacaucgugcugaucgcccugagccugcuggccauccugaagggcaucuacaacguggccaccugcggccuguucggccuggugagcuuccugcugcugugcggcagaagcugcagcaccaccuacaagggcguguacgagcugcagacccuggagcuggacauggccagccugaacaugugcaugccccugagcugcaccaagaacaacagccaccacuacaucauggugggcaacgagaccggccuggagcugacccugaccaacaccagcaucaucaaccacaaguucugcaaccugagcgacgcccacaagaagaaccuguacgaccacgcccugaugagcaucaucagcaccuuccaccugagcauccccaacuucaaccaguacgaggccaugagcugcgacuucaacggcggcaagaucagcgugcaguacaaccugagccacaccuacgccaucgacgccgccaaccacugcggcaccaucgccaacggcgugcugcagaccuucaugagaauggccuggggcggcagcuacaucgcccuggacagcggcaagggcagcugggacugcaucaugaccagcuaccaguaccugaucauccagaacaccaccugggaggaccacugccaguucagcagacccagccccaucggcuaccugggccugcugagccagagaaccagagacaucuacaucagcagaagaagaagaggcaccuucaccuggacccugagcgacagcgagggcaacgagacccccggcggcuacugccugaccagauggaugcugaucgaggccgagcugaagugcuucggcaacaccgccguggccaagugcaacgagaagcacgacgaggaguucugcgacaugcugagacuguucgacuucugcaagcaggccaucagaagacugaagacccccgcccagaugagcauccagcugaucaacaaggccgugaacgcccugaucaacgaccagcugaucaugaagaaccaccugagagacaucaugggcauccccuacugcaacuacagcaaguacugguaccugaaccacaccgugaccggcaagaccagccugcccagaugcuggcuggugagcaacggcagcuaccugaacgagacccacuucagcgacgacaucgagcagcaggccgacaacaugaucaccgagcugcugcagaaggaguacauggacagacagggcaagaccccccugggccugguggaccuguucguguucagcaccagcuucuaccugaucagcaucuuccugcaccuggugagaauccccacccacagacacgugaucggcaagcccugccccaagccccacagacugaaccacaugggcaucugcagcugcggccuguacaagcaccccggcgugcccgugaaguggaagagaugaggacuaguuauaagacugacuagcccgaugggccucccaacgggcccuccuccccuccuugcaccgagauuaauaaaaaaaaaaaaaaaaaaaaaaaaaaaaaaaaaaaaaaaaaaaaaaaaaaaaaaaaaaaaaaaaaaaaaaaaaaaaaaaaaaaaaaaaaaaaaaaaaaaa

SEQ ID NO: 24594 - RNA, 1662 nt, Artificial Sequence
  mRNA product Design i-3 (A100) comprising derived and/or modified sequence from LASV(Lassa virus/H.sapiens-wt/NGA/2018/ISTH_0959;Clade II)__AVV65099__GPCmut2 (opt4)
aggagaaagcuuaccaugggccagaucaucaccuucuuccaggaggugccccacgugaucgaggaggugaugaacaucgugcugaucgcccugagccugcuggccauccugaagggcaucuacaacguggugaccugcggccuguucggccuggugagcuuccugcugcugugcggcagaagcugcagcaccaccuacaagggcguguacgagcugcagacccuggagcuggacauggccagccugaacaugugcaugccccugagcugcaccaagaacaacagccaccacuacaucauggugggcaacgagaccggccuggagcugacccugaccaacaccagcaucaucaaccacaaguucugcaaccugagcgacgcccacaagaagaaccuguacgaccacgcccugaugagcaucaucagcaccuuccaccugagcauccccaacuucaaccaguacgaggccaugagcugcgacuucaacggcggcaagaucagcgugcaguacaaccugagccacgccuacgccaucgacgccgccaaccacugcggcaccaucgccaacggcgugcugcagaccuucaugagaauggccuggggcggcagcuacaucgcccuggacagcggcaagggcagcugggacugcaucaugaccagcuaccaguaccugaucauccagaacaccaccugggaggaccacugccaguucagcagacccagccccaucggcuaccugggccugcugagccagagaaccagagacaucuacaucagcagaagaagaagaggcaccuucaccuggacccugagcgacagcgagggcaacgagacccccggcggcuacugccugaccagauggaugcugaucgaggccgagcugaagugcuucggcaacaccgccguggccaagugcaacgagaagcacgacgaggaguucugcgacaugcugagacuguucgacuucugcaagcaggccaucagaagacugaagacccccgcccagaugagcauccagcugaucaacaaggccgugaacgcccugaucaacgaccagcugaucaugaagaaccaccugagagacaucaugggcauccccuacugcaacuacagcaaguacugguaccugaaccacaccgugaccggcaagaccagccugcccagaugcuggcuggugagcaacggcagcuaccugaacgagacccacuucagcgacgacaucgagcagcaggccgacaacaugaucaccgagcugcugcagaaggaguacaucgacagacagggcaagaccccccugggccugguggaccuguucguguucagcaccagcuucuaccugaucagcaucuuccugcaccuggugaagauccccacccacagacacgugaucggcaagcccugccccaagccccacagacugaaccacaugggcaucugcagcugcggccuguacaagcaccccggcgugcccgugaaguggaagagaugaggacuaguuauaagacugacuagcccgaugggccucccaacgggcccuccuccccuccuugcaccgagauuaauaaaaaaaaaaaaaaaaaaaaaaaaaaaaaaaaaaaaaaaaaaaaaaaaaaaaaaaaaaaaaaaaaaaaaaaaaaaaaaaaaaaaaaaaaaaaaaaaaaaa

SEQ ID NO: 24595 - RNA, 1662 nt, Artificial Sequence
  mRNA product Design i-3 (A100) comprising derived and/or modified sequence from LASV(LASV003-NIG-2008;Clade II)__AIT17580__GPCmut2 (opt4)
aggagaaagcuuaccaugggccagaucaucaccuucuuccaggaggugccccacgugaucgaggaggugaugaacaucgugcugaucgcccugagccugcuggccauccugaagggcaucuacaacguggccaccugcggccuguucggccuggugagcuuccugcugcugugcggcagaagcugcagcaccaccuacaagggcguguacgagcugcagacccuggagcuggacauggccagccugaacaugugcaugccccugagcugcaccaagaacaacagccaccacuacaucauggugggcaacgagaccggccuggagcugacccugaccaacaccagcaucaucaaccacaaguucugcaaccugagcgacgcccacaagaagaaccuguacgaccacgcccugaugagcaucaucagcaccuuccaccugagcauccccaacuucaaccaguacgaggccaugagcugcgacuucaacggcggcaagaucagcgugcaguacaaccugagccacaccuacgccguggacgccgccaaccacugcggcaccaucgccaacggcgugcugcagaccuucaugagaauggccuggggcggcagcuacaucgcccuggacagcggcaagggcagcugggacugcaucaugaccagcuaccaguaccugaucauccagaacaccaccugggaggaccacugccaguucagcagacccagccccaucggcuaccugggccugcugagccagagaaccagagacaucuacaucagcagaagaagaagaggcaccuucaccuggacccugagcgacagcgagagcaacgagacccccggcggcuacugccugaccagauggaugcugaucgaggccgagcugaagugcuucggcaacaccgccguggccaagugcaacgagaagcacgacgaggaguucugcgacaugcugagacuguucgacuucugcaagcaggccaucagaagacugaaggcccccgcccagaugagcauccagcugaucaacaaggccgugaacgcccugaucaacgaccagcugaucaugaagaaccaccugagagacaucaugggcauccccuacugcaacuacagcaaguacugguaccugaaccacaccgugaccggcagaaccagccugcccagaugcuggcuggugagcaacggcagcuaccugaacgagacccacuucagcgacgacaucgagcagcaggccgacaacaugaucaccgagcugcugcagaaggaguacauggacagacagggcaagaccccccugggccugguggaccuguucguguucagcaccagcuucuaccugaucagcaucuuccugcaccuggugaagauccccacccacagacacgugaucggcaagcccugccccaagccccacagacugaaccacaugggcaucugcagcugcggccuguacaagcaccccggcgugcccgugaaguggaagagaugaggacuaguuauaagacugacuagcccgaugggccucccaacgggcccuccuccccuccuugcaccgagauuaauaaaaaaaaaaaaaaaaaaaaaaaaaaaaaaaaaaaaaaaaaaaaaaaaaaaaaaaaaaaaaaaaaaaaaaaaaaaaaaaaaaaaaaaaaaaaaaaaaaaa

SEQ ID NO: 24596 - RNA, 1662 nt, Artificial Sequence
  mRNA product Design i-3 (A100) comprising derived and/or modified sequence from LASV(LASV035-NIG-2009;Clade II)__AIT17588__GPCmut2 (opt4)
aggagaaagcuuaccaugggccagaucaucaccuucuuccaggaggugccccacgugaucgaggaggugaugaacaucgugcugaucgcccugagccugcuggccauccugaagggcaucuacaacguggccaccugcggccuguucggccuggugagcuuccugcugcugugcggcagaagcugcagcaccaccuacaagggcguguacgagcugcagacccuggagcuggacauggccagccugaacaugugcaugccccugagcugcaccaagaacaacagccaccacuacaucauggugggcaacgagaccggccuggagcugacccugaccaacaccagcaucaucaaccacaaguucugcaaccugagcgacgcccacaagaagaaccuguacgaccacgcccugaugagcaucaucagcaccuuccaccugagcauccccaacuucaaccaguacgaggccaugagcugcgacuucaacggcggcaagaucagcgugcaguacaaccugagccacgccuacgccguggacgccgccaaccacugcggcaccaucgccaacggcgugcugcagaccuucaugagaauggccuggggcggcagcuacaucgcccuggacagcggcaagggcagcugggacugcaucaugaccagcuaccaguaccugaucauccagaacaccaccugggaggaccacugccaguucagcagacccagccccaucggcuaccugggccugcugagccagagaaccagagacaucuacaucagcagaagaagaagaggcaccuucaccuggacccugagcgacagcgagggcaacgagacccccggcggcuacugccugaccagauggaugcugaucgaggccgagcugaagugcuucggcaacaccgccguggccaagugcaacgagaagcacgacgaggaguucugcgacaugcugagacuguucgacuucugcaagcaggccaucagaagacugaaggcccccgcccagaugagcauccagcugaucaacaaggccgugaacgcccugaucaacgaccagcugaucaugaagaaccaccugagagacaucaugggcauccccuacugcaacuacagcaaguacugguaccugaaccacaccgugaccggcaagaccagccugcccagaugcuggcuggugagcaacggcagcuaccugaacgagacccacuucagcgacgacaucgagcagcaggccgacaacaugaucaccgagcugcugcagaaggaguacaucgacagacagggcaagaccccccugggccugguggaccuguucguguucagcaccagcuucuaccugaucagcaucuuccugcaccuggugaagauccccacccacagacacgugaucggcaagcccugccccaagccccacagacugaaccacaugggcaucugcagcugcggccuguacaagcaccccggcgugcccgugaaguggaagagaugaggacuaguuauaagacugacuagcccgaugggccucccaacgggcccuccuccccuccuugcaccgagauuaauaaaaaaaaaaaaaaaaaaaaaaaaaaaaaaaaaaaaaaaaaaaaaaaaaaaaaaaaaaaaaaaaaaaaaaaaaaaaaaaaaaaaaaaaaaaaaaaaaaaa

SEQ ID NO: 24597 - RNA, 1662 nt, Artificial Sequence
  mRNA product Design i-3 (A100) comprising derived and/or modified sequence from LASV(LASV1000-NIG-2009;Clade II)__AIT17782__GPCmut2 (opt4)
aggagaaagcuuaccaugggccagaucaucaccuucuuccaggaggugccccacgugaucgaggaggugaugaacaucgugcugaucgcccugagccugcuggccauccugaagggcaucuacaacguggccaccugcggccuguucggccuggugagcuuccugcugcugugcggcagaagcugcagcaccaccuacaagggcguguacgagcugcagacccuggagcuggacauggccagccugaacaugugcaugccccugagcugcaccaagaacaacagccaccacuacaucauggugggcaacgagaccggccuggagcugacccugaccaacaccagcaucaucaaccacaaguucugcaaccugagcgacgcccacaagaagaaccuguacgaccacgcccugaugagcaucaucagcaccuuccaccugagcauccccaacuucaaccaguacgaggccaugagcugcgacuucaacggcggcaagaucagcgugcaguacaaccugagccacaccuacgccguggacgccgccaaccacugcggcaccaucgccaacggcgugcugcagaccuucaugagaauggccuggggcggcagcuacaucgcccuggacagcggcaagggcagcugggacugcaucaugaccagcuaccaguaccugaucauccagaacaccaccugggaggaccacugccaguucagcagacccagccccaucggcuaccugggccugcugagccagagaaccagagacaucuacaucagcagaagaagaagaggcaccuucaccuggacccugagcgacagcgagggcaacgagacccccggcggcuacugccugaccagauggaugcugaucgaggccgagcugaagugcuucggcaacaccgccguggccaagugcaacgagaagcacgacgaggaguucugcgacaugcugagacuguucgacuucugcaagcaggccaucaagagacugaagacccccgcccagaugagcauccagcugaucaacaaggccgugaacgcccugaucaacgaccagcugaucaugaagaaccaccugagagacaucaugggcauccccuacugcaacuacagcaaguacugguaccugaaccacaccgugaccggcaagaccagccugcccagaugcuggcuggugagcaacggcagcuaccugaacgagacccacuucagcgacgacaucgagcagcaggccgacaacaugaucaccgagcugcugcagaaggaguacaucgacagacagggcaagaccccccugggccugguggaccuguucguguucagcaccagcuucuaccugaucagcaucuuccugcaccuggugaagauccccacccacagacacguggugggcaagcccugccccaagccccacagacugaaccacaugggcaucugcagcugcggccuguacaagcaccccggcgugcccgugaaguggaagagaugaggacuaguuauaagacugacuagcccgaugggccucccaacgggcccuccuccccuccuugcaccgagauuaauaaaaaaaaaaaaaaaaaaaaaaaaaaaaaaaaaaaaaaaaaaaaaaaaaaaaaaaaaaaaaaaaaaaaaaaaaaaaaaaaaaaaaaaaaaaaaaaaaaaa

SEQ ID NO: 24598 - RNA, 1662 nt, Artificial Sequence
  mRNA product Design i-3 (A100) comprising derived and/or modified sequence from LASV(LASV221-NIG-2010;Clade II)__AIT17624__GPCmut2 (opt4)
aggagaaagcuuaccaugggccagaucaucaccuucuuccaggaggugccccacgugaucgaggaggugaugaacaucgugcugaucgcccugagccugcuggccauccugaagggcaucuacaacguggccaccugcggccuguucggccuggugagcuuccugcugcugugcggcagaagcugcagcaccaccuacaagggcguguacgagcugcagacccuggagcuggacauggccagccugaacaugugcaugccccugagcugcaccaagaacaacagccaccacuacaucauggugggcaacgagaccggccuggagcugacccugaccaacaccagcaucaucaaccacaaguucugcaaccugagcgacgcccacaagaagaaccuguacgaccacgcccugaugagcaucaucagcaccuuccaccugagcauccccaacuucaaccaguacgaggccaugagcugcgacuucaacggcggcaagaucagcgugcaguacaaccugagccacaccuacgccaucgacgccgccaaccacugcggcaccaucgccaacggcgugcugcagaccuucaugagaauggccuggggcggcagcuacaucgcccuggacagcggcaagggcagcugggacugcaucaugaccagcuaccaguaccugaucauccagaacaccaccugggaggaccacugccaguucagcagacccagccccaucggcuaccugggccugcugagccagagaaccagagacaucuacaucagcagaagaagaagaggcaccuucaccuggacccugagcgacagcgagggcaacgagacccccggcggcuacugccugaccagauggaugcugaucgaggccgagcugaagugcuucggcaacaccgccguggccaagugcaacgagaagcacgacgaggaguucugcgacaugcugagacuguucgacuucugcaagcaggccaucagaagacugaagacccccgcccagaugagcauccagcugaucaacaaggccgugaacgcccugaucaacgaccagcugaucaugaagaaccaccugagagacaucaugggcauccccuacugcaacuacagcaaguacugguaccugaaccacaccgugaccggcaagaccagccugcccagaugcuggcuggugagcaacggcagcuaccugaacgagacccacuucagcgacgacaucgagcagcaggccgacaacaugaucaccgagaugcugcagaaggaguacauggacagacagggcaagaccccccugggccugguggaccuguucguguucagcaccagcuucuaccugaucagcaucuuccugcaccuggugaagauccccacccacagacacgugaucggcaagcccugccccaagccccacagacugaaccacaugggcaucugcagcugcggccuguacaagcaccccggcgugcccgugaaguggaagagaugaggacuaguuauaagacugacuagcccgaugggccucccaacgggcccuccuccccuccuugcaccgagauuaauaaaaaaaaaaaaaaaaaaaaaaaaaaaaaaaaaaaaaaaaaaaaaaaaaaaaaaaaaaaaaaaaaaaaaaaaaaaaaaaaaaaaaaaaaaaaaaaaaaaa

SEQ ID NO: 24599 - RNA, 1662 nt, Artificial Sequence
  mRNA product Design i-3 (A100) comprising derived and/or modified sequence from LASV(LASV237-NIG-2010;Clade II)__AIT17638__GPCmut2 (opt4)
aggagaaagcuuaccaugggccagaucaucaccuucuuccaggaggugccccacgugaucgaggaggugaugaacaucgugcugaucgcccugagccugcuggccauccugaagggcaucuacaacguggccaccugcggccuguucggccuggugagcuuccugcugcugugcggcagaagcugcagcaccaccuacaagggcguguacgagcugcagacccuggagcuggacauggccagccugaacaugugcaugccccugagcugcaccaagaacaacagccaccacuacaucauggugggcaacgagaccggccuggagcugacccugaccaacaccagcaucaucaaccacaaguucugcaaccugagcgacgcccacaagaaggaccuguacgaccacgcccugaugagcaucaucagcaccuuccaccugagcauccccaacuucaaccaguacgaggccaugagcugcgacuucaacggcggcaagaucagcgugcaguacaaccugagccacaccuacgccguggacgccgccaaccacugcggcaccaucgccaacggcgugcugcagaccuucaugagaauggccuggggcggcagcuacaucgcccuggacagcggcaagggcagcugggacugcaucaugaccagcuaccaguaccugaucauccagaacaccaccugggaggaccacugccaguucagcagacccagccccaucggcuaccugggccugcugagccagagaaccagagacaucuacaucagcagaagaagaagaggcaccuucaccuggacccugagcgacagcgagggcaacgagacccccggcggcuacugccugaccagauggaugcugaucgaggccgagcugaagugcuucggcaacaccgccguggccaagugcaacgagaagcacgacgaggaguucugcgacaugcugagacuguucgacuucugcaagcaggccaucagaagacugaagacccccgcccagaugagcauccagcugaucaacaaggccgugaacgcccugaucaacgaccagcugaucaugaagaaccaccugagagacaucaugggcauccccuacugcaacuacagcaaguacugguaccugaaccacaccgugaccggcaagaccagccugcccagaugcuggcuggugagcaacggcagcuaccugaacgagacccacuucagcgacgacaucgagcagcaggccgacaacaugaucaccgagcugcugcagaaggaguacauggacagacagggcaagaccccccugggccugguggaccuguucguguucagcaccagcuucuaccugaucagcaucuuccugcaccugaucaagauccccacccacagacacaucaccggcaagcccugccccaagccccacagacugaaccacaugggcaucugcagcugcggccuguacaagcaccccggcgugcccgugaaguggaagagaugaggacuaguuauaagacugacuagcccgaugggccucccaacgggcccuccuccccuccuugcaccgagauuaauaaaaaaaaaaaaaaaaaaaaaaaaaaaaaaaaaaaaaaaaaaaaaaaaaaaaaaaaaaaaaaaaaaaaaaaaaaaaaaaaaaaaaaaaaaaaaaaaaaaa

SEQ ID NO: 24600 - RNA, 1662 nt, Artificial Sequence
  mRNA product Design i-3 (A100) comprising derived and/or modified sequence from LASV(LASV253-NIG-2011;Clade II)__AIT17670__GPCmut2 (opt4)
aggagaaagcuuaccaugggccagaucaucaccuucuuccaggaggugccccacgugaucgaggaggugaugaacaucgugcugaucgcccugagccugcuggccauccugaagggcaucuacaacguggccaccugcggccuguucggccuggugagcuuccugcugcugugcggcagaagcugcagcaccaccuacaagggcguguacgagcugcagacccuggagcuggacauggccagccugaacaugugcaugccccugagcugcaccaagaacaacagccaccacuacaucauggugggcaacgagaccggccuggagcugacccugaccaacaccagcaucaucaaccacaaguucugcaaccugagcgacgcccacaagaagaaccuguacgaccacgcccugaugagcaucaucagcaccuuccaccugagcauccccaacuucaaccaguacgaggccaugagcugcgacuucaacggcggcaagaucagcgugcaguacaaccugagccacaccuacgccguggacgccgccaaccacugcggcaccaucgccaacggcgugcugcagaccuucaugagaauggccuggggcggcagcuacaucgcccuggacagcggcaagggcagcugggacugcaucaugaccagcuaccaguaccugaucauccagaacaccaccugggaggaccacugccaguucagcagacccagccccaucggcuaccugggccugcugagccagagaaccagagacaucuacaucagcagaagaagaagaggcaccuucaccuggacccugagcgacagcgagggcaacgagacccccggcggcuacugccugaccagauggaugcugaucgaggccgagcugaagugcuucggcaacaccgccguggccaagugcaacgagaagcacgacgaggaguucugcgacaugcugagacuguucgacuucugcaagcaggccaucagaagacugaaggcccccgcccagaugagcauccagcugaucaacaaggccgugaacgcccugaucaacgaccagcugaucaugaagaaccaccugagagacaucaugggcauccccuacugcaacuacagcaaguacugguaccugaaccacaccgugaccggcagaaccagccugcccagaugcuggcuggugagcaacggcagcuaccugaacgagacccacuucagcgacgacaucgagcagcaggccgacaacaugaucaccgagcugcugcagaaggaguacaucgacagacagggcaagaccccccugggccugguggaccuguucguguucagcaccagcuucuaccugaucagcaucuuccugcaccuggugaagauccccacccacagacacaucaucggcaagcccugccccaagccccacagacugaaccacaugggcaucugcagcugcggccuguacaagcaccccggcgugcccgugaaguggaagagaugaggacuaguuauaagacugacuagcccgaugggccucccaacgggcccuccuccccuccuugcaccgagauuaauaaaaaaaaaaaaaaaaaaaaaaaaaaaaaaaaaaaaaaaaaaaaaaaaaaaaaaaaaaaaaaaaaaaaaaaaaaaaaaaaaaaaaaaaaaaaaaaaaaaa

SEQ ID NO: 24601 - RNA, 1662 nt, Artificial Sequence
  mRNA product Design i-3 (A100) comprising derived and/or modified sequence from LASV(LASV254-NIG-2011;Clade II)__AIT17674__GPCmut2 (opt4)
aggagaaagcuuaccaugggccagaucaucaccuucuuccaggaggugccccacgugaucgaggaggugaugaacaucgugcugaucgcccugagccugcuggccauccugaagggcaucuacaacguggccaccugcggccuguucggccuggugagcuuccugcugcugugcggcagaagcugcagcaccaccuacaagggcguguacgagcugcagacccuggagcuggacaugaccaaccugaacaugugcaugccccugagcugcaccaagaacaacagccaccacuacaucauggugggcaacgagaccggccuggagcugacccugaccaacaccagcaucaucaaccacaaguucugcaaccugagcgacgcccacaagaagaaccuguacaaccacgcccugaugagcaucaucagcaccuuccaccugagcauccccaacuucaaccaguacgaggccaugagcugcgacuucaacggcggcaagaucagcgugcaguacaaccugagccacagcuacgccguggacgccgccaaccacugcggcaccaucgccaacggcgugcugcagaccuucaugagaauggccuggggcggcagcuacaucgcccuggacagcggcaagggcaacugggacugcaucaugaccagcuaccaguaccugaucauccagaacaccaccugggaggaccacugccaguucagcagacccagccccaucggcuaccugggccugcugagccagagaaccagagacaucuacaucagcagaagaagaagaggcaccuucaccuggacccugagcgacagcgagggcaacgagacccccggcggcuacugccugaccagauggaugcugaucgaggccgagcugaagugcuucggcaacaccgccguggccaagugcaacgagaagcacgacgaggaguucugcgacaugcugagacuguucgacuucugcaagcaggccaucagaagacugaagacccccgcccaggccaacauccagcugaucaacaaggccgugaacgcccugaucaacgaccagcugaucaugaagaaccaccugagagacaucaugggcauccccuacugcaacuacagcaaguacugguaccugaaccacaccgugaccggcaagaccagccugcccagaugcuggcuggugagcaacggcagcuaccugaacgagacccacuucagcgacgacaucgagcagcaggccgacaacaugaucaccgagcugcugcagaaggaguacauggacagacagggcaagaccccccugggccugguggaccuguucguguucagcaccagcuucuaccugaucagcaucuuccugcaccuggugaagauccccacccacagacacgugaucggcaagcccugccccaagccccacagacugaaccacaugggcaucugcagcugcggccuguacaagcaccccggcgugcccgugaaguggaagagaugaggacuaguuauaagacugacuagcccgaugggccucccaacgggcccuccuccccuccuugcaccgagauuaauaaaaaaaaaaaaaaaaaaaaaaaaaaaaaaaaaaaaaaaaaaaaaaaaaaaaaaaaaaaaaaaaaaaaaaaaaaaaaaaaaaaaaaaaaaaaaaaaaaaa

SEQ ID NO: 24602 - RNA, 1662 nt, Artificial Sequence
  mRNA product Design i-3 (A100) comprising derived and/or modified sequence from LASV(Nig08-A19;Clade III)__ADU56618__GPCmut2 (opt4)
aggagaaagcuuaccaugggccagaucgugaccuucuuccaggaggugccccacgugaucgaggaggugaugaacaucgugcugaucgcccugagcauccuggccauccugaagggccuguacaacaucgccaccugcggccugaucggccuggugaccuuccugcugcugagcggcagaagcugcagcaugaccuacaagggcguguacgagcugcagacccuggagcugaacaugaacacccugaacaugugcaugccccugagcugcaccaagaacaacagccaccacuacaucauggugggcaacgagaccggccuggagcugacccugaccaacaccagccugcugcaccacaaguucugcaaccugagcgacgcccacaagaagaaccuguacgaccacacccugaugagcaucaucagcaccuuccaccugagcauccccaacuucaaccaguacgaggccaugagcugcgacuucaacggcggcaagaucaccgugcaguacaaccugagccacagcuacgccaucgacgccgccaaccacugcggcaccguggccaacggcgugcugcagaccuucaugagaauggccuggggcggcagcuacaucgcccuggacagcggcagaggcaagugggacugcaucaugaccagcuaccaguaccugaucauccagaacaccaccugggaggaccacugccaguucagcagacccagccccaucggcuaccugggccugcugagccagagaaccagagacaucuacaucagcagaagaagaagaggcaccuucaccuggacccugagcgacagcgagggcaacgagacccccggcggcuacugccugaccagauggaugcugaucgaggccgagcugaagugcuucggcaacaccgccguggccaagugcaacgagaagcacgacgaggaguucugcgacaugcugagacuguucgacuucugcaagcaggccaucagaagacugaaggcccccgcccagaugagcauccagcugaucaacaaggccgugaacgcccugaucaacgaccagcugaucaugaagaaccaccugagagacaucaugggcauccccuacugcaacuacagcaaguacugguaccugaaccacaccagcaccggcagaaccagccugcccagaugcuggcuggugagcaacggcagcuaccugaacgagacccacuucagcgacgacaucgagcagcaggccgacaacaugaucaccgagaugcugcagaaggaguaccuggacagacagggcaagaccccccugggccugguggaccuguucguguucagcaccagcuucuaccugaucagcaucuuccugcaccuggugaagauccccacccacagacacaucgugggcaagcccugccccaagccccacagacugaaccacaugggcaucugcagcugcggccuguacaagcagcccggcgugcccgugagauggaagagaugaggacuaguuauaagacugacuagcccgaugggccucccaacgggcccuccuccccuccuugcaccgagauuaauaaaaaaaaaaaaaaaaaaaaaaaaaaaaaaaaaaaaaaaaaaaaaaaaaaaaaaaaaaaaaaaaaaaaaaaaaaaaaaaaaaaaaaaaaaaaaaaaaaaa

SEQ ID NO: 24603 - RNA, 1665 nt, Artificial Sequence
  mRNA product Design i-3 (A100) comprising derived and/or modified sequence from LASV(G1180-SLE-2010;Clade IV)__AIT17168__GPCmut2 (opt4)
aggagaaagcuuaccaugggccagaucgugaccuucuuccaggaggugccccacgugaucgaggaggugaugaacaucgugcugaucgcccugagcauccuggccgugcugaagggccuguacaacuucgccaccugcggccuggugggccugcugaccuuccugcugcugugcggcagaagcugcaccgccagcagauacaagggcguguacgagcugcagacccuggagcugaacauggagacccugaacaugugcaugccccugagcugcaccaagaacaacagccaccacuacaucauggugggcaacgagaccggccuggagcugacccugaccaacaccagcaucaucaaccacaaguucugcaaccugagcgacgcccacaagaagaaccuguacgaccacgcccugaugagcaucaucagcaccuuccaccugagcauccccaacuucaaccaguacgaggccaugagcugcgacuucaacggcggcaagaucagcgugcaguacaaccugagccacagcuacgccggcgacgccgccaaccacugcggcaccguggccaacggcgugcugcagaccuucaugagaauggccuggggcggcagcuacaucgcccuggacagcggccacggcagcugggacugcaucaugaccagcuaccaguaccugaucauccagaacaccaccugggaggaccacugccaguucagcagacccagccccaucggcuaccugggccugcugagccagagaaccagagacaucuacaucagcagaagaagaagaggcaccuucaccuggacccugagcgacagcgagggcaaggacacccccggcggcuacugccugaccagauggaugcugaucgaggccgagcugaagugcuucggcaacaccgccguggccaagugcaacgagaagcacgacgaggaguucugcgacaugcugagacuguucgacuucugcaagcaggccauccagagacugaaggcccccgcccagaugagcauccagcugaucaacaaggccgugaacgcccugaucaacgaccagcugaucaugaagaaccaccugagagacaucaugggcauccccuacugcaacuacagcaaguacugguaccugaaccacaccaccaccggcaagaccagccugcccaagugcuggcuggugagcaacggcagcuaccugaacgagacccacuucagcgacgacaucgagcagcaggccgacaacaugaucaccgagaugcugcagaaggaguacauggagagacagggcaagaccccccugggccugguggaccuguucguguucagcaccagcuucuaccugaucagcaucuuccugcaccuggugaagauccccacccacagacacaucgugggcaagagcugccccaagccccacagacugaaccacaugggcaucugcagcugcggccuguacaagcagcccggcgugcccgugaaguggaagagaugaggacuaguuauaagacugacuagcccgaugggccucccaacgggcccuccuccccuccuugcaccgagauuaauaaaaaaaaaaaaaaaaaaaaaaaaaaaaaaaaaaaaaaaaaaaaaaaaaaaaaaaaaaaaaaaaaaaaaaaaaaaaaaaaaaaaaaaaaaaaaaaaaaaa

SEQ ID NO: 24604 - RNA, 1665 nt, Artificial Sequence
  mRNA product Design i-3 (A100) comprising derived and/or modified sequence from LASV(G1442-SLE-2011;Clade IV)__AIT17180__GPCmut2 (opt4)
aggagaaagcuuaccaugggccagaucgugaccuucuuccaggaggugccccacgugaucgaggaggugaugaacaucgugcugaucgcccugagcauccuggccgugcugaagggccuguacaacguggccaccugcggccugaucggccuggugaccuuccugcugcugugcggcagaagcugcaccaccacccuguacaagggcguguacgagcugcagacccuggagcugaacauggagacccugaacaugugcaugccccugagcugcaccaagaacaacagccaccacuacaucagagugggcaacgagaccggccuggagcugacccugaccaacaccagcaucaucaaccacaaguucugcaaccugagcgacgcccacaagaagaaccuguacgaccacgcccugaugagcaucaucagcaccuuccaccugagcauccccaacuucaaccaguacgaggccaugagcugcgacuucaacggcggcaagaucagcgugcaguacaaccugagccacagcuacgccggcgacgccgccaaccacugcggcaccguggccaacggcgugcugcagaccuucaugagaauggccuggggcggcagcuacaucgcccuggacagcggcagaggcaacugggacugcaucaugaccagcuaccaguaccugaucauccagaacaccaccugggacgaccacugccaguucagcagacccagccccaucggcuaccugggccugcugagccagagaaccagagacguguacaucagcagaagaagaagaggcaccuucaccuggacccugagcgacagcgagggcaaggacacccccggcggcuacugccugaccagauggaugcugaucgaggccgagcugaagugcuucggcaacaccgccguggccaagugcaacgagaagcacgacgaggaguucugcgacaugcugagacuguucgacuucugcaagcaggccauccagagacugaaggcccccgcccagaugagcauccagcugaucaacaaggccgugaacgcccugaucaacgaccagcugaucaugaagaaccaccugagagacaucaugggcauccccuacugcaacuacagcaaguacugguaccugaacaacaccgccaccggcaagaccagccugcccaagugcuggcugaucagcaacggcagcuaccugaacgagacccacuucagcgacgacaucgagcaggaggccgacaacaugaucaccgagaugcugcagaaggaguacauggagagacagggcaagaccccccugggccugguggaccuguucguguucagcaccagcuucuaccugaucagcaucuuccugcaccuggugaagauccccacccacagacacaucgugggcaagagcugccccaagccccacagacugaaccacaugggcaucugcagcugcggccuguacaagcagcccggcgugcccgugagauggaagagaugaggacuaguuauaagacugacuagcccgaugggccucccaacgggcccuccuccccuccuugcaccgagauuaauaaaaaaaaaaaaaaaaaaaaaaaaaaaaaaaaaaaaaaaaaaaaaaaaaaaaaaaaaaaaaaaaaaaaaaaaaaaaaaaaaaaaaaaaaaaaaaaaaaaa

SEQ ID NO: 24605 - RNA, 1665 nt, Artificial Sequence
  mRNA product Design i-3 (A100) comprising derived and/or modified sequence from LASV(G3010-SLE-2013;Clade IV)__AIT17344__GPCmut2 (opt4)
aggagaaagcuuaccaugggccagaucgugaccuucuuccaggaggugccccacgugaucgaggaggugaugaacaucgugcugaucgcccugagcauccuggccgugcugaagggccuguacaacuucgccaccugcggccuggugggccuggugaccuuccugcugcugugcggcagaagcugcaccaccagccuguacaagggcguguacgagcugcagacccuggagcugaacauggagacccugaacaugugcaugccccugagcugcaccaagaacaacagccaccacuacaucauggugggcaacgagaccggccuggagcugacccugaccaacaccagcaucaucaaccacaaguucugcaaccugagcgacgcccacaagaagaaccuguacaaccacgcccugaugagcaucaucagcaccuuccaccugagcauccccaacuucaaccaguacgaggccaugagcugcgacuucaacggcggcaagaucagcgugcaguacaaccugagccacagcuacgccggcgacgccgccagccacugcggcaccguggccaacggcgugcugcagaccuucaugagaauggccuggggcggcagcuacaucgcccuggacagcggcuacggcaagugggacugcaucaugaccagcuaccaguaccugaucauccagaacaccaccugggaggaccacugccaguucagcagacccagccccaucggcuaccugggccugcugagccagagaaccagagacaucuacaucagcagaagaagaagaggcaccuucaccuggacccugagcgacagcgagggcaaggacacccccggcggcuacugccugaccagauggaugcugaucgaggccgagcugaagugcuucggcaacaccgccguggccaagugcaacgagaagcacgacgaggaguucugcgacaugcugagacuguucgacuucugcaagcaggccauccagagacugaagacccccgcccagaugagcauccagcugaucaacaaggccgugaacgcccugaucaacgaccagcugaucaugaagaaccaccugagagacaucaugggcauccccuacugcaacuacagcaaguacugguaccugaaccacaccaccaccggcaagaccagccugcccaagugcuggcuggugagcaacggcagcuaccugaacgagacccacuucagcgacgacaucgagcagcaggccgacaacaugaucaccgagaugcugcagaaggaguacauggagagacagggcaagaccccccugggccugguggaccuguucguguucagcaccagcuucuaccugaucagcaucuuccugcaccuggugaagauccccacccacagacacaucgugggcaagagcugccccaagccccacagacugaaccacaugggcaucugcagcugcggccuguacaagcagcccggcgugcccgugagauggaagagaugaggacuaguuauaagacugacuagcccgaugggccucccaacgggcccuccuccccuccuugcaccgagauuaauaaaaaaaaaaaaaaaaaaaaaaaaaaaaaaaaaaaaaaaaaaaaaaaaaaaaaaaaaaaaaaaaaaaaaaaaaaaaaaaaaaaaaaaaaaaaaaaaaaaa

SEQ ID NO: 24606 - RNA, 1665 nt, Artificial Sequence
  mRNA product Design i-3 (A100) comprising derived and/or modified sequence from LASV(G502-SLE-2009;Clade IV)__AIT17126__GPCmut2 (opt4)
aggagaaagcuuaccaugggccagaucgugaccuucuuccaggaggugccccacgugaucgaggaggugaugaacaucgugcugaucgcccugagcauccuggccgugcugaagggccuguacaacuucgccaccugcggccuggugggccugcugaccuuccugcugcugugcggcagaagcugcaccaccggccuguacaagggcguguacgagcugcagacccuggagcugaacauggagacccugaacaugugcaugccccugagcugcaccaagaacaacagccaccacuacaucauggugggcaacgagaccggccuggagcugacccugaccaacaccagcaucaucaaccacaaguucugcaaccugagcgacgcccacaagaagaaccuguacgaccacgcccugaugagcaucaucagcaccuuccaccugagcauccccaacuucaaccaguacgaggccaugagcugcgacuucaacggcggcaagaucagcgugcaguacaaccugagccacagcuacgccggcgacgccgccgaccacugcggcaccguggccaacggcgugcugcagaccuucaugagaauggccuggggcggcagcuacaucgcccuggacagcggcagaggcagaugggacugcaucaugaccagcuaccaguaccugaucauccagaacaccaccugggaggaccacugccaguucagcagacccagccccaucggcuaccugggccugcugagccagagaaccagagacaucuacaucagcagaagaagaagaggcaccuucaccuggacccugagcgacagcgagggcaaggacacccccggcggcuacugccugaccagauggaugcugaucgaggccgagcugaagugcuucggcaacaccgccguggccaagugcaacgagaagcacgacgaggaguucugcgacaugcugagacuguucgacuucugcaagcaggccauccagagacugaaggcccccgcccagaugagcauccagcugaucaacaaggccgugaacgcccugaucaacgaccagcuggugaugaagaaccaccugagagacaucaugggcauccccuacugcaacuacagcagauacugguaccugaaccacaccaccaccggcagaaccagccugcccaagugcuggcuggugagcaacggcagcuaccugaacgagacccacuucagcgacgacaucgagcagcaggccgacaacaugaucaccgagaugcugcagaaggaguacauggagagacagggcaagaccccccugggccugguggaccuguucguguucagcaccagcuucuaccugaucagcaucuuccugcaccuggugaagauccccacccacagacacaucgugggcaagagcugccccaagccccacagacugaaccacaugggcaucugcagcugcggccuguacaagcagcccggcgugcccgugaaguggaagagaugaggacuaguuauaagacugacuagcccgaugggccucccaacgggcccuccuccccuccuugcaccgagauuaauaaaaaaaaaaaaaaaaaaaaaaaaaaaaaaaaaaaaaaaaaaaaaaaaaaaaaaaaaaaaaaaaaaaaaaaaaaaaaaaaaaaaaaaaaaaaaaaaaaaa

SEQ ID NO: 24607 - RNA, 1665 nt, Artificial Sequence
  mRNA product Design i-3 (A100) comprising derived and/or modified sequence from LASV(G733-SLE-2010;Clade IV)__AIT17154__GPCmut2 (opt4)
aggagaaagcuuaccaugggccagaucgugaccuucuuccaggaggugccccacgugaucgaggaggugaugaacaucgugcugaucgcccugagcauccuggccgugcugaagggccuguacaacuucgccaccugcggcaucgugggccuggugagcuuccugcugcugugcggcagaagcugcaccaccagccuguacaagggcguguacgagcugcagacccuggagcugaacauggagacccugaacaugugcaugccccugagcugcaccaagaacaacagccaccacuacaucauggugggcaacgagaccggccuggagcugacccugaccaacaccagcaucaucaaccacaaguucugcaaccugagcgacgcccacaagaagaaccuguacgaccacgcccugaugagcaucaucagcaccuuccaccugagcauccccaacuucaaccaguacgaggccaugagcugcgacuucaacggcggcaagaucagcgugcaguacaaccugagccacagcuacgccggcgacgccgccaaccacugcggcaccaucgccaacggcgugcugcagaccuucaugagaauggccuggggcggcagcuacaucgcccuggacagcggcagagacagaugggacugcaucaugaccagcuaccaguaccugaucauccagaacaccaccugggaggaccacugccaguucagcagacccagccccaucggcuaccugggccugcugagccagagaaccagagacaucuacaucagcagaagaagaagaggcaccuucaccuggacccugagcgacagcgagggcaaggacacccccggcggcuacugccugaccagauggaugcugaucgaggccgagcugaagugcuucggcaacaccgccguggccaagugcaacgagaagcacgacgaggaguucugcgacaugcugagacuguucgacuucugcaagcaggccauccagagacugaaggcccccgcccagaugagcauccagcugaucaacaaggccgugaacgcccugaucaacgaccagcugaucaugaagaaccaccugagagacaucaugggcauccccuacugcaacuacagcaaguacugguaccugaaccacaccaccaccggcaagaccagccugcccaagugcuggcuggugagcaacggcagcuaccugaacgagacccacuucagcgacgacaucgagcagcaggccgacaacaugaucaccgagaugcugcagaaggaguacauggagagacagggcaagaccccccugggccugguggaccuguucguguucagcaccagcuucuaccugaucagcaucuuccugcaccuggugaagauccccacccacagacacguggugggcaagagcugccccaagccccacagacugaaccacaugggcaucugcagcugcggccuguacggccagcccggcgugcccgugaaguggaagagaugaggacuaguuauaagacugacuagcccgaugggccucccaacgggcccuccuccccuccuugcaccgagauuaauaaaaaaaaaaaaaaaaaaaaaaaaaaaaaaaaaaaaaaaaaaaaaaaaaaaaaaaaaaaaaaaaaaaaaaaaaaaaaaaaaaaaaaaaaaaaaaaaaaaa

SEQ ID NO: 24608 - RNA, 1665 nt, Artificial Sequence
  mRNA product Design i-3 (A100) comprising derived and/or modified sequence from MOPV/LASV reassortant(IGS-1;Clade IV)__AFY05576__GPCmut2 (opt4)
aggagaaagcuuaccaugggccagaucgugaccuucuuccaggaggugccccacgugaucgaggaggugaugaacaucgugcugaucgcccugagcgugcuggccgugcugaagggccuguacaacuucgccaccugcggccuggugggccuggugaccuuccugcugcugugcggcagaagcugcaccaccagccuguacaagggcguguacgagcugcagacccuggagcugaacauggagacccugaacaugugcaugccccugagcugcaccaagaacaacagccaccacuacaucauggugggcaacgagaccggccuggagcugacccugaccaacaccagcaucaucaaccacaaguucugcaaccugagcgacgcccacaagaagaaccuguacgaccacgcccugaugagcaucaucagcaccuuccaccugagcauccccaacuucaaccaguacgaggccaugagcugcgacuucaacggcggcaagaucagcgugcaguacaaccugagccacagcuacgccggcgacgccgccaaccacugcggcaccguggccaacggcgugcugcagaccuucaugagaauggccuggggcggcagcuacaucgcccuggacagcggcagaggcaacugggacugcaucaugaccagcuaccaguaccugaucauccagaacaccaccugggaggaccacugccaguucagcagacccagccccaucggcuaccugggccugcugagccagagaaccagagacaucuacaucagcagaagaagaagaggcaccuucaccuggacccugagcgacagcgagggcgaggacacccccggcggcuacugccugaccagauggaugcugaucgaggccgagcugaagugcuucggcaacaccgccguggccaagugcaacgagaagcacgacgaggaguucugcgacaugcugagacuguucgacuucugcaagcaggccauccagagacugaaggcccccgcccagaugagcauccagcugaucaacaaggccgugaacgcccugaucaacgaccagcugaucaugaagaaccaccugagagacaucaugggcauccccuacugcaacuacagcaaguacugguaccugaaccacaccaccaccggcagaaccagccugcccaagugcuggcuggugagcaacggcagcuaccugaacgagacccacuucagcgacgacaucgagcagcaggccgacaacaugaucaccgagaugcugcagaaggaguacauggagagacagggcaagaccccccugggccugguggaccuguucguguucagcaccagcuucuaccugaucagcaucuuccugcaccuggugaagauccccacccacagacacaucgugggcaagagcugccccaagccccacagacugaaccacaugggcaucugcagcugcggccuguacaagcagcccggcgugcccgugaaguggaagagaugaggacuaguuauaagacugacuagcccgaugggccucccaacgggcccuccuccccuccuugcaccgagauuaauaaaaaaaaaaaaaaaaaaaaaaaaaaaaaaaaaaaaaaaaaaaaaaaaaaaaaaaaaaaaaaaaaaaaaaaaaaaaaaaaaaaaaaaaaaaaaaaaaaaa

SEQ ID NO: 24609 - RNA, 1665 nt, Artificial Sequence
  mRNA product Design i-3 (A100) comprising derived and/or modified sequence from LASV(LM765-SLE-2012;Clade IV)__AIT17814__GPCmut2 (opt4)
aggagaaagcuuaccaugggccagaucgugaccuucuuccaggaggugccccacgugaucgaggaggugaugaacaucgugcugaucgcccugagcauccuggccgugcugaagggccuguacaacuucgccaccugcggccuggugggccuggugaccuuccugcugcugugcggcagaagcugcaccaccagccuguacaagggcguguacgagcugcagacccuggagcugaacauggagacccugaacaugugcaugccccugagcugcaccaagaacaacagccaccacuacaucauggugggcaacgagaccggccuggagcugacccugaccaacaccagcaucaucgaccacaaguucugcaaccugagcgacgcccacagaaagaaccuguacgaccacgcccugaugagcaucaucagcaccuuccaccugagcauccccaacuucaaccaguacgaggccaugagcugcgacuucaacggcggcaagaucagcgugcaguacaaccugagccacagcuacgccaaggacgccgccgaccacugcggcaccguggccaacggcgugcugcagaccuucaugagaauggccuggggcggcagcuacaucgcccuggacagcggcagaggcagaugggacugcaucaugaccagcuaccaguaccugaucauccagaacaccaccugggaggaccacugccaguucagcagacccagccccaucggcuaccugggccugcugagccagagaaccagagacaucuacaucagcagaagaagaagaggcaccuucaccuggacccugagcgacagcgagggcaaggacacccccggcggcuacugccugaccagauggaugcugaucgaggccgagcugaagugcuucggcaacaccgccguggccaagugcaacgagaagcacgacgaggaguucugcgacaugcugagacuguucgacuucugcaagcaggccauccagagacugaaggcccccgcccagaugagcauccagcugaucaacaaggccgugaacgcccugaucaacgaccagcugaucaugaagaaccaccugagagacaucaugggcauccccuacugcaacuacagcaaguacugguaccugaaccacaccaccaccggcaagaccagccugcccaagugcuggcuggugagcaacggcagcuaccugaacgagacccacuucagcgacgacaucgagcagcaggccgacaacaugaucaccgagaugcugcagaaggaguacauggagagacagggcaagaccccccugggccugguggaccuguucguguucagcaccagcuucuaccugaucagcaucuuccugcaccuggugaagauccccacccacagacacaucgugggcaagcccugccccaagccccacagacugaaccacaugggcaucugcagcugcggccuguacaagcagcccggcgugcccgugaaguggaagagaugaggacuaguuauaagacugacuagcccgaugggccucccaacgggcccuccuccccuccuugcaccgagauuaauaaaaaaaaaaaaaaaaaaaaaaaaaaaaaaaaaaaaaaaaaaaaaaaaaaaaaaaaaaaaaaaaaaaaaaaaaaaaaaaaaaaaaaaaaaaaaaaaaaaa

SEQ ID NO: 24610 - RNA, 1665 nt, Artificial Sequence
  mRNA product Design i-3 (A100) comprising derived and/or modified sequence from LASV(LM776-SLE-2012;Clade IV)__AIT17824__GPCmut2 (opt4)
aggagaaagcuuaccaugggccagaucgugaccuucuuccaggaggugccccacgugaucgaggaggugaugaacaucgugcugaucgcccugagcauccuggccgugcugaagggccuguacaacuucgccaccugcggccuggugggccuggugaccuuccugcugcugugcggcagaagcugcaccaccagcguguacaagggcguguacgagcugcagacccuggagcugaacauggagacccugaacaugugcaugccccugagcugcaccaagaacaacagccaccacuacaucauggugggcaacgagaccggccuggagcugacccugaccaacaccagcaucaucaaccacaaguucugcaaccugagcgacgcccacaagaagaaccuguacgaccacgcccugaugagcaucaucagcaccuuccaccugagcauccccaacuucaaccaguacgaggccaugagcugcgacuucaacggcggcaagaucagcgugcaguacaaccugagccacagcuacgccggcgacgccgccaaccacugcggcaccguggccaacggcgugcugcagaccuucaugagaauggccuggggcggcagcuacaucgcccuggacagcggccacggcaagugggacugcaucaugaccagcuaccaguaccugaucauccagaacaccaccugggaggaccacugccaguucagcagacccagccccaucggcuaccugggccugcugagccagagaaccagagacaucuacaucagcagaagaagaagaggcaccuucaccuggacccugagcgacagcgagggcaaggacacccccggcggcuacugccugaccagauggaugcugaucgaggccgagcugaagugcuucggcaacaccgccguggccaagugcaacgagaagcacgacgaggaguucugcgacaugcugagacuguucgacuucugcaagcaggccauccagagacugaaggcccccgcccagaugagcauccagcugaucaacaaggccgugaacgcccugaucaacgaccagcugaucaugaagaaccaccugagagacaucaugggcauccccuacugcaacuacagcaaguacugguaccugaaccacaccaccaccggcaagaccagccugcccaagugcuggcuggugagcaacggcagcuaccugaacgagacccacuucagcgacgacaucgagcagcaggccgacaacaugaucaccgagaugcugcagaaggaguacauggagagacagggcaagaccccccugggccugguggaccuguucguguucagcaccagcuucuaccugaucagcaucuuccugcaccuggugaagauccccacccacagacacaucgugggcaagagcugccccaagccccacagacugaaccacaugggcaucugcagcugcggccuguacaagcagcccggcgugcccgugagauggaagagaugaggacuaguuauaagacugacuagcccgaugggccucccaacgggcccuccuccccuccuugcaccgagauuaauaaaaaaaaaaaaaaaaaaaaaaaaaaaaaaaaaaaaaaaaaaaaaaaaaaaaaaaaaaaaaaaaaaaaaaaaaaaaaaaaaaaaaaaaaaaaaaaaaaaa

SEQ ID NO: 24611 - RNA, 1665 nt, Artificial Sequence
  mRNA product Design i-3 (A100) comprising derived and/or modified sequence from LASV(Mad39;Clade IV)__ANH09722__GPCmut2 (opt4)
aggagaaagcuuaccaugggccagaucgugaccuucuuccaggaggugccccacgugaucgaggaggugaugaacaucgugcugaucgcccugagcauccuggccgugcugaagggccuguacaacguggccaccugcggccugaucggccuggugaccuuccugcugcugugcggcagaagcugcaccaccacccuguacaagggcguguacgagcugcaggcccuggagcugaacauggagacccugaacaugugcaugccccugagcugcaccaagaacaacagccaccacuacaucagagugggcaacgagaccggccuggagcugacccugaccaacaccagccugaucaaccacaaguucugcaaccugagcgacgcccacaagaagaaccuguacgaccacgcccugaugagcaucaucagcaccuuccaccugagcauccccaacuucaaccaguacgaggccaugagcugcgacuucaacgacggcaagaucagcgugcaguacaaccugagccacaccuacgccggcgacaccgccaaccacugcggcaccguggccaacggcgugcugcagaccuucaugagaauggccuggggcggcagcuacaucgcccuggacagcggcagaggcggcugggacugcaucaugaccagcuaccaguaccugaucauccagaacaccaccugggaggaccacugccaguucagcagacccagccccaucggcuaccugggccugcugagccagagaaccagagacaucuacaucagcagaagaagaagaggcaccuucaccuggacccugagcgacagcgagggcaaggacacccccggcggcuacugccugaccagauggaugcugaucgaggccgagcugaagugcuucggcaacaccgccguggccaagugcaacgagaagcacgacgaggaguucugcgacaugcugagacuguucgacuucugcaagcaggccauccagagacugaaggcccccgcccagaugagcauccagcugaucaacaaggccgugaacgcccugaucaacgaccagcugaucaugaagaaccaccugagagacaucaugggcauccccuacugcaacuacagcaaguacugguaccugaaccacaccgugaccggcaagaccagccugcccaagugcuggcuggugagcaacggcagcuaccugaacgagacccacuucagcgacgacaucgagcagcaggccgacaacaugaucaccgagaugcugcagaaggaguacauggagagacagggcaagaccccccugggccugguggaccuguucguguucagcaccagcuucuaccugaucagcaucuuccugcaccuggugaagauccccacccacagacacguggugggcaagcccugccccaagccccacagacugaaccacaugggcaucugcagcugcggcuucuacaagcagcccggcgugcccgugagauggaagagaugaggacuaguuauaagacugacuagcccgaugggccucccaacgggcccuccuccccuccuugcaccgagauuaauaaaaaaaaaaaaaaaaaaaaaaaaaaaaaaaaaaaaaaaaaaaaaaaaaaaaaaaaaaaaaaaaaaaaaaaaaaaaaaaaaaaaaaaaaaaaaaaaaaaa

SEQ ID NO: 24612 - RNA, 1665 nt, Artificial Sequence
  mRNA product Design i-3 (A100) comprising derived and/or modified sequence from LASV(Z0947-SLE-2011;Clade IV)__AIT17840__GPCmut2 (opt4)
aggagaaagcuuaccaugggccagaucgugaccuucuuccaggaggugccccacgugaucgaggaggugaugaacaucgugcugaucgcccugagcauccuggccgugcugaagggccuguacaacuucgccaccugcggccuggugggccuggugaccuuccugcugcugugcggcagaagcugcaccaucagccuguacaagggcguguacgagcugcagacccuggagcugaacauggagacccugaacaugugcaugccccugagcugcaccaagaacaacagccaccacuacaucauggugggcaacgagaccggccuggagcugacccugaccaacaccagcaucaucaaccacaaguucugcaaccugagcgacgcccacaagaagaaccuguacgaccacgcccugaugagcaucaucagcaccuuccaccugagcauccccaacuucaaccaguacgaggccaugagcugcgacuucaacggcggcaagaucagcgugcaguacaaccugagccacagcuacgccggcgacgccgccaaccacugcggcaccguggccaacggcgugcugcagaccuucaugagaauggccuggggcggcagcuacaucgcccuggacagcggcagagacagaugggacugcaucaugaccagcuaccaguaccugaucauccagaacaccaccugggaggaccacugccaguucagcagacccagccccaucggcuaccugggccugcugagccagagaaccagagacaucuacaucagcagaagaagaagaggcaccuucaccuggacccugagcgacagcgagggcaaggacacccccggcggcuacugccugaccagauggaugcugaucgaggccgagcugaagugcuucggcaacaccgccguggccaagugcaacgagaagcacgacgaggaguucugcgacaugcugagacuguucgacuucugcaagcaggccauccagagacugaaggcccccgcccagaugagcauccagcugaucaacaaggccgugaacgcccugaucaacgaccagcugaucaugaagaaccaccugagagacaucaugggcauccccuacugcaacuacagcaaguacugguaccugaaccacaccaccaccggcaagaccagccugcccaagugcuggcuggugagcaacggcagcuaccugaacgagacccacuucagcgacgacaucgagcagcaggccgacaacaugaucaccgagaugcugcagaaggaguacauggagagacagggcaagaccccccugggccugguggaccuguucguguucagcaccagcuucuaccugaucagcaucuuccugcaccuggugaagauccccacccacagacacaucgugggcaagcccugccccaagccccacagacugaaccacaugggcaucugcagcugcggccuguacaagcagcccggcgugcccgugaaguggaagagaugaggacuaguuauaagacugacuagcccgaugggccucccaacgggcccuccuccccuccuugcaccgagauuaauaaaaaaaaaaaaaaaaaaaaaaaaaaaaaaaaaaaaaaaaaaaaaaaaaaaaaaaaaaaaaaaaaaaaaaaaaaaaaaaaaaaaaaaaaaaaaaaaaaaa

SEQ ID NO: 24613 - RNA, 1665 nt, Artificial Sequence
  mRNA product Design i-3 (A100) comprising derived and/or modified sequence from LASV(Josiah;Clade IV)__NP_694870__GPCmut2 (opt5)
aggagaaagcuuaccaugggccagaucgugaccuucuuucaagaggucccccacguuauugaagaggugaugaacaucgugcugauugcccucagcguccuggcugugcuuaaggggcuguacaauuucgccacaugcggacucguuggccuggugacguuucuucugcucugugggagauccugcaccacaucucuguauaaaggagucuacgaacugcagacccucgagcugaacauggaaacacuuaauauguguaugccucugagcugcaccaagaacaauucccaucacuauaucauggugggcaacgagacagggcucgagcugacccuuacgaauaccucuauuaucaaccauaaauucuguaaucugagcgacgcgcacaagaaaaaccucuacgaucaugcucugauguccaucauuucuacauuucaccugagcaucccgaauuucaaccaguaugaagccauguccugcgacuuuaauggaggcaagauuagcguucaguacaaccucucucacuccuaugccggcgaugcugccaaucauugugggaccguggcuaacggaguccugcaaacauucaugcggauggccuggggcgggagcuacaucgcgcuugacucuggacgcggcaacugggauugcauuaugaccuccuaccaguaucugaucauucagaauacgacaugggaggaccacugucaguuuagcagacccucuccuaucggguaccucggacugcuuucccaacggacccgcgauaucuauauuagcagacggcgcagaggcacauucaccuggacccuguccgacucugaaggcaaggauacacccgggggauacugccucacgcgguggaugcugaucgaggccgagcugaaauguuuuggcaacaccgcuguggccaagugcaaugaaaaacaugacgaggaguucugcgauaugcuccgccuguuugacuucuguaagcaggcuauucagagacuuaaagccccugcgcagaugagcauccaacugauuaacaaggccgugaaugcucucaucaacgaucagcugaucaugaagaaucaccuucgggacauuauggggauccccuauugcaacuacuccaaauauugguaccugaaucacacaaccacaggacgcaccagccucccuaaguguuggcuggucucuaacggcuccuaccugaaugaaacgcauuucagcgacgauauugaacagcaagccgacaacaugaucacagagaugcuccagaaagaguauauggaaagacaggggaagaccccgcugggacuuguugaucuguuuguguucucuaccagcuuuuaccucauuuccaucuuccugcaccuggugaaaauccccacacaucggcacauugucggcaagucuugcccuaaaccccaucgccuuaaucacaugggcaucuguagcugcgggcucuauaagcagccuggagugcccguuaaguggaaaagaugaggacuaguuauaagacugacuagcccgaugggccucccaacgggcccuccuccccuccuugcaccgagauuaauaaaaaaaaaaaaaaaaaaaaaaaaaaaaaaaaaaaaaaaaaaaaaaaaaaaaaaaaaaaaaaaaaaaaaaaaaaaaaaaaaaaaaaaaaaaaaaaaaaaa

SEQ ID NO: 24614 - RNA, 1662 nt, Artificial Sequence
  mRNA product Design i-3 (A100) comprising derived and/or modified sequence from LASV(LP;Clade I)__AAF86701__GPCmut2 (opt5)
aggagaaagcuuaccaugggccagaucauuaccuucuuucaagaggugccccacgucaucgaagagguuaugaacauugugcugaucgcccucagccugcuugcuauucugaaggggcucuacaauaucgccacaugcggaaucauuggccugguggcguuccuuuuucugugugggaaauccugcucucucacgcugaagggaggcuaugaacugcagacccucgagcugaacauggaaacacuuaauauguguaugccucugagcugcaccaaaaacuccucucaucacuacaucagagucgggaaugagacaggacucgagcugacccuuacaaacaccagcauuaucaaucauaaguucuguaaccuguccgacgcucacaaaaagaaucucuaugaucaugcccugaugucuauuaucagcacguuucaccuguccauuccgaacuucaaucaguacgaagccaugagcugcgacuuuaacggcggcaagaucucugugcaguauaaucucucccacagcuacgcuggggaugccgcugagcauuguggaaccguugccaacggcgugcugcaaacauucaugcggauggcguggggagggcgcuauaucgcccuugacucuggcaaagggaauugggauugcauuaugaccuccuaccaguaccugaucauucagaacacaaccugggaagaccacugucaguuuagcagacccucuccuaucggauaucucggccugcuuucccaacggacgcgcgauauuuacaucagcagacggcgcagaggcacauucaccuggacacuguccgacucugaggggaacgagacccccggaggcuauugccucacccgguggaugcugaucgaagcugagcugaaguguuuugggaauacagccgucgcuaaaugcaacgaaaagcaugaugaggaguucugcgacaugcuccgccuguuugauuucuguaaacaggccauuagacggcuuaaggcgccugcccagaugagcauccagcugauuaauaaggcugugaacgcccucaucaaugaccaacugauuaugaaaaaccaccuucgcgauaucaugggaauccccuacugcaauuauuccaaguacugguaucugaaccacacgagcucuggcagaaccucccucccuaaauguuggcugauuagcaaugggucuuaccugaacgaaacacaguucagcgacgacaucgagcagcaagcugauaauaugauuaccgaaaugcuccagaaggaguacaucgaacggcagggaaaaacaccgcugggccuuguugacauuuuuaucuucuccaccucuuuuuaucugauuagcaucuuccuccaucugaucaagauucccacgcaccgccauaucgugggcaaaccuugccccaagccucacagacugaaccauaugggggucuguuccugcggacuuuacaagcaccccggcgugccgacaaaauggaagcggugaggacuaguuauaagacugacuagcccgaugggccucccaacgggcccuccuccccuccuugcaccgagauuaauaaaaaaaaaaaaaaaaaaaaaaaaaaaaaaaaaaaaaaaaaaaaaaaaaaaaaaaaaaaaaaaaaaaaaaaaaaaaaaaaaaaaaaaaaaaaaaaaaaaa

SEQ ID NO: 24615 - RNA, 1662 nt, Artificial Sequence
  mRNA product Design i-3 (A100) comprising derived and/or modified sequence from LASV(803213;Clade II)__AAF86703__GPCmut2 (opt5)
aggagaaagcuuaccaugggccagaucauuaccuucuuucaagaggugccccacgucaucgaagagguuaugaacauugugcugaucgcccucagccugcuugcuauucugaaggggaucuacaauguggccacaugcggacucuucggccugaucuccuuucuucugcucugugggagaucuugcagcgucacguauaaaggaguguacgaacugcagacccuggagcucaacauggcgaaucugaacauguguaugccucuuuccugcacaaagaauaacucucaucacuauauuaugguuggcaaugaaaccgggcuggagcucacacugaccaacacaagcaucauuaaucauaaauucuguaaccuuuccgacgcucacaagaaaaaucuguacgaucaugcccucaugucuaucauuagcaccuuucaccuguccaucccgaacuucaaucaguaugaggccaugagcugcgacuuuaacggaggcaagauuucugugcaguacaaucugucccacagcuucgcugucgaugccgcuaaccauuguggcacgaucgccaacggggugcuccaaaccuuuaugcggauggcguggggaggcucuuauaucgcccuggacuccgggaagggaaauugggauugcauuaugacaagcuaccaguaccuuaucauucagaacaccacaugggaagaccacugucaguucucucgccccuccccuaucggcuaucuggggcuccugagccaaagaacccgggauauuuacaucucccgcagacggcgcggaacguuuacauggacccuuucugacagcgagggcaaugaagcucccggcggguauugccugacaagauggaugcucaucgaggccgagcugaaauguuucggaaacaccgcuguugccaagugcaaugaaaaacaugaugaggaauuuugcgacaugcugcgccucuucgauuucuguaagcaggcgauuaaacggcugaagaccccugcccagauguccauccagcuuauuaacaaggcugugaaugcccugaucaacgaccaacucauuaugaaaaaucaccugagagauaucaugggcauccccuacugcaacuauagccgguacugguaucuuaaucacacagucacggggaagaccucucugccucgcuguuggcucguguccaacggaagcuaccugaaugagacacauuuuucugacgacauugaacagcaggcugauaacaugaucaccgagaugcugcaaaaagaguacauggacagacagggcaagacaccgcucgggcugguggaucuuuucgucuuuagcaccuccuucuaucugauuucuaucuuucuccaccugguuaaaauucccacgcaucggcacaucgugggaaagccuugccccaaaccucaucgccugaaucacaugggcauuuguagcugcggccuuuacaagcaccccggggugccggucaaguggaaaagaugaggacuaguuauaagacugacuagcccgaugggccucccaacgggcccuccuccccuccuugcaccgagauuaauaaaaaaaaaaaaaaaaaaaaaaaaaaaaaaaaaaaaaaaaaaaaaaaaaaaaaaaaaaaaaaaaaaaaaaaaaaaaaaaaaaaaaaaaaaaaaaaaaaaa

SEQ ID NO: 24616 - RNA, 1662 nt, Artificial Sequence
  mRNA product Design i-3 (A100) comprising derived and/or modified sequence from LASV(GA391;Clade III)__CAA36645__GPCmut2 (opt5)
aggagaaagcuuaccaugggccagaucgugaccuucuuucaagaggucccccacguuauugaagaggugaugaacaucgugcugauugcccucagcauccuggcuauucuuaaggggcuguacaaugucgccacaugcggacucaucggccuggugacguuccuucugcucuccgggagaucuuguagccugaucuauaaaggaaccuacgaacugcagacacucgagcugaacauggaaacccuuaauaugugcaugccucuguccuguacaaagaacaauucucaucacuauauucggguuggcaacgagaccgggcucgagcugacacuuaccaauacgagcauccugaaccauaaauuuugcaaucucuccgacgcgcacaagcgcaaccuguacgaucauucucugaugagcauuaucuccaccuuccaccucagcauuccgaauuuuaaccaguaugaagcuaugucuugugacuucaauggaggcaaaaucacagugcaguacaaccugucccacagcuuugccgucgaugccgcuggccauugcgggacccuugccaauggagugcugcaaacauucaugagaauggcuuggggcgggucuuauauugcccucgacuccggacggggcaacugggauuguaucaugaccagcuaccaguaccugaucauucagaacacgacaugggacgaucacugccaguuuucucgccccuccccuaucggguaucuuggacugcucagccaaagaacccgggacauuuacaucucccgcagacggcgcggcacauucaccuggacccugucugauagcgagggcaaugaaacacccgggggauauugucugacgagauggaugcucauugaggcggagcugaagugcuuuggcaacaccgccguugcuaaguguaaugaaaaacaugacgaggaguucugcgauaugcuucggcuguuugacuucugcaagcaggccauccgcagacucaaaaccccugcucagauguccauccagcugauuaacaaggccgugaaugcgcuuaucaacgaucaacugauuaugaaaaaucaccuccgggacaucauggggauucccuacuguaacuauagccgcuacugguaucugaaucacacaucuacaggaaagaccucccugccuagaugcuggcucaucagcaacggcucuuaccugaaugaaacgaaguucagcgacgauaucgaacagcaggccgacaacaugauuacagagaugcuucaaaaagaguacaucgaucggcaggggaagaccccgcugggacucgucgaccuguuuguguucuccaccucuuuuuaucugauuagcaucuuccuucaucucgugaaaauucccacacacagacauaucgucggcaagccuugucccaaaccucaccgccugaaucauaugggcauuugcuccugugggcuguacaagcagcccggaguuccggugcgguggaaaagaugaggacuaguuauaagacugacuagcccgaugggccucccaacgggcccuccuccccuccuugcaccgagauuaauaaaaaaaaaaaaaaaaaaaaaaaaaaaaaaaaaaaaaaaaaaaaaaaaaaaaaaaaaaaaaaaaaaaaaaaaaaaaaaaaaaaaaaaaaaaaaaaaaaaa

SEQ ID NO: 24617 - RNA, 1665 nt, Artificial Sequence
  mRNA product Design i-3 (A100) comprising derived and/or modified sequence from LASV(AV;Clade V)__CCA30314__GPCmut2 (opt5)
aggagaaagcuuaccaugggccagaucgugaccuucuuucaagaggucccccacguuauugaagaggugaugaacaucgugcugauugcccucagcauccuggcuguccuuaaggggcuguacaauauugccacaugcggacucaucggccugaucacguuccuucugcucugugggagauccugcucuagcaaccuguauaaaggaguguacgaacugcagucccucgaccugaauauggagacccuuaacauguguaugccucugucuugcacaaagaauaacagccaucacuauauucggguuggcaaugauaccgggcucgaacugacacuuaccaacacauccauccugaaucauaaauuuuguaaccucucugacgcgcacaagaaagaucuguacgaccaugcucugaugagcauuaucuccaccuuccaccucagcauuccgaauuuuaaccaguaugaggccaugucuugcgauuucaauggaggcaagaucuccgugcaguacaaccugagccacucuuaugccauugacgcugccaaucauuguggcacggucgcuaacgggauccuucaaaccuuuaugcgcauggccuggggaggcuccuacaucgcgcuggauagcgggagaggaaacugggacugcauuaugacaucuuaccaguaucucaucauucagaauaccacaugggagaaccacugucaguucucccggcccagcccuaucggcuaccuggggcuucugucccaacgcaccagagauauuuauaucucucggcgcagacggggaacguuuacauggacccucagcgacuccgaaggcaaugccacacccggcggguacugccugacccgcuggaugcugaucgaggcugaacucaaguguuucggaaacaccgccguggcuaaaugcaaugagaagcaugaugaggaauuuugcgacaugcugagacuuuucgauuuuuguaaacaggccauuagccggcugaagucuccugcgcagauguccauccagcucauuaacaaagccguuaaugcucugaucaacgaccaacuuauuaugaagaaucaucugcgcgacaucaugggcauccccuauugcaacuacagcaaguauugguaccucaaucacacaauuacggggaaaaccucucugccuaaguguuggcuggugagcaacggauccuaccucaaugagacacacuucucugaugacaucgaacagcaggccgauaacaugauuaccgagaugcugcaaaaagaauauauggagagacagggcaagacaccgcuugggcuggucgaccucuucguguuuagcaccuccuucuaccugaucagcauuuuucugcggcuugugaaaauccccacgcaccgccauauugucggaaagccuugccccaaaccucacagacucaaucauaugggcaucuguucuugcggccuguauaagcagcccgggguuccggugcgguggaagagaugaggacuaguuauaagacugacuagcccgaugggccucccaacgggcccuccuccccuccuugcaccgagauuaauaaaaaaaaaaaaaaaaaaaaaaaaaaaaaaaaaaaaaaaaaaaaaaaaaaaaaaaaaaaaaaaaaaaaaaaaaaaaaaaaaaaaaaaaaaaaaaaaaaaa

SEQ ID NO: 24618 - RNA, 1662 nt, Artificial Sequence
  mRNA product Design i-3 (A100) comprising derived and/or modified sequence from LASV(Togo/2016/7082;Clade VI)__AMR44577__GPCmut2 (opt5)
aggagaaagcuuaccaugggccagaucauuaccuucuuucaagaggugccccacgucaucgaagagguuaugaacauugugcugaucgcccucagccugcuugcuauucugaaggggguguacaaugucgccacaugcggaaucaucggccucgugacguuccuguuucuuugugggagauccugcucucugauuuauaaaggaagcuacgaacuccagacccuggagcugaacauggaaacacucaauauguguaugccucuguccugcaccaagaacucuagccaucacuauauccggguuggcaaugagacagggcuugagcugacccucacaaacaccuccauuaucaaucauaaauucuguaaccugucugacgcgcacaagcgcaaucuuuacgaucaugcucugaugagcauucucuccacguuucaccugagcaucccgaacuucaaucaguaugaagccaugucuugcgacuuuaacggaggcaaaauuuccgugcaguacaaucugagccacgccuaugcugucgaugccgcugagcauuguggcaccguggccaacgggguucuccaaacauucaugagaauggcguggggaggcucuuacaucgcccuggacuccgggcggggaaauugggauugcaucaugaccagcuaccaguaucuuauuauccagaacacaaccugggaagaccacugucaguuuucucgccccuccccuauuggcuaccuggggcuccugagccaaagaacgcgggauaucuauauuucccgcagacggcgcggaacauucaccuggacacuuucugacagcgagggcaacgagacccccggcggguacugccugaccagauggaugcucaucgaagcugagcugaaguguuuuggaaauacagccguggcuaagugcaacgaaaaacaugaugaggaguucugcgacaugcugcggcucuuugauuucuguaagcaggccauccagcgccugaaauccccugcgcagaugagcauucaacuuaucaauaaggccgucaacgcucugauuaaugaccagcucaucaugaaaaaccaccugagagauaugaugggcauucccuauugcaauuacucuaaguauugguaccuuaaccacacguccagcgggcggaccucucugccuaaguguuggcucgugagcaauggauccuaccugaacgaaacacauuucucugacgacaucgagcagcaagccgauaauaugaucaccgaaaugcugcagaaagaguauauugaccgccagggcaagacaccgcucgggcugguggaucuuuuugucuucagcaccuccuuuuaccugaucagcauuuuccuccaccugaucaaaauucccacgcauagacacaucguuggaaagccuugccccaaaccucaucggcugaaccacaugggcauuuguucuugcggccuuuauaagcagcccggggugccgacaagauggaaacgcugaggacuaguuauaagacugacuagcccgaugggccucccaacgggcccuccuccccuccuugcaccgagauuaauaaaaaaaaaaaaaaaaaaaaaaaaaaaaaaaaaaaaaaaaaaaaaaaaaaaaaaaaaaaaaaaaaaaaaaaaaaaaaaaaaaaaaaaaaaaaaaaaaaaa

SEQ ID NO: 24619 - RNA, 1662 nt, Artificial Sequence
  mRNA product Design i-3 (A100) comprising derived and/or modified sequence from LASV(KAK-428;Clade n.d. (VII))__ANH09740__GPCmut2 (opt5)
aggagaaagcuuaccaugggccagaucgugaccuucuuucaagaggucccccacguuauugaagaggugaugaacaucgugcugauugcccucagccugcuugcuauccugaaggggcucuacaauuucgccacaugcggagucauuggccugaucacguuucuucugcucugugggagauccugcucugcgaccuauaaaggacaguacgaacugcagacacuggagcucaacauggaaagccugaauauguguaugccucuuuccugcaccaagaacaauucucaucacuauauccgggcuggcaacaauacagggcuggagcucacccugacaaacaccagcauuaucucccauaaauucuguaaucuuucugacgcccacaagaaaaaccuguacgaucauacgcucaugagcauuaucaccacauuucaccuguccauuccgaauuucaaccaguaugaggccaugagcugcgacuuuaauggaggcaagaucucuauucaauacaaccugucccacagcuaugcuggcgaugccgcucagcauugugggaccguggccaauggaguucuccagacauucaugcgcauggcguggggcgggucuuaccuggcccuugacuccggaagacggggcugggauugcaucaucagcucuuaccaguaucugauuauccaaaacaccacgugggacgaucacugucaguuuucccgccccagcccuauuggguaccucggauucgugucccagaagacaagagacaucuauauuucucggcgcagacggggcaccuuuacauggacccugagcgauuccgaaggccaugacaugcccgggggauacugccuuacccgcuggaugcugaucgaggcugaucucaaauguuucggcaacacagccgucgcuaagugcaaugaaaaacacgacgaggaguuuugcgauauguggagacuguucgacuucuguaagcaggccauccaacggcugaaagcgccugcccagaugaacauucagcucaucaauaaggcugugaacgcccugauuaaugaccaacuuaugaugaagaaccaucugcgcgauaucauggggauucccuauugcaauuacagcaaauuuugguaucucaacaauacgaccacaggaagaaccucucugccucgguguuggcuuaucuccaacggcagcuaccugaaugaaacacacuucucugacgauaucgagcagcaggcugacaacaugauuaccgaaaugcuccagaaggaguacauggaucgccaagggaaaacgccgcugggacugguugaccucuuuguguucagcacauccuuuuaucugaucaccauuuuccuucaccuggucaagauccccacccauagacacauugugggcaaaccuugccccaagccucaucggcucaaucacaugggcaucuguucuugcgggcuguacaaacagcccggagugccggucagauggaagcgcugaggacuaguuauaagacugacuagcccgaugggccucccaacgggcccuccuccccuccuugcaccgagauuaauaaaaaaaaaaaaaaaaaaaaaaaaaaaaaaaaaaaaaaaaaaaaaaaaaaaaaaaaaaaaaaaaaaaaaaaaaaaaaaaaaaaaaaaaaaaaaaaaaaaa

SEQ ID NO: 24620 - RNA, 1662 nt, Artificial Sequence; identical to SEQ ID NO: 24614
  mRNA product Design i-3 (A100) comprising derived and/or modified sequence from LASV(Pinneo-NIG-1969;Clade I)__AIT17836__GPCmut2 (opt5)

SEQ ID NO: 24621 - RNA, 1662 nt, Artificial Sequence
  mRNA product Design i-3 (A100) comprising derived and/or modified sequence from LASV(ISTH0009-NIG-2011;Clade II)__AIT17404__GPCmut2 (opt5)
aggagaaagcuuaccaugggccagaucauuaccuucuuucaagaggugccccacgucaucgaagagguuaugaacauugugcugaucgcccucagccugcuugcuauucugaaggggaucuacaauguggccacaugcggacucuucggccuggucuccuuucuucugcucugugggagaucuugcagcacgaccuauaaaggaguguacgaacugcagacacuggagcucgacauggcgucccugaacauguguaugccucuuucuugcaccaagaauaacagccaucacuauaucaugguuggcaaugaaacagggcuggagcucacccugacaaacaccuccauuaucaaucauaaauucuguaaccuuucugaugcucacaagaaaaaucuguacgaccaugcccucaugagcauuaucuccacguuucaccugagcauuccgaacuucaaucaguaugaggccaugucuugcgauuuuaacggaggcaagaucuccgugcaguacaaucugagccacgcuuaugccgucgacgcugccaaccauuguggcaccauugcgaauggggugcuccaaacauucaugcggauggccuggggaggcucuuacaucgcucuggauuccgggaagggaagcugggacugcaucaugaccucuuaccaguaucuuauuauccagaacacaaccugggaagaucacugucaguuuucccgccccagcccuauuggcuaccuggggcuccugucccaaagaacgcgggacaucuauauuucucgcagacggcgcggaacauucaccuggacacuuagcgauuccgagggcaacgaaacccccggcggguacugccugaccagauggaugcucaucgaggccgagcugaaauguuuuggaaauacagcuguugccaagugcaacgaaaaacaugacgaggaguucugcgauaugcugcggcucuuugacuucuguaagcaggcgauccgcagacugaaaacgccugcccagaugagcauucagcuuaucaauaaggcugugaacgcccugauuaaugaucaacucaucaugaagaaccaucugcgggacauuaugggcauccccuauugcaauuacucuaaauauugguaccuuaaccacaccgucacagggaagaccucccugccucgcuguuggcucgugagcaauggaucuuaccugaacgaaacacacuucagcgacgauaucgaacagcaggcugacaauaugauuaccgagcugcuccaaaaagaguauauggauagacagggcaagacgccgcuggggcuuguggaccuguuugucuucuccacaucuuuuuaccucaucagcauuuuccugcaccugaucaaaauucccacccaucggcacaucaccggaaagccuugccccaaaccucaucgccuuaaccacaugggcauuuguuccugcggccucuauaagcaccccgggguuccggugaaguggaaaagaugaggacuaguuauaagacugacuagcccgaugggccucccaacgggcccuccuccccuccuugcaccgagauuaauaaaaaaaaaaaaaaaaaaaaaaaaaaaaaaaaaaaaaaaaaaaaaaaaaaaaaaaaaaaaaaaaaaaaaaaaaaaaaaaaaaaaaaaaaaaaaaaaaaaa

SEQ ID NO: 24622 - RNA, 1662 nt, Artificial Sequence
  mRNA product Design i-3 (A100) comprising derived and/or modified sequence from LASV(ISTH2010-NIG-2012;Clade II)__AIT17482__GPCmut2 (opt5)
aggagaaagcuuaccaugggccagaucauuaccuucuuucaagaggugccccacgucaucgaagagguuaugaacauugugcugaucgcccucagccugcuugcuauucugaaggggaucuacaauguggccacaugcggacucuucggccuggucuccuuucuucugcucugugggagaucuugcagcacgaccuauaaaggaguguacgaacugcagacacuggagcucgacauggcgucccugaacauguguaugccucuuucuugcaccaagaauaacagccaucacuauaucaugguuggcaaugaaacagggcuggagcucacccugacaaacaccuccauuaucaaucauaaauucuguaaccuuucugaugcucacaagaaaaaucuguacgaccaugcccucaugagcauuaucuccacguuucaccugagcauuccgaacuucaaucaguaugaggccaugucuugcgauuuuaacggaggcaagaucuccgugcaguacaaucugagccacgcuuaugccgucgacgcugccaaccauuguggcaccauugcgaauggggugcuccaaacauucaugcggauggccuggggaggcucuuacaucgcucuggauuccgggaagggaagcugggacugcaucaugaccucuuaccaguaucuuauuauccagaacauuacaugggaagaucacugucaguuuucccgccccagcccuaucggcuaccuggggcuccugucccaaagaacccgggacauuuauaucucucgcagacggcgcggaacguucacauggacccuuagcgauuccgagggcaacgaaacacccggcggguacugccugaccagauggaugcucaucgaggccgagcugaaauguuuuggaaauaccgcuguugccaagugcaacgaaaaacaugacgaggaguucugcgauaugcugcggcucuuugacuucuguaagcaggcgauucgcagacugaaaacgccugcccagaugagcauccagcuuauuaauaaggcugugaacgcccugaucaaugaucaacucauuaugaagaaccaucugcgggacaucaugggcauccccuauugcaauuacucuaaauauugguaccuuaaccacacagucaccgggaagacaucccugccucgcuguuggcucgugagcaauggaucuuaccugaacgaaacccacuucagcgacgauauugaacagcaggcugacaauaugaucacagagcugcuccaaaaagaguauauugauagacagggcaagaccccgcuggggcuuguggaccuguuugucuucuccacgucuuuuuaccucaucagcauuuuccugcaccugguuaaaauccccacacaucggcacguggugggaaagccuugccccaaaccucaucgccuuaaccacaugggcauuuguuccugcggccucuauaagcaccccggggucccggugaaguggaaaagaugaggacuaguuauaagacugacuagcccgaugggccucccaacgggcccuccuccccuccuugcaccgagauuaauaaaaaaaaaaaaaaaaaaaaaaaaaaaaaaaaaaaaaaaaaaaaaaaaaaaaaaaaaaaaaaaaaaaaaaaaaaaaaaaaaaaaaaaaaaaaaaaaaaaa

SEQ ID NO: 24623 - RNA, 1662 nt, Artificial Sequence
  mRNA product Design i-3 (A100) comprising derived and/or modified sequence from LASV(Lassa virus/H.sapiens-wt/NGA/2015/ISTH_0543;Clade II)__AVO03639__GPCmut2 (opt5)
aggagaaagcuuaccaugggccagaucauuaccuucuuucaagaggugccccacgucaucgaagagguuaugaacauugugcugaucgcccucagccugcuugcuauucugaaggggaucuacaauguggccacaugcggacucuucggccuggucuccuuucuucugcucugugggagaucuugcagcacgaccuauaaaggaguguacgaacugcagacacuggagcucgacauggcgaaccugaauauguguaugccucuuuccugcaccaagaacaauucucaucacuauaucaugguuggcaacgaaacagggcuggagcucacccugacaaauaccagcauuaucaaccauaaauucuguaaucuuuccgaugcucacaagaaaaaccuguacgaccaugcccucaugucuauuaucagcacguuucaccuguccauuccgaauuucaaccaguaugaggccaugagcugcgauuuuaauggaggcaagaucucugugcaguacaaccugucccacaccuaugcugucgacgccgcuaaucauuguggcacaauugccaacggggugcuccaaaccuucaugcggauggcguggggaggcagcuacaucgcccuggauucugggaagggauccugggacugcaucaugacaagcuaccaguaucuuguuauucagaacaccacgugggaagaucacugucaguuuucucgccccuccccuaucggcuaccuggggcuccugagccaaagaacacgggacauuuauaucucccgcagacggcgcggaaccuucacauggacccuuucugauagcgagggcaaugaaacccccggcggguacugccugacaagauggaugcucauugaggcugagcugaaauguuuuggaaacacggccguggcuaagugcaaugaaaaacaugacgaggaguucugcgauaugcugcggcucuuugacuucuguaagcaggccauccgcagacugaaaaccccugcgcagauguccauccagcuuauuaacaaggccgucaaugcucugaucaacgaucaacucauuaugaagaaucaucugcgggacaucaugggcauucccuauugcaacuacagcaaauauugguaccuuaaucacacagugaccgggaagacaucucugccucgcuguuggcucguguccaacggaagcuaccugaaugaaacccacuucucugacgauaucgaacagcaggccgacaacaugaucacggagcugcuccaaaaagaguauauugauagacagggcaagacaccgcuggggcuugucgaccuguuuguuuucagcaccuccuuuuaccucaucucuauuuuccugcaccuggugaaaauccccacccaucggcacauuacaggaaagccuugccccaaaccucaucgccuuaaucacaugggcaucuguagcugcggccucuauaagcaccccggggugccggucaaguggaaaagaugaggacuaguuauaagacugacuagcccgaugggccucccaacgggcccuccuccccuccuugcaccgagauuaauaaaaaaaaaaaaaaaaaaaaaaaaaaaaaaaaaaaaaaaaaaaaaaaaaaaaaaaaaaaaaaaaaaaaaaaaaaaaaaaaaaaaaaaaaaaaaaaaaaaa

SEQ ID NO: 24624 - RNA, 1662 nt, Artificial Sequence
  mRNA product Design i-3 (A100) comprising derived and/or modified sequence from LASV(Lassa virus/H.sapiens-wt/NGA/2016/ISTH_0009;Clade II)__AVO03571__GPCmut2 (opt5)
aggagaaagcuuaccaugggccagaucauuaccuucuuucaagaggugccccacgucaucgaagagguuaugaacauugugcugaucgcccucagccugcuugcuauucugaaggggaucuacaauguggccacaugcggacuccugggccuugucuccuuccugcuccugugugggagaucuugcagcacgaccuauaaaggaguguacgaacugcagacacucgagcuggacauggcgucccuuaacauguguaugccucugucuugcaccaagaauaacagccaucacuauaucaugguuggcaaugaaacagggcucgagcugacccuuacaaacaccuccauuaucaaucauaaauuuuguaaccugucugaugcucacaagaaaaaucucuacgaccaugcccugaugagcauuaucuccacguuccaccugagcauuccgaacuuuaaucaguaugaggccaugucuugcgauuucaacggaggccggaucuccgugcaguacaaucucagccacucuuaugcugucgacgccgcuaaccauuguggcaccauugccaauggggugcugcaaacauuuaugcgcauggcguggggaggcuccuacaucgcccuugauagcgggaagggaucuugggacugcaucaugaccuccuaccaguaucugauuauccagaacacaaccugggaagaucacugucaguucagcagacccuccccuauuggcuaccucgggcugcuuucucaacggacgcgcgacaucuauauuagcagacggcgcagaggaacauuuaccuggacacuguccgauagcgagggcaacgaaacccccggcggguacugccucacccgguggaugcugaucgaggcugagcugaaguguuucggaaauacagccguugcuaaaugcaacgaaaagcaugacgaggaauuuugcgauaugcuccgccuguucgacuuuuguaaacaggccaucagacggcuuaagacgccugcgcagaugucuauucagcugaucaauaaagccgugaacgcucucauuaaugaucaacugaucaugaagaaccaccuucgcgacauuaugggcauccccuauugcaauuacuccaaguauugguaccugaaccacaccgucacagggaaaaccagccucccuagauguuggcuggugucuaauggaagcuaccugaacgagacacauuucuccgacgauaucgaacagcaggccgacaauaugauuaccgagcuccugcaaaaggaguauaucgaucggcagggcaaaacgccgcuugggcugguggaccucuucgucuuuucuaccagcuucuaccugauuuccaucuuucugcaccuuguuaagauucccacacaucgccacaucaccggaaaaccuugccccaagccucauagacucaaccacaugggcauuuguagcugcggccuguauaaucaccccggggugccggugaaauggaagcggugaggacuaguuauaagacugacuagcccgaugggccucccaacgggcccuccuccccuccuugcaccgagauuaauaaaaaaaaaaaaaaaaaaaaaaaaaaaaaaaaaaaaaaaaaaaaaaaaaaaaaaaaaaaaaaaaaaaaaaaaaaaaaaaaaaaaaaaaaaaaaaaaaaaa

SEQ ID NO: 24625 - RNA, 1662 nt, Artificial Sequence
  mRNA product Design i-3 (A100) comprising derived and/or modified sequence from LASV(Lassa virus/H.sapiens-wt/NGA/2016/ISTH_0017;Clade II)__AVO03567__GPCmut2 (opt5)
aggagaaagcuuaccaugggccagaucauuaccuucuuucaagaggugccccacgucaucgaagagguuaugaacauugugcugaucgcccucagccugcuugcuauucugaaggggaucuacaauguggccacaugcggacucuucggccuggucuccuuucuucugcucugugggagaucuugcagcacgaccuauaaaggaguguacgaacugcagacacuggagcucgacauggcgucccugaacauguguaugccucuuucuugcaccaagaauaacagccaucacuauaucaugguuggcaaugaaacagggcuggagcucacccugacaaacaccuccauuaucaaucauaaauucuguaaccuuucugaugcucacaagaaaaaucuguacgaccaugcccucaugagcauuaucuccacguuucaccugagcauuccgaacuucaaucaguaugaggccaugucuugcgauuuuaacggaggcaagaucuccgugcaguacaaucugagccacaccuaugcuauugacgccgcuaaccauuguggcacaaucgccaaugggguccuccaaaccuucaugcggauggcguggggaggcucuuacaucgcccuggauuccgggaagggaagcugggacugcauuaugacaucuuaccaguaucuuaucauucagaacaccacgugggaagaucacugucaguuuucccgccccagcccuaucggcuaccuggggcuccugucccaaagaacacgggacauuuauaucucucgcagacggcgcggaaccuucacauggacccuuagcgauuccgagggcaacgaaacccccggcggguacugccugacaagauggaugcucaucgaggcugagcugaaauguuuuggaaauacggccguggcuaagugcaacgaaaaacaugacgaggaguucugcgauaugcugcggcucuuugacuucuguaagcaggccauucgcagacugaaaaccccugcgcagaugagcauccagcuuauuaauaaggccguuaacgcucugaucaaugaucaacucauuaugaagaaccaucugcgggacaucaugggcauccccuauugcaauuacucuaaauauugguaccuuaaccacacagugaccgggaagacaucccugccucgcuguuggcucgucagcaauggaucuuaccugaacgaaacccacuucagcgacgauauugaacagcaggccgacaauaugaucacggagcugcuccaaaaagaguauauggauagacagggcaagacaccgcuggggcuuguggaccuguuuguguucuccaccucuuuuuaccucauuagcaucuuccugcaccugguccggauucccacccaucgccacguuaucggaaaaccuugccccaagccucauagacuuaaccacaugggcauuuguuccugcggccucuauaaacaccccggggugccggugaaguggaagcggugaggacuaguuauaagacugacuagcccgaugggccucccaacgggcccuccuccccuccuugcaccgagauuaauaaaaaaaaaaaaaaaaaaaaaaaaaaaaaaaaaaaaaaaaaaaaaaaaaaaaaaaaaaaaaaaaaaaaaaaaaaaaaaaaaaaaaaaaaaaaaaaaaaaa

SEQ ID NO: 24626 - RNA, 1662 nt, Artificial Sequence
  mRNA product Design i-3 (A100) comprising derived and/or modified sequence from LASV(Lassa virus/H.sapiens-wt/NGA/2018/ISTH_0959;Clade II)__AVV65099__GPCmut2 (opt5)
aggagaaagcuuaccaugggccagaucauuaccuucuuucaagaggugccccacgucaucgaagagguuaugaacauugugcugaucgcccucagccugcuugcuauucugaaggggaucuacaauguggucacaugcggacucuucggccugguguccuuucuucugcucugugggagaucuugcagcacgaccuauaaaggaguuuacgaacugcagacacuggagcucgacauggccucccugaacauguguaugccucuuucuugcaccaagaauaacagccaucacuauaucauggugggcaaugaaacagggcuggagcucacccugacaaacaccuccauuaucaaucauaaauucuguaaccuuucugaugcgcacaagaaaaaucuguacgaccaugcucucaugagcauuaucuccacguuucaccugagcauuccgaacuucaaucaguaugaggccaugucuugcgauuuuaacggaggcaagaucuccguccaguacaaucugagccacgccuaugcuauugacgccgcuaaccauuguggcaccaucgccaauggggugcuccaaacauucaugcggauggcguggggaggcucuuacaucgcccuggauuccgggaagggaagcugggacugcauuaugaccucuuaccaguaucuuaucauucagaacacaaccugggaagaucacugucaguuuucccgccccagcccuaucggcuaccuggggcuccugucccaaagaacgcgggacauuuauaucucucgcagacggcgcggaacauucaccuggacacuuagcgauuccgagggcaacgaaacccccggcggguacugccugaccagauggaugcucaucgaggcugagcugaaauguuuuggaaauacagccguugcuaagugcaacgaaaaacaugacgaggaguucugcgauaugcugcggcucuuugacuucuguaagcaggccauucgcagacugaaaacgccugcgcagaugagcauccagcuuauuaauaaggccgugaacgcucugaucaaugaucaacucauuaugaagaaccaucugcgggacaucaugggcauccccuauugcaauuacucuaaauauugguaccuuaaccacaccgucacagggaagaccucccugccucgcuguuggcucgugagcaauggaucuuaccugaacgaaacacacuucagcgacgauauugaacagcaggccgacaauaugaucaccgagcugcuccaaaaagaguauauugauagacagggcaagacgccgcuggggcuuguggaccuguuugucuucuccacaucuuuuuaccucaucagcauuuuccugcaccugguuaaaauccccacccaucggcacgugauuggaaagccuugccccaaaccucaucgccuuaaccacaugggcaucuguuccugcggccucuauaagcaccccggggugccggucaaguggaaaagaugaggacuaguuauaagacugacuagcccgaugggccucccaacgggcccuccuccccuccuugcaccgagauuaauaaaaaaaaaaaaaaaaaaaaaaaaaaaaaaaaaaaaaaaaaaaaaaaaaaaaaaaaaaaaaaaaaaaaaaaaaaaaaaaaaaaaaaaaaaaaaaaaaaaa

SEQ ID NO: 24627 - RNA, 1662 nt, Artificial Sequence
  mRNA product Design i-3 (A100) comprising derived and/or modified sequence from LASV(LASV003-NIG-2008;Clade II)__AIT17580__GPCmut2 (opt5)
aggagaaagcuuaccaugggccagaucauuaccuucuuucaagaggugccccacgucaucgaagagguuaugaacauugugcugaucgcccucagccugcuugcuauucugaaggggaucuacaauguggccacaugcggacucuucggccuggucuccuuucuucugcucugugggagaucuugcagcacgaccuauaaaggaguguacgaacugcagacacuggagcucgacauggcgucccugaacauguguaugccucuuucuugcaccaagaauaacagccaucacuauaucaugguuggcaaugaaacagggcuggagcucacccugacaaacaccuccauuaucaaucauaaauucuguaaccuuucugaugcucacaagaaaaaucuguacgaccaugcccucaugagcauuaucuccacguuucaccugagcauuccgaacuucaaucaguaugaggccaugucuugcgauuuuaacggaggcaagaucuccgugcaguacaaucugagccacaccuaugcugucgacgccgcuaaccauuguggcacaauugccaauggggugcuccaaaccuucaugcggauggcguggggaggcucuuacaucgcccuggauuccgggaagggaagcugggacugcaucaugacaucuuaccaguaucuuauuauccagaacaccacgugggaagaucacugucaguuuucccgccccagcccuauuggcuaccuggggcuccugucccaaagaacacgggacaucuauauuucucgcagacggcgcggaaccuucacauggacccuuagcgauuccgagagcaacgaaacccccggcggcuacugccugacaagauggaugcucaucgaggcugagcugaaauguuuugggaauacggccguugcuaagugcaacgaaaaacaugacgaggaguucugcgauaugcugcggcucuuugacuucuguaagcaggccauccgcagacugaaagcgccugcccagaugucuauucagcuuaucaauaaggcugugaacgcccugauuaaugaucaacucaucaugaagaaccaucugcgggacauuaugggaauccccuauugcaauuacuccaaauauugguaccuuaaccacaccgucacaggccgcaccagccugccuagauguuggcucgugucuaaugggagcuaccugaacgaaacacacuucuccgacgauaucgaacagcaggcugacaauaugauuaccgagcugcuccaaaaggaguauauggaucggcagggaaaaacgccgcugggccuuguggaccuguuugucuucucuaccagcuuuuaccucaucuccauuuuccugcaccugguuaagauccccacacaucgccacgugauugggaaaccuugccccaagccucauagacuuaaccacaugggaaucuguagcugcggccucuauaaacaccccggcgugccggucaaguggaagcggugaggacuaguuauaagacugacuagcccgaugggccucccaacgggcccuccuccccuccuugcaccgagauuaauaaaaaaaaaaaaaaaaaaaaaaaaaaaaaaaaaaaaaaaaaaaaaaaaaaaaaaaaaaaaaaaaaaaaaaaaaaaaaaaaaaaaaaaaaaaaaaaaaaaa

SEQ ID NO: 24628 - RNA, 1662 nt, Artificial Sequence
  mRNA product Design i-3 (A100) comprising derived and/or modified sequence from LASV(LASV035-NIG-2009;Clade II)__AIT17588__GPCmut2 (opt5)
aggagaaagcuuaccaugggccagaucauuaccuucuuucaagaggugccccacgucaucgaagagguuaugaacauugugcugaucgcccucagccugcuugcuauucugaaggggaucuacaauguggccacaugcggacucuucggccuggucuccuuucuucugcucugugggagaucuugcagcacgaccuauaaaggaguguacgaacugcagacacuggagcucgacauggcgucccugaacauguguaugccucuuucuugcaccaagaauaacagccaucacuauaucaugguuggcaaugaaacagggcuggagcucacccugacaaacaccuccauuaucaaucauaaauucuguaaccuuucugaugcucacaagaaaaaucuguacgaccaugcccucaugagcauuaucuccacguuucaccugagcauuccgaacuucaaucaguaugaggccaugucuugcgauuuuaacggaggcaagaucuccgugcaguacaaucugagccacgcuuaugccgucgacgcugccaaccauuguggcaccauugcgaauggggugcuccaaacauucaugcggauggccuggggaggcucuuacaucgcucuggauuccgggaagggaagcugggacugcaucaugaccucuuaccaguaucuuauuauccagaacacaaccugggaagaucacugucaguuuucccgccccagcccuauuggcuaccuggggcuccugucccaaagaacgcgggacaucuauauuucucgcagacggcgcggaacauucaccuggacacuuagcgauuccgagggcaacgaaacccccggcggguacugccugaccagauggaugcucaucgaggccgagcugaaauguuuuggaaauacagcuguugccaagugcaacgaaaaacaugacgaggaguucugcgauaugcugcggcucuuugacuucuguaagcaggcgauccgcagacugaaagccccugcucagaugagcauucagcuuaucaauaaggccgugaacgcucugauuaaugaucaacucaucaugaagaaccaucugcgggacauuaugggcauccccuauugcaauuacucuaaauauugguaccuuaaccacacggucaccgggaagacaucccugccucgcuguuggcucgugagcaauggaucuuaccugaacgaaacccacuucagcgacgauaucgaacagcaggccgacaauaugauuacagagcugcuccaaaaagaguauaucgauagacagggcaagaccccgcuggggcuuguggaccuguuugucuucuccacgucuuuuuaccucauuagcaucuuccugcaccugguuaaaauucccacacaucggcacgugaucggaaagccuugccccaaaccucaucgccuuaaccacaugggcauuuguuccugcggccucuauaagcaccccggggugccggucaaguggaaaagaugaggacuaguuauaagacugacuagcccgaugggccucccaacgggcccuccuccccuccuugcaccgagauuaauaaaaaaaaaaaaaaaaaaaaaaaaaaaaaaaaaaaaaaaaaaaaaaaaaaaaaaaaaaaaaaaaaaaaaaaaaaaaaaaaaaaaaaaaaaaaaaaaaaaa

SEQ ID NO: 24629 - RNA, 1662 nt, Artificial Sequence
  mRNA product Design i-3 (A100) comprising derived and/or modified sequence from LASV(LASV1000-NIG-2009;Clade II)__AIT17782__GPCmut2 (opt5)
aggagaaagcuuaccaugggccagaucauuaccuucuuucaagaggugccccacgucaucgaagagguuaugaacauugugcugaucgcccucagccugcuugcuauucugaaggggaucuacaauguggccacaugcggacucuucggccuggucuccuuucuucugcucugugggagaucuugcagcacgaccuauaaaggaguguacgaacugcagacacuggagcucgacauggcgucccugaacauguguaugccucuuucuugcaccaagaauaacagccaucacuauaucaugguuggcaaugaaacagggcuggagcucacccugacaaacaccuccauuaucaaucauaaauucuguaaccuuucugaugcucacaagaaaaaucuguacgaccaugcccucaugagcauuaucuccacguuucaccugagcauuccgaacuucaaucaguaugaggccaugucuugcgauuuuaacggaggcaagaucuccgugcaguacaaucugagccacaccuaugcugucgacgccgcuaaccauuguggcacaauugccaauggggugcuccaaaccuucaugcggauggcguggggaggcucuuacaucgcccuggauuccgggaagggaagcugggacugcaucaugacaucuuaccaguaucuuauuauccagaacaccacgugggaagaucacugucaguuuucccgccccagcccuauuggcuaccuggggcuccugucccaaagaacacgggacaucuauauuucucgcagacggcgcggaaccuucacauggacccuuagcgauuccgagggcaacgaaacccccggcggguacugccugacaagauggaugcucaucgaggcugagcugaaauguuuuggaaauacggccguugcuaagugcaacgaaaaacaugacgaggaguucugcgauaugcugcggcucuuugacuucuguaagcaggccaucaaacgccugaagaccccugcgcagaugagcauucagcuuaucaauaaggccgugaacgcucugauuaaugaucaacucaucaugaaaaaccaccugagagacauuaugggcauccccuauugcaauuacucuaaguauugguaccuuaaccacacagucaccgggaaaacaucccugccucgguguuggcucgugagcaauggaucuuaccugaacgaaacccauuucagcgacgauaucgaacagcaggccgacaauaugauuacggagcugcuccaaaaggaguauaucgaucgccagggcaaaacaccgcuggggcuuguggaccuguuugucuucuccaccucuuuuuaccucauuagcaucuuccugcaccugguuaagauucccacccauagacacguggugggaaaaccuugccccaagccucaucggcuuaaccacaugggcaucuguuccugcggccucuauaagcaccccggggucccggugaaauggaagcgcugaggacuaguuauaagacugacuagcccgaugggccucccaacgggcccuccuccccuccuugcaccgagauuaauaaaaaaaaaaaaaaaaaaaaaaaaaaaaaaaaaaaaaaaaaaaaaaaaaaaaaaaaaaaaaaaaaaaaaaaaaaaaaaaaaaaaaaaaaaaaaaaaaaaa

SEQ ID NO: 24630 - RNA, 1662 nt, Artificial Sequence
  mRNA product Design i-3 (A100) comprising derived and/or modified sequence from LASV(LASV221-NIG-2010;Clade II)__AIT17624__GPCmut2 (opt5)
aggagaaagcuuaccaugggccagaucauuaccuucuuucaagaggugccccacgucaucgaagagguuaugaacauugugcugaucgcccucagccugcuugcuauucugaaggggaucuacaauguggccacaugcggacucuucggccuggucuccuuucuucugcucugugggagaucuugcagcacgaccuauaaaggaguguacgaacugcagacacuggagcucgacauggcgucccugaacauguguaugccucuuucuugcaccaagaauaacagccaucacuauaucaugguuggcaaugaaacagggcuggagcucacccugacaaacaccuccauuaucaaucauaaauucuguaaccuuucugaugcucacaagaaaaaucuguacgaccaugcccucaugagcauuaucuccacguuucaccugagcauuccgaacuucaaucaguaugaggccaugucuugcgauuuuaacggaggcaagaucuccgugcaguacaaucugagccacaccuaugcuauugacgccgcuaaccauuguggcacaaucgccaaugggguccuccaaaccuucaugcggauggcguggggaggcucuuacaucgcccuggauuccgggaagggaagcugggacugcauuaugacaucuuaccaguaucuuaucauucagaacaccacgugggaagaucacugucaguuuucccgccccagcccuaucggcuaccuggggcuccugucccaaagaacacgggacauuuauaucucucgcagacggcgcggaaccuucacauggacccuuagcgauuccgagggcaacgaaacccccggcggguacugccugacaagauggaugcucaucgaggcugagcugaaauguuuuggaaauacggccguggcuaagugcaacgaaaaacaugacgaggaguucugcgauaugcugcggcucuuugacuucuguaagcaggccauucgcagacugaaaaccccugcgcagaugagcauccagcuuauuaauaaggccguuaacgcucugaucaaugaucaacucauuaugaagaaccaucugcgggacaucaugggcauccccuauugcaauuacucuaaauauugguaccuuaaccacacagugaccgggaagacaucccugccucgcuguuggcucgucagcaauggaucuuaccugaacgaaacccacuucagcgacgauauugaacagcaggccgacaauaugaucacggagaugcugcaaaaagaguauauggauagacagggcaagacaccgcucgggcugguggaccuuuuuguguucuccaccucuuuuuaccugauuagcaucuuccuccaccuggucaaaauucccacccaucggcacguuaucggaaagccuugccccaaaccucaucgccugaaccacaugggcauuuguuccugcggccuuuauaagcaccccggggugccggugaaguggaaaagaugaggacuaguuauaagacugacuagcccgaugggccucccaacgggcccuccuccccuccuugcaccgagauuaauaaaaaaaaaaaaaaaaaaaaaaaaaaaaaaaaaaaaaaaaaaaaaaaaaaaaaaaaaaaaaaaaaaaaaaaaaaaaaaaaaaaaaaaaaaaaaaaaaaaa

SEQ ID NO: 24631 - RNA, 1662 nt, Artificial Sequence
  mRNA product Design i-3 (A100) comprising derived and/or modified sequence from LASV(LASV237-NIG-2010;Clade II)__AIT17638__GPCmut2 (opt5)
aggagaaagcuuaccaugggccagaucauuaccuucuuucaagaggugccccacgucaucgaagagguuaugaacauugugcugaucgcccucagccugcuugcuauucugaaggggaucuacaauguggccacaugcggacucuucggccuggucuccuuucuucugcucugugggagaucuugcagcacgaccuauaaaggaguguacgaacugcagacacuggagcucgacauggcgucccugaacauguguaugccucuuucuugcaccaagaauaacagccaucacuauaucaugguuggcaaugaaacagggcuggagcucacccugacaaacaccuccauuaucaaucauaaauucuguaaccuuucugaugcucacaagaaagaccuguacgaucaugcccucaugagcauuaucuccacguuucaccugagcauuccgaauuucaaccaguaugaggccaugucuugcgacuuuaauggaggcaagaucuccgugcaguacaaccugagccacaccuaugcugucgaugccgcuaaucauuguggcacaauugccaacggggugcuccaaaccuucaugcggauggcguggggaggcucuuacaucgcccuggacuccgggaagggaagcugggauugcaucaugacaucuuaccaguaucuuauuauccagaauaccacgugggaagaccacugucaguuuucccgccccagcccuauuggcuaccuggggcuccugucccaaagaacacgggauaucuauauuucucgcagacggcgcggaaccuucacauggacccuuagcgacuccgagggcaacgaaacccccggcggguacugccugacaagauggaugcucaucgaggcugagcugaaauguuuuggaaacacggccguugcuaagugcaaugaaaaacaugaugaggaguucugcgacaugcugcggcucuuugauuucuguaagcaggccauccgcagacugaaaaccccugcgcagaugagcauucagcuuaucaacaaggccgugaaugcucugauuaacgaccaacucaucaugaagaaucaucugcgggacauuaugggcauccccuauugcaacuacucuaaauauugguaccuuaaucacacagucaccgggaagacaucccugccucgcuguuggcucgugagcaacggaucuuaccugaaugaaacccacuucagcgaugacaucgaacagcaggccgauaacaugauuacggagcugcuccaaaaagaguauauggacagacagggcaagacaccgcuggggcuuguggaucuguuugucuucuccaccucuuuuuaccucaucagcauuuuccugcaccugaucaaaauucccacccaucggcacaucacaggaaagccuugccccaaaccucaucgccuuaaucacaugggcauuuguuccugcggccucuauaagcaccccgggguuccggugaaguggaaaagaugaggacuaguuauaagacugacuagcccgaugggccucccaacgggcccuccuccccuccuugcaccgagauuaauaaaaaaaaaaaaaaaaaaaaaaaaaaaaaaaaaaaaaaaaaaaaaaaaaaaaaaaaaaaaaaaaaaaaaaaaaaaaaaaaaaaaaaaaaaaaaaaaaaaa

SEQ ID NO: 24632 - RNA, 1662 nt, Artificial Sequence
  mRNA product Design i-3 (A100) comprising derived and/or modified sequence from LASV(LASV253-NIG-2011;Clade II)__AIT17670__GPCmut2 (opt5)
aggagaaagcuuaccaugggccagaucauuaccuucuuucaagaggugccccacgucaucgaagagguuaugaacauugugcugaucgcccucagccugcuugcuauucugaaggggaucuacaauguggccacaugcggacucuucggccuggucuccuuucuucugcucugugggagaucuugcagcacgaccuauaaaggaguguacgaacugcagacacuggagcucgacauggcgucccugaacauguguaugccucuuucuugcaccaagaauaacagccaucacuauaucaugguuggcaaugaaacagggcuggagcucacccugacaaacaccuccauuaucaaucauaaauucuguaaccuuucugaugcucacaagaaaaaucuguacgaccaugcccucaugagcauuaucuccacguuucaccugagcauuccgaacuucaaucaguaugaggccaugucuugcgauuuuaacggaggcaagaucuccgugcaguacaaucugagccacaccuaugcugucgacgccgcuaaccauuguggcacaauugccaauggggugcuccaaaccuucaugcggauggcguggggaggcucuuacaucgcccuggauuccgggaagggaagcugggacugcaucaugacaucuuaccaguaucuuauuauccagaacaccacgugggaagaucacugucaguuuucccgccccagcccuauuggcuaccuggggcuccugucccaaagaacacgggacaucuauauuucucgcagacggcgcggaaccuucacauggacccuuagcgauuccgagggcaacgaaacccccggcggguacugccugacaagauggaugcucaucgaggcugagcugaaauguuuuggaaauacggccguugcuaagugcaacgaaaaacaugacgaggaguucugcgauaugcugcggcucuuugacuucuguaagcaggccauccgcagacugaaagcgccugcccagaugagcauucagcuuaucaauaaggcugugaacgcccugauuaaugaucaacucaucaugaagaaccaucugcgggacauuaugggcauccccuauugcaauuacucuaaauauugguaccuuaaccacaccgucacagggcgcaccucccugccuagauguuggcucgugagcaauggaucuuaccugaacgaaacacacuucagcgacgauaucgaacagcaggcugacaauaugauuaccgagcugcuccaaaaggaguauaucgaucggcagggcaaaacgccgcuggggcuuguggaccuguuugucuucuccacaucuuuuuaccucauuagcaucuuccugcaccugguuaagauucccacccaucgccacaucauuggaaaaccuugccccaagccucauagacuuaaccacaugggcaucuguuccugcggccucuauaaacaccccggggugccggugaaguggaagcggugaggacuaguuauaagacugacuagcccgaugggccucccaacgggcccuccuccccuccuugcaccgagauuaauaaaaaaaaaaaaaaaaaaaaaaaaaaaaaaaaaaaaaaaaaaaaaaaaaaaaaaaaaaaaaaaaaaaaaaaaaaaaaaaaaaaaaaaaaaaaaaaaaaaa

SEQ ID NO: 24633 - RNA, 1662 nt, Artificial Sequence
  mRNA product Design i-3 (A100) comprising derived and/or modified sequence from LASV(LASV254-NIG-2011;Clade II)__AIT17674__GPCmut2 (opt5)
aggagaaagcuuaccaugggccagaucauuaccuucuuucaagaggugccccacgucaucgaagagguuaugaacauugugcugaucgcccucagccugcuugcuauucugaaggggaucuacaauguggccacaugcggacucuucggccuggucuccuuucuucugcucugugggagaucuugcagcacgaccuauaaaggaguguacgaacugcagacacuggagcucgacaugaccaaccugaauauguguaugccucuuuccugcacaaagaacaauucucaucacuauaucaugguuggcaacgaaaccgggcuggagcucacacugaccaauacgagcauuaucaaccauaaauucuguaaucuuuccgaugcgcacaagaaaaaccuguacaaucaugcucucaugucuauuaucagcaccuuucaccuguccauuccgaacuucaaucaguaugaggccaugagcugcgacuuuaacggaggcaagaucucugugcaguacaaucugucccacagcuaugccgucgaugcugccaaccauuguggcacaauugcuaacggggugcuccaaaccuucaugcggauggccuggggaggcucuuacaucgcgcuggacuccgggaagggaaauugggauugcaucaugacaagcuaccaguaucuuauuauccagaacaccacgugggaagaccacugucaguuuucucgccccuccccuauuggcuaccuggggcuccugagccaaagaacacgggauaucuauauuucccgcagacggcgcggaaccuucacauggacccuuucugacagcgagggcaaugaaacccccggcggguacugccugacaagauggaugcucaucgaggccgagcugaaauguuuuggaaacacggcuguugccaagugcaaugaaaaacaugaugaggaguucugcgacaugcugcggcucuuugauuucuguaagcaggcuauccgcagacugaaaaccccugcccaggcgaacauucagcuuaucaauaaggccgugaacgcucugauuaaugaccaacucaucaugaagaaccaucugcgggauauuaugggcauccccuauugcaauuacuccaaauauugguaccuuaaccacacagucaccgggaagacaagccugccucgcuguuggcucgugucuaauggauccuaccugaacgaaacccacuucagcgacgacaucgaacagcaggccgauaauaugauuacggagcugcuccaaaaagaguauauggacagacagggcaagacaccgcuggggcuuguggaucuguuugucuucucuaccagcuuuuaccucaucuccauuuuccugcaccugguuaaaauccccacccaucggcacgugauuggaaagccuugccccaaaccucaucgccuuaaccacaugggcaucuguucuugcggccucuauaagcaccccggggugccggucaaguggaaaagaugaggacuaguuauaagacugacuagcccgaugggccucccaacgggcccuccuccccuccuugcaccgagauuaauaaaaaaaaaaaaaaaaaaaaaaaaaaaaaaaaaaaaaaaaaaaaaaaaaaaaaaaaaaaaaaaaaaaaaaaaaaaaaaaaaaaaaaaaaaaaaaaaaaaa

SEQ ID NO: 24634 - RNA, 1662 nt, Artificial Sequence
  mRNA product Design i-3 (A100) comprising derived and/or modified sequence from LASV(Nig08-A19;Clade III)__ADU56618__GPCmut2 (opt5)
aggagaaagcuuaccaugggccagaucgugaccuucuuucaagaggucccccacguuauugaagaggugaugaacaucgugcugauugcccucagcauccuggcuauucuuaaggggcuguacaauaucgccacaugcggacucaucggccuggucacguuccuucugcucuccgggagaucuuguagcaugaccuauaaaggaguguacgaacugcagacacuggagcucaacaugaauacccugaacaugugcaugccucuuuccuguacaaagaauaacucucaucacuauauuaugguuggcaaugaaaccgggcuggagcucacacugaccaacacgagccuucugcaucacaaauuuugcaaucucuccgacgcgcauaagaaaaaccuguacgaucacacccugaugucuaucauuagcacauuccaccucuccaucccgaauuuuaaccaguaugaggcuaugagcugugacuucaauggaggcaagauuaccgugcaguacaaccugucucauuccuaugccaucgaugccgcuaaucacugcggcacagucgccaacggggugcuucaaaccuuuaugcggauggcuuggggaggcagcuacauugcccuggacucugggcgcggaaagugggauuguaucaugacguccuaccaguaucucaucauucagaacacaaccugggaagaccauugccaguucagcagacccucuccuaucggcuaccuggggcuucugucccaacggacacgcgauauuuauaucagcagacggcgcagaggaaccuuuaccuggacacucuccgacucugagggcaaugaaacgcccggcggguacugucugacccgguggaugcugauugaggcggagcucaaaugcuucggaaacacagccguugcuaaguguaaugaaaaacacgaugaggaauuuugcgacaugcugcgccuuuucgauuuuugcaagcaggccaucagacggcugaaagcuccugcccagaugagcauccagcucauuaacaaggcggugaaugcccugaucaacgaccaacuuauuaugaagaaucaucugcgcgauaucaugggcauucccuauuguaacuacuccaaauauugguaccucaaucacaccagcacagggagaaccucucugccucggugcuggcuggucuccaacggaagcuaccucaaugagacgcacuucucugacgacaucgaacagcaggcugauaacaugaucacagagaugcugcaaaaggaguaucuugaccgccagggcaaaaccccgcuggggcucguggaucuguucguguuuagcaccuccuucuaccugauuucuaucuuucuucaucucgucaagauucccacacacagacauaucguuggaaaaccuugucccaagccucaccggcugaaucacaugggcauuugcagcuguggccuguauaaacagcccggggugccggugagauggaagcgcugaggacuaguuauaagacugacuagcccgaugggccucccaacgggcccuccuccccuccuugcaccgagauuaauaaaaaaaaaaaaaaaaaaaaaaaaaaaaaaaaaaaaaaaaaaaaaaaaaaaaaaaaaaaaaaaaaaaaaaaaaaaaaaaaaaaaaaaaaaaaaaaaaaaa

SEQ ID NO: 24635 - RNA, 1665 nt, Artificial Sequence
  mRNA product Design i-3 (A100) comprising derived and/or modified sequence from LASV(G1180-SLE-2010;Clade IV)__AIT17168__GPCmut2 (opt5)
aggagaaagcuuaccaugggccagaucgugaccuucuuucaagaggucccccacguuauugaagaggugaugaacaucgugcugauugcccucagcauccuggcuguccuuaaggggcuguacaauuucgccacaugcggacucgugggccugcuuacguuucugcuccugugugggagauccugcaccgcgucucgguauaaaggaguuuacgaacugcagacacucgagcugaacauggaaacccuuaauauguguaugccucugagcugcacaaagaacaauucccaucacuauauuauggugggcaacgagaccgggcucgagcugacacuuaccaauacgucuaucaucaaccauaaauucuguaaucugagcgacgcucacaagaaaaaccucuacgaucaugcccugauguccauuaucucuaccuuucaccugagcauuccgaauuucaaccaguaugaagccauguccugcgacuuuaauggaggcaagaucagcguccaguacaaccucucucacuccuaugcuggcgaugccgcuaaucauugugggacaguggccaacggaguucugcaaaccuucaugcgcauggcguggggcgggagcuacauugcccuugacucuggacacggcuccugggauugcaucaugacaagcuaccaguaucugauuauccagaacaccacgugggaggaccauugucaguuuucuagacccuccccuaucggguaccucggacugcuuagccaacggacacgcgauauuuauaucuccagacggcgcagaggcaccuucacauggacccugucugacagcgaaggcaaggauacccccgggggauacugccucacacgguggaugcugauugaggcugagcugaaauguuuuggcaauacggccguggcuaagugcaacgaaaaacacgacgaggaguucugcgauaugcuccgccuguuugacuucuguaagcaggccauccagagacuuaaagcgccugcccagauguccauucaacugaucaauaaggcugucaacgcccucaucaaugaucagcugauuaugaagaaccaccuucgggacaucauggggauucccuauugcaauuacagcaaauauugguaccugaaccauaccacaaccggaaagacaucucucccuaaauguuggcugguguccaauggcagcuaccugaacgaaacccacuucucugacgauaucgaacagcaagcugacaauaugauuacggagaugcuccagaaggaguauauggaacgccaggggaaaacaccgcugggacuuguggaucuguuugucuucagcaccuccuuuuaccucaucucuaucuuccugcaucugguuaagauucccacccacagacauaucgugggcaaaagcugcccuaagccccaccggcuuaaccacaugggcauuuguuccugcgggcucuauaagcagccuggagugcccgucaaauggaagcgcugaggacuaguuauaagacugacuagcccgaugggccucccaacgggcccuccuccccuccuugcaccgagauuaauaaaaaaaaaaaaaaaaaaaaaaaaaaaaaaaaaaaaaaaaaaaaaaaaaaaaaaaaaaaaaaaaaaaaaaaaaaaaaaaaaaaaaaaaaaaaaaaaaaaa

SEQ ID NO: 24636 - RNA, 1665 nt, Artificial Sequence
  mRNA product Design i-3 (A100) comprising derived and/or modified sequence from LASV(G1442-SLE-2011;Clade IV)__AIT17180__GPCmut2 (opt5)
aggagaaagcuuaccaugggccagaucgugaccuucuuucaagaggucccccacguuauugaagaggugaugaacaucgugcugauugcccucagcauccuggcuguccuuaaggggcuguacaauguggccacaugcggacucauuggccugguuacguuccuucugcucugugggagauccugcaccacaacccuguauaaaggaguguacgaacugcagacacucgagcugaacauggaaacccuuaauauguguaugccucugucuugcacaaagaacaauagccaucacuauauccgggucggcaacgagaccgggcucgagcugacgcuuaccaauacauccaucauuaaccauaaauuuuguaaucugucugacgcgcacaagaaaaaccucuacgaucaugcucugaugagcaucauuuccaccuuccaccugucuaucccgaauuuuaaccaguaugaagccaugagcugcgacuucaauggaggcaagauuuccgugcaguacaaccucagccacucuuaugccggcgaugcugccaaucauugugggacaguugcuaacggagugcugcaaaccuuuaugcgcauggccuggggcggguccuacaucgcgcuugacagcggaagaggcaacugggauugcauuaugacgucuuaccaguaucugaucauccagaauacaaccugggacgaucacugucaguucucccggcccagcccuauuggguaccucggacugcuuucucaacgcacaagagacgucuauaucucccggcgcagacggggcaccuuuaccuggacacugagcgauuccgagggcaaggacacgcccgggggauacugccucacccgcuggaugcugauugaagccgagcugaaauguuucggcaacacagcuguggccaagugcaaugagaaacaugaugaagaguuuugcgacaugcucagacuguucgauuuuuguaagcaggcuauccagcggcuuaaagccccugcgcagaugucuauucaacugaucaacaaggccgugaaugcucucaucaacgaccagcugauuaugaagaaucaccuucgcgacaucauggggauucccuauugcaacuacagcaaauauugguaccugaauaacaccgccacaggaaagaccucccucccuaaauguuggcugaucagcaauggcucuuaccugaacgaaacgcacuucuccgaugacauugagcaggaagcugauaauaugaucacagagaugcuccaaaaggaguauauggaaagacaggggaaaaccccgcugggacuugucgaccuguucguuuuuagcaccucuuucuaccucaucagcauuuuucugcaucuggugaagauccccacacaccggcauauugugggcaaauccugcccuaagccccaccgccuuaaccauaugggcaucuguucuugcgggcucuauaagcagccuggaguccccgugagauggaaacggugaggacuaguuauaagacugacuagcccgaugggccucccaacgggcccuccuccccuccuugcaccgagauuaauaaaaaaaaaaaaaaaaaaaaaaaaaaaaaaaaaaaaaaaaaaaaaaaaaaaaaaaaaaaaaaaaaaaaaaaaaaaaaaaaaaaaaaaaaaaaaaaaaaaa

SEQ ID NO: 24637 - RNA, 1665 nt, Artificial Sequence
  mRNA product Design i-3 (A100) comprising derived and/or modified sequence from LASV(G3010-SLE-2013;Clade IV)__AIT17344__GPCmut2 (opt5)
aggagaaagcuuaccaugggccagaucgugaccuucuuucaagaggucccccacguuauugaagaggugaugaacaucgugcugauugcccucagcauccuggcuguccuuaaggggcuguacaauuucgccacaugcggacucgugggccugguuacguuucuucugcucugugggagauccugcaccacaucucuguauaaaggaguguacgaacugcagacccucgagcugaacauggaaacacuuaauauguguaugccucugagcugcaccaagaacaauucccaucacuauauuauggucggcaacgagacagggcucgagcugacccuuacgaauaccucuaucaucaaccauaaauucuguaaucugagcgacgcgcacaagaaaaaccucuacaaucaugcucugauguccauuaucucuacauuucaccugagcauuccgaacuucaaucaguaugaagccauguccugcgauuuuaacggaggcaagaucagcgugcaguacaaucucucucacuccuaugccggcgacgcugccagccauugugggaccguugcuaacggagugcugcaaacauucaugcggauggccuggggcgggucuuacauugcgcuugauuccggauacggcaagugggacugcaucaugaccagcuaucaguaccugauuauccagaacacgacaugggaggaucacugucaguuuucucgccccuccccuaucggguaucucggacugcuuagccaaagaacccgggacauuuacaucucccgcagacggcgcggcacauucaccuggacccugucugauagcgaaggcaaagacacacccgggggauauugccucacgagauggaugcugauugaggccgagcugaaguguuuuggcaauaccgcugucgccaaaugcaacgaaaagcaugaugaggaguucugcgacaugcuccggcuguuugauuucuguaaacaggcuauccagcgccuuaagaccccugcccagauguccauucaacugaucaauaaggcggugaacgcccucaucaaugaccagcugauuaugaaaaaccaccuuagagauaucauggggauucccuacugcaauuauagcaaguacugguaccugaaccacacaacaaccggaaaaacgucucucccuaaguguuggcugguguccaauggcagcuaucugaacgaaacacauuucucugacgacaucgaacagcaagcugauaauaugauuaccgagaugcuccagaaagaguacauggaacggcaggggaagaccccgcugggacuugucgaccuguuuguuuucagcacauccuuuuaucucaucucuaucuuccugcaccuggugaaaauucccacccaucgccacaucgugggcaagagcugcccuaagccccauagacuuaaccacaugggcauuuguuccugcgggcucuacaaacagccuggaguccccgugcgguggaagcgcugaggacuaguuauaagacugacuagcccgaugggccucccaacgggcccuccuccccuccuugcaccgagauuaauaaaaaaaaaaaaaaaaaaaaaaaaaaaaaaaaaaaaaaaaaaaaaaaaaaaaaaaaaaaaaaaaaaaaaaaaaaaaaaaaaaaaaaaaaaaaaaaaaaaa

SEQ ID NO: 24638 - RNA, 1665 nt, Artificial Sequence
  mRNA product Design i-3 (A100) comprising derived and/or modified sequence from LASV(G502-SLE-2009;Clade IV)__AIT17126__GPCmut2 (opt5)
aggagaaagcuuaccaugggccagaucgugaccuucuuucaagaggucccccacguuauugaagaggugaugaacaucgugcugauugcccucagcauccuggcuguccuuaaggggcuguacaauuucgccacaugcggacucgugggccugcuuacguuucugcuccugugugggagauccugcaccacaggacuguauaaaggcguuuacgaacuccagacccuggagcuuaacauggaaacacugaauauguguaugccucucucuugcaccaagaacaauagccaucacuauauuaugguggggaacgagacaggacuggagcuuacccugacgaauaccuccaucaucaaccauaaauucuguaaucucucugacgcgcacaagaaaaaccuguacgaucaugcucugaugagcauuaucuccacauuucaccucucuauuccgaauuucaaccaguaugaagccaugagcugcgacuuuaauggcggcaagaucuccguccaguacaaccugagccacucuuaugccggggaugcugccgaccauuguggaaccguggcuaauggcguucuucaaacauucaugcggauggccuggggaggguccuacauugcgcuggauagcggccgcgggagaugggacugcaucaugaccucuuaccaguaucucauuauccagaacacgacaugggaggaucacugucaguuuucccggcccagcccuaucggauaccugggccuucugucucaacgcaccagagacauuuauaucucccggcgcagacggggcacauucaccuggacccucagcgauuccgaagggaaggacacacccggaggcuacugccugacgcgcuggaugcugauugaggccgagcucaaauguuuugggaacaccgcuguggccaagugcaaugaaaaacaugaugaggaguucugcgacaugcugagacuuuuugauuucuguaagcaggcuauccagcggcugaaagccccugcgcagaugucuauucaacucaucaacaaggccgucaaugcucugaucaacgaccagcuugugaugaagaaucaucugcgcgacauuaugggaauccccuauugcaacuacagcagauauugguaccucaaucacacaaccacaggccggaccucccugccuaaauguuggcuggugagcaacgggucuuaccucaaugaaacgcacuucuccgaugacauugaacagcaagccgauaacaugaucacagagaugcugcagaaggaguauauggaacgccagggaaaaaccccgcuuggccuggucgaccucuuuguuuucagcaccucuuuuuaccugauuagcaucuuccugcaccuugugaagauccccacacauagacacauugugggcaaauccugcccuaagccccaucggcucaaucacauggggaucuguucuugcggacuguauaaacagccuggcguccccgugaaguggaagagaugaggacuaguuauaagacugacuagcccgaugggccucccaacgggcccuccuccccuccuugcaccgagauuaauaaaaaaaaaaaaaaaaaaaaaaaaaaaaaaaaaaaaaaaaaaaaaaaaaaaaaaaaaaaaaaaaaaaaaaaaaaaaaaaaaaaaaaaaaaaaaaaaaaaa

SEQ ID NO: 24639 - RNA, 1665 nt, Artificial Sequence
  mRNA product Design i-3 (A100) comprising derived and/or modified sequence from LASV(G733-SLE-2010;Clade IV)__AIT17154__GPCmut2 (opt5)
aggagaaagcuuaccaugggccagaucgugaccuucuuucaagaggucccccacguuauugaagaggugaugaacaucgugcugauugcccucagcauccuggcuguccuuaaggggcuguacaauuucgccacaugcggaauugugggccucguuuccuuucugcuucugugugggagaucuugcacgaccagccucuauaaaggaguguacgaacugcagacacuggagcucaacauggaaacccugaauauguguaugccucuuuccugcacaaagaacaauucucaucacuauaucauggucggcaacgagaccgggcuggagcucacacugaccaauacgagcaucauuaaccauaaauucuguaaucuuuccgacgcgcacaagaaaaaccuguacgaucaugcucucaugucuaucauuagcaccuuucaccuguccaucccgaauuucaaccaguaugaagccaugagcugcgacuuuaauggaggcaagauuucugugcaguacaaccugucccacagcuaugccggcgaugcugccaaucauugugggacaaucgcuaacggaguucuccaaaccuucaugcggauggccuggggcgggucuuacauugcgcuggacuccggacgcgauagaugggacugcaucaugacaagcuaccaguaucuuaucauucagaacaccacgugggaggaucacugucaguuuucucggcccuccccuaucggcuaccuggggcuccugagccaacgcacaagagacauuuauaucucccggcgcagacggggaaccuucacauggacccuuucugauagcgaaggcaaggacacccccggcggguacugccugacacgcuggaugcucauugaggccgagcugaaauguuuuggaaauacggcuguggccaagugcaacgaaaaacaugaugaggaguucugcgacaugcugagacucuuugauuucuguaagcaggcuauccagcggcugaaagccccugcgcagauguccauccaacuuauuaauaaggccgucaacgcucugaucaaugaccagcucauuaugaagaaccaucugcgcgacaucaugggcauucccuauugcaauuacagcaaauauugguaccuuaaccacaccacaaccgggaagacaucucugccuaaauguuggcucguguccaauggaagcuaccugaacgaaacccacuucucugaugacaucgaacagcaagccgauaauaugaucacggagaugcugcagaaggaguauauggaaagacagggcaaaacaccgcucgggcugguggaccuuuuugucuucagcaccuccuuuuaccugauuucuaucuuccuccaccugguuaagauucccacccaucggcacguggugggaaaaagcugcccuaagccccaucgccugaaccacaugggcaucuguuccugcggccuuuaugggcagccuggaguccccgugaaguggaaaagaugaggacuaguuauaagacugacuagcccgaugggccucccaacgggcccuccuccccuccuugcaccgagauuaauaaaaaaaaaaaaaaaaaaaaaaaaaaaaaaaaaaaaaaaaaaaaaaaaaaaaaaaaaaaaaaaaaaaaaaaaaaaaaaaaaaaaaaaaaaaaaaaaaaaa

SEQ ID NO: 24640 - RNA, 1665 nt, Artificial Sequence
  mRNA product Design i-3 (A100) comprising derived and/or modified sequence from MOPV/LASV reassortant(IGS-1;Clade IV)__AFY05576__GPCmut2 (opt5)
aggagaaagcuuaccaugggccagaucgugaccuucuuucaagaggucccccacguuauugaagaggugaugaacaucgugcugauugcccucagcguccuggcugugcuuaaggggcuguacaauuucgccacaugcggacucguuggccuggugacguuucuucugcucugugggagauccugcaccacaucucuguauaaaggagucuacgaacugcagacccucgagcugaacauggaaacacuuaauauguguaugccucugagcugcaccaagaacaauucccaucacuauaucauggugggcaacgagacagggcucgagcugacccuuacgaauaccucuauuaucaaccauaaauucuguaaucugagcgacgcgcacaagaaaaaccucuacgaucaugcucugauguccaucauuucuacauuucaccugagcaucccgaauuucaaccaguaugaagccauguccugcgacuuuaauggaggcaagauuagcguucaguacaaccucucucacuccuaugccggcgaugcugccaaucauugugggaccguggcuaacggaguccugcaaacauucaugcggauggccuggggcgggagcuacaucgcgcuugacucuggacgcggcaacugggauugcauuaugaccuccuaccaguaucugaucauucagaauacgacaugggaggaccacugucaguuuagcagacccucuccuaucggguaccucggacugcuuucccaacggacccgcgauaucuauauuagcagacggcgcagaggcacauucaccuggacccuguccgacucugaaggcgaggauacacccgggggauacugccucacgcgguggaugcugaucgaggccgaacugaaguguuuuggcaacaccgcuguggccaaaugcaaugagaagcaugacgaagaguucugcgauaugcuccgccuguuugacuucuguaaacaggcuauucagagacuuaaggccccugcgcagaugagcauccaacugauuaacaaagccgugaaugcucucaucaacgaucagcugaucaugaagaaucaccuucgggacauuauggggauccccuauugcaacuacuccaaguauugguaccugaaucacacaaccacaggacgcaccagccucccuaaauguuggcuggucucuaacggcuccuaccugaaugaaacgcauuucagcgacgauauugagcagcaagccgacaacaugaucacagagaugcuccagaaggaauauauggagagacaggggaaaaccccgcugggacuuguugaucuguuuguguucucuaccagcuuuuaccucauuuccaucuuccugcaccuggugaagauccccacacaucggcacauugucggcaaaucuugcccuaagccccaucgccuuaaucacaugggcaucuguagcugcgggcucuauaaacagccuggagugcccguuaaguggaagagaugaggacuaguuauaagacugacuagcccgaugggccucccaacgggcccuccuccccuccuugcaccgagauuaauaaaaaaaaaaaaaaaaaaaaaaaaaaaaaaaaaaaaaaaaaaaaaaaaaaaaaaaaaaaaaaaaaaaaaaaaaaaaaaaaaaaaaaaaaaaaaaaaaaaa

SEQ ID NO: 24641 - RNA, 1665 nt, Artificial Sequence
  mRNA product Design i-3 (A100) comprising derived and/or modified sequence from LASV(LM765-SLE-2012;Clade IV)__AIT17814__GPCmut2 (opt5)
aggagaaagcuuaccaugggccagaucgugaccuucuuucaagaggucccccacguuauugaagaggugaugaacaucgugcugauugcccucagcauccuggcuguccuuaaggggcuguacaauuucgccacaugcggacucgugggccugguuacguuucuucugcucugugggagauccugcaccacaucucuguauaaaggaguguacgaacugcagacccucgagcugaacauggaaacacuuaauauguguaugccucugagcugcaccaagaacaauucccaucacuauauuauggucggcaacgagacagggcucgagcugacccuuacgaauaccucuaucaucgaccauaaauucuguaaccugagcgaugcgcaccggaagaaucucuacgaccaugcucugauguccauuaucucuacauuucaccugagcauuccgaacuucaaucaguaugaagccauguccugcgauuuuaacggaggcaaaaucagcgugcaguacaaucucucucacuccuaugccaaggacgcugccgaucauuguggcaccguugcuaacggggugcugcaaacauucaugcgcauggccuggggaggcagcuacauugcgcuugacucugggagaggacggugggauugcaucaugaccuccuaccaguaucugauuauccagaauacgacaugggaggaccacugucaguuuagccgccccucuccuaucggcuaccucgggcugcuuucccaaagaacccgggauauuuauaucagccgcagacggcgcggaacauucaccuggacccuguccgacucugaaggcaaggauacacccggcggguacugccucacgagauggaugcugauugaggccgagcugaaauguuuuggaaacaccgcugucgccaagugcaacgaaaaacaugacgaggaguucugcgauaugcuccggcuguuugacuucuguaagcaggcuauccagcgccuuaaagccccugcgcagaugagcauucaacugaucaauaaggccgugaacgcucucaucaaugaccagcugauuaugaagaaccaccuuagagauaucaugggcauucccuauugcaauuacuccaaauauugguaccugaaccacacaaccacagggaagaccagccucccuaaauguuggcuggugucuaauggauccuaccugaacgaaacgcauuucagcgacgauaucgaacagcaagccgacaauaugauuacagagaugcuccagaaggaguauauggaacggcagggcaaaaccccgcuggggcuugucgaucuguuuguuuucucuaccagcuuuuaccucaucuccaucuuccugcaccuggugaagauucccacacaucgccacaucgugggaaaaccuugccccaagccucauagacuuaaccacaugggcauuuguucuugcggccucuauaagcagcccggggucccggugaaauggaagcggugaggacuaguuauaagacugacuagcccgaugggccucccaacgggcccuccuccccuccuugcaccgagauuaauaaaaaaaaaaaaaaaaaaaaaaaaaaaaaaaaaaaaaaaaaaaaaaaaaaaaaaaaaaaaaaaaaaaaaaaaaaaaaaaaaaaaaaaaaaaaaaaaaaaa

SEQ ID NO: 24642 - RNA, 1665 nt, Artificial Sequence
  mRNA product Design i-3 (A100) comprising derived and/or modified sequence from LASV(LM776-SLE-2012;Clade IV)__AIT17824__GPCmut2 (opt5)
aggagaaagcuuaccaugggccagaucgugaccuucuuucaagaggucccccacguuauugaagaggugaugaacaucgugcugauugcccucagcauccuggcuguccuuaaggggcuguacaauuucgccacaugcggacucgugggccugguuacguuucuucugcucugugggagauccugcaccacaucuguguauaaaggagucuacgaacugcagacccuggagcucaacauggaaacacugaauauguguaugccucuuagcugcaccaagaacaauucccaucacuauauuauggugggcaacgagacagggcuggagcucacccugacgaauaccucuaucaucaaccauaaauucuguaaucuuagcgacgcgcacaagaaaaaccuguacgaucaugcucucauguccauuaucucuacauuucaccugagcauuccgaauuucaaccaguaugaagccauguccugcgacuuuaauggaggcaagaucagcguucaguacaaccugucucacuccuaugccggcgaugcugccaaucauugugggaccguggcuaacggaguccuccaaacauucaugcggauggccuggggcgggagcuacauugcgcuggacucuggacacggcaagugggauugcaucaugaccuccuaccaguaucuuauuauccagaacacgacaugggaggaccauugucaguuuagccgccccucuccuaucggguaccugggacuccugucccaaagaacccgggauauuuauaucagccgcagacggcgcggcacauucaccuggacccuuuccgacucugaaggcaaagauacacccgggggauacugccugacgagauggaugcucauugaggccgagcugaaguguuuuggcaauaccgcuguggccaaaugcaacgaaaagcacgacgaggaguucugcgauaugcugcggcucuuugacuucuguaaacaggcuauccagcgccugaaggccccugcgcagaugagcauucaacuuaucaauaaggccgugaacgcucugaucaaugaucagcucauuaugaaaaaccaccugagagacaucauggggauucccuauugcaauuacuccaaguauugguaccuuaaccauacaaccacaggaaaaaccagccugccuaaguguuggcucgucucuaauggcuccuaccugaacgaaacgcacuucagcgacgauaucgaacagcaagccgacaauaugauuacagagaugcugcagaaagaguauauggaacggcaggggaagaccccgcucggacugguugaucuuuuuguguucucuaccagcuuuuaccugaucuccaucuuccuccaucuggugaaaauucccacacaccgccauaucgucggcaagucuugcccuaagccccacagacugaaccacaugggcauuuguagcugcgggcuuuauaaacagccuggagugcccguucgguggaagcgcugaggacuaguuauaagacugacuagcccgaugggccucccaacgggcccuccuccccuccuugcaccgagauuaauaaaaaaaaaaaaaaaaaaaaaaaaaaaaaaaaaaaaaaaaaaaaaaaaaaaaaaaaaaaaaaaaaaaaaaaaaaaaaaaaaaaaaaaaaaaaaaaaaaaa

SEQ ID NO: 24643 - RNA, 1665 nt, Artificial Sequence
  mRNA product Design i-3 (A100) comprising derived and/or modified sequence from LASV(Mad39;Clade IV)__ANH09722__GPCmut2 (opt5)
aggagaaagcuuaccaugggccagaucgugaccuucuuucaagaggucccccacguuauugaagaggugaugaacaucgugcugauugcccucagcauccuggcuguccuuaaggggcuguacaauguggccacaugcggacucauuggccugguuacguuccuucugcucugugggagauccugcaccacaacccuguauaaaggaguguacgaacugcaggcgcucgagcugaacauggaaacacuuaauauguguaugccucugucuugcaccaagaacaauagccaucacuauauccgggucggcaacgagacagggcucgagcugacccuuacgaauaccucccugaucaaccauaaauuuuguaaucucucugacgcucacaagaaaaaccuguacgaucaugcccugaugagcauuaucuccacauuccaccucucuauuccgaauuuuaaccaguaugaagccaugagcugcgacuucaaugauggaaagaucuccgugcaguacaaccugagccacaccuaugcuggcgacacagccaaucauuguggcaccguugcuaacggggugcuucaaacguuuaugcgcauggccuggggaggcucuuacauugcgcuggauuccgggagaggaggcugggacugcaucaugacaagcuaccaguaucucauuauccagaacaccacaugggaggaucacugucaguucucucggcccuccccuaucggguaccugggacuucugagccaacgcaccagagacauuuauaucucucggcgcagacggggcaccuuuacauggacgcucuccgauagcgaaggcaaggacacccccgggggauacugccugacacgcuggaugcugauugaggccgagcucaaauguuucggcaauaccgcugucgccaagugcaacgaaaaacaugaugaggaauuuugcgacaugcugagacuuuucgauuuuuguaagcaggcuauccagcggcugaaagccccugcgcagauguccauucaacucaucaauaaggccgugaacgcucugaucaaugaccagcuuauuaugaagaaccaucugcgcgacaucauggggauucccuauugcaauuacucuaaauauugguaccucaaccacacagugaccggaaagacgagccugccuaaauguuggcuggucuccaauggcagcuaccucaacgagacacacuucucugaugacaucgaacagcaagccgauaauaugauuaccgagaugcugcagaaggaguauauggaaagacaggggaaaaccccgcuuggacugguugaccucuucguguuuuccaccagcuucuaccugaucucuaucuuucugcaccuugugaagauucccacacaucggcacgucgugggcaaaccuugccccaagccucaucgccucaaccacaugggcaucuguagcugcggguucuauaagcagcccggaguuccggugagauggaaacggugaggacuaguuauaagacugacuagcccgaugggccucccaacgggcccuccuccccuccuugcaccgagauuaauaaaaaaaaaaaaaaaaaaaaaaaaaaaaaaaaaaaaaaaaaaaaaaaaaaaaaaaaaaaaaaaaaaaaaaaaaaaaaaaaaaaaaaaaaaaaaaaaaaaa

SEQ ID NO: 24644 - RNA, 1665 nt, Artificial Sequence
  mRNA product Design i-3 (A100) comprising derived and/or modified sequence from LASV(Z0947-SLE-2011;Clade IV)__AIT17840__GPCmut2 (opt5)
aggagaaagcuuaccaugggccagaucgugaccuucuuucaagaggucccccacguuauugaagaggugaugaacaucgugcugauugcccucagcauccuggcuguccuuaaggggcuguacaauuucgccacaugcggacucgugggccugguuacguuucuucugcucugugggagauccugcaccauuucucuguauaaaggaguguacgaacugcagacacucgagcugaacauggaaacccuuaauauguguaugccucugagcugcacaaagaacaauucccaucacuauaucauggucggcaacgagaccgggcucgagcugacacuuaccaauacgucuaucauuaaccauaaauucuguaaucugagcgacgcgcacaagaaaaaccucuacgaucaugcucugauguccaucauuucuaccuuucaccugagcaucccgaauuucaaccaguaugaagccauguccugcgacuuuaauggaggcaagauuagcgugcaguacaaccucucucacuccuaugccggcgaugcugccaaucauugugggacaguugcuaacggagugcugcaaaccuucaugcggauggccuggggcgggagcuacaucgcgcuugacucuggacgcgauagaugggacugcauuaugacauccuaccaguaucugaucauccagaacaccacgugggaggaucacugucaguuuagccggcccucuccuauuggcuaccucgggcugcuuucccaacgcacaagagacaucuauauuagccggcgcagacggggaaccuucacauggacccuguccgauucugaaggcaaggacacccccggcggguacugccucacacgcuggaugcugaucgaggccgagcugaaauguuuuggaaauacggcugucgccaagugcaacgaaaaacaugaugaggaguucugcgacaugcucagacuguuugauuucuguaagcaggcuauucagcggcuuaaagccccugcgcagaugagcauccaacugaucaauaaggccgugaacgcucucauuaaugaccagcugaucaugaagaaccaccuucgcgacauuaugggcauccccuauugcaauuacuccaaauauugguaccugaaccacaccacaaccgggaagacaagccucccuaaauguuggcuggugucuaauggauccuaccugaacgaaacccauuucagcgaugacauugaacagcaagccgauaauaugaucacggagaugcuccagaaggaguauauggaaagacagggcaaaacaccgcuggggcuugucgaccuguuuguuuucucuaccagcuuuuaccucaucuccauuuuccugcaccuggugaagauccccacccaucggcacauugugggaaaaccuugccccaagccucaucgccuuaaccacaugggcaucuguucuugcggccucuauaagcagcccggggucccggugaaauggaagagaugaggacuaguuauaagacugacuagcccgaugggccucccaacgggcccuccuccccuccuugcaccgagauuaauaaaaaaaaaaaaaaaaaaaaaaaaaaaaaaaaaaaaaaaaaaaaaaaaaaaaaaaaaaaaaaaaaaaaaaaaaaaaaaaaaaaaaaaaaaaaaaaaaaaa

SEQ ID NO: 24645 - protein, 491 aa, Artificial Sequence
  derived and/or modified protein sequence (artificial) from LASV(Josiah;Clade IV)__NP_694870__GPCmut3
MGQIVTFFQEVPHVIEEVMNIVLIALSVLAVLKGLYNFATCGLVGLVTFLLLCGRSCTTSLYKGVYELQTLELNMETLNMTMPLSCTKNNSHHYIMVGNETGLELTLTNTSIINHKFCNLSDAHKKNLYDHALMSIISTFHLSIPNFNQYEAMSCDFNGGKISVQYNLSHSYAGDAANHCGTVANGVLQTFMRMAWGGSYIALDSGRGNWDCIMTSYQYLIIQNTTWEDHCQFSRPSPIGYLGLLSQRTRDIYISRRRRGTFTWTLSDSEGKDTPGGYCLTRWMLIEAELKCFGNTAVAKCNEKHDEEFCDMLRLFDFNKQAIQRLKAPAQMSIQLINKAVNALINDQLIMKNHLRDIMGIPYCNYSKYCYLNHTTTGRTSLPKCCLVSNGSYLNETHFSDDIEQQADNMITEMLQKEYMERQGKTPLGLVDLFVFSTSFYLISIFLHLVKIPTHRHIVGKSCPKPHRLNHMGICSCGLYKQPGVPVKWKR

SEQ ID NO: 24646 - protein, 490 aa, Artificial Sequence
  derived and/or modified protein sequence (artificial) from LASV(LP;Clade I)__AAF86701__GPCmut3
MGQIITFFQEVPHVIEEVMNIVLIALSLLAILKGLYNIATCGIIGLVAFLFLCGKSCSLTLKGGYELQTLELNMETLNMTMPLSCTKNSSHHYIRVGNETGLELTLTNTSIINHKFCNLSDAHKKNLYDHALMSIISTFHLSIPNFNQYEAMSCDFNGGKISVQYNLSHSYAGDAAEHCGTVANGVLQTFMRMAWGGRYIALDSGKGNWDCIMTSYQYLIIQNTTWEDHCQFSRPSPIGYLGLLSQRTRDIYISRRRRGTFTWTLSDSEGNETPGGYCLTRWMLIEAELKCFGNTAVAKCNEKHDEEFCDMLRLFDFNKQAIRRLKAPAQMSIQLINKAVNALINDQLIMKNHLRDIMGIPYCNYSKYCYLNHTSSGRTSLPKCCLISNGSYLNETQFSDDIEQQADNMITEMLQKEYIERQGKTPLGLVDIFIFSTSFYLISIFLHLIKIPTHRHIVGKPCPKPHRLNHMGVCSCGLYKHPGVPTKWKR

SEQ ID NO: 24647 - protein, 490 aa, Artificial Sequence
  derived and/or modified protein sequence (artificial) from LASV(803213;Clade II)__AAF86703__GPCmut3
MGQIITFFQEVPHVIEEVMNIVLIALSLLAILKGIYNVATCGLFGLISFLLLCGRSCSVTYKGVYELQTLELNMANLNMTMPLSCTKNNSHHYIMVGNETGLELTLTNTSIINHKFCNLSDAHKKNLYDHALMSIISTFHLSIPNFNQYEAMSCDFNGGKISVQYNLSHSFAVDAANHCGTIANGVLQTFMRMAWGGSYIALDSGKGNWDCIMTSYQYLIIQNTTWEDHCQFSRPSPIGYLGLLSQRTRDIYISRRRRGTFTWTLSDSEGNEAPGGYCLTRWMLIEAELKCFGNTAVAKCNEKHDEEFCDMLRLFDFNKQAIKRLKTPAQMSIQLINKAVNALINDQLIMKNHLRDIMGIPYCNYSRYCYLNHTVTGKTSLPRCCLVSNGSYLNETHFSDDIEQQADNMITEMLQKEYMDRQGKTPLGLVDLFVFSTSFYLISIFLHLVKIPTHRHIVGKPCPKPHRLNHMGICSCGLYKHPGVPVKWKR

SEQ ID NO: 24648 - protein, 490 aa, Artificial Sequence
  derived and/or modified protein sequence (artificial) from LASV(GA391;Clade III)__CAA36645__GPCmut3
MGQIVTFFQEVPHVIEEVMNIVLIALSILAILKGLYNVATCGLIGLVTFLLLSGRSCSLIYKGTYELQTLELNMETLNMTMPLSCTKNNSHHYIRVGNETGLELTLTNTSILNHKFCNLSDAHKRNLYDHSLMSIISTFHLSIPNFNQYEAMSCDFNGGKITVQYNLSHSFAVDAAGHCGTLANGVLQTFMRMAWGGSYIALDSGRGNWDCIMTSYQYLIIQNTTWDDHCQFSRPSPIGYLGLLSQRTRDIYISRRRRGTFTWTLSDSEGNETPGGYCLTRWMLIEAELKCFGNTAVAKCNEKHDEEFCDMLRLFDFNKQAIRRLKTPAQMSIQLINKAVNALINDQLIMKNHLRDIMGIPYCNYSRYCYLNHTSTGKTSLPRCCLISNGSYLNETKFSDDIEQQADNMITEMLQKEYIDRQGKTPLGLVDLFVFSTSFYLISIFLHLVKIPTHRHIVGKPCPKPHRLNHMGICSCGLYKQPGVPVRWKR

SEQ ID NO: 24649 - protein, 491 aa, Artificial Sequence
  derived and/or modified protein sequence (artificial) from LASV(AV;Clade V)__CCA30314__GPCmut3
MGQIVTFFQEVPHVIEEVMNIVLIALSILAVLKGLYNIATCGLIGLITFLLLCGRSCSSNLYKGVYELQSLDLNMETLNMTMPLSCTKNNSHHYIRVGNDTGLELTLTNTSILNHKFCNLSDAHKKDLYDHALMSIISTFHLSIPNFNQYEAMSCDFNGGKISVQYNLSHSYAIDAANHCGTVANGILQTFMRMAWGGSYIALDSGRGNWDCIMTSYQYLIIQNTTWENHCQFSRPSPIGYLGLLSQRTRDIYISRRRRGTFTWTLSDSEGNATPGGYCLTRWMLIEAELKCFGNTAVAKCNEKHDEEFCDMLRLFDFNKQAISRLKSPAQMSIQLINKAVNALINDQLIMKNHLRDIMGIPYCNYSKYCYLNHTITGKTSLPKCCLVSNGSYLNETHFSDDIEQQADNMITEMLQKEYMERQGKTPLGLVDLFVFSTSFYLISIFLRLVKIPTHRHIVGKPCPKPHRLNHMGICSCGLYKQPGVPVRWKR

SEQ ID NO: 24650 - protein, 490 aa, Artificial Sequence
  derived and/or modified protein sequence (artificial) from LASV(Togo/2016/7082;Clade VI)__AMR44577__GPCmut3
MGQIITFFQEVPHVIEEVMNIVLIALSLLAILKGVYNVATCGIIGLVTFLFLCGRSCSLIYKGSYELQTLELNMETLNMTMPLSCTKNSSHHYIRVGNETGLELTLTNTSIINHKFCNLSDAHKRNLYDHALMSILSTFHLSIPNFNQYEAMSCDFNGGKISVQYNLSHAYAVDAAEHCGTVANGVLQTFMRMAWGGSYIALDSGRGNWDCIMTSYQYLIIQNTTWEDHCQFSRPSPIGYLGLLSQRTRDIYISRRRRGTFTWTLSDSEGNETPGGYCLTRWMLIEAELKCFGNTAVAKCNEKHDEEFCDMLRLFDFNKQAIQRLKSPAQMSIQLINKAVNALINDQLIMKNHLRDMMGIPYCNYSKYCYLNHTSSGRTSLPKCCLVSNGSYLNETHFSDDIEQQADNMITEMLQKEYIDRQGKTPLGLVDLFVFSTSFYLISIFLHLIKIPTHRHIVGKPCPKPHRLNHMGICSCGLYKQPGVPTRWKR

SEQ ID NO: 24651 - protein, 490 aa, Artificial Sequence
  derived and/or modified protein sequence (artificial) from LASV(KAK-428;Clade n.d. (VII))__ANH09740__GPCmut3
MGQIVTFFQEVPHVIEEVMNIVLIALSLLAILKGLYNFATCGVIGLITFLLLCGRSCSATYKGQYELQTLELNMESLNMTMPLSCTKNNSHHYIRAGNNTGLELTLTNTSIISHKFCNLSDAHKKNLYDHTLMSIITTFHLSIPNFNQYEAMSCDFNGGKISIQYNLSHSYAGDAAQHCGTVANGVLQTFMRMAWGGSYLALDSGRRGWDCIISSYQYLIIQNTTWDDHCQFSRPSPIGYLGFVSQKTRDIYISRRRRGTFTWTLSDSEGHDMPGGYCLTRWMLIEADLKCFGNTAVAKCNEKHDEEFCDMWRLFDFNKQAIQRLKAPAQMNIQLINKAVNALINDQLMMKNHLRDIMGIPYCNYSKFCYLNNTTTGRTSLPRCCLISNGSYLNETHFSDDIEQQADNMITEMLQKEYMDRQGKTPLGLVDLFVFSTSFYLITIFLHLVKIPTHRHIVGKPCPKPHRLNHMGICSCGLYKQPGVPVRWKR

SEQ ID NO: 24652 - protein, 490 aa, Artificial Sequence; identical to SEQ ID NO: 24646
  derived and/or modified protein sequence (artificial) from LASV(Pinneo-NIG-1969;Clade I)__AIT17836__GPCmut3

SEQ ID NO: 24653 - protein, 490 aa, Artificial Sequence
  derived and/or modified protein sequence (artificial) from LASV(ISTH0009-NIG-2011;Clade II)__AIT17404__GPCmut3
MGQIITFFQEVPHVIEEVMNIVLIALSLLAILKGIYNVATCGLFGLVSFLLLCGRSCSTTYKGVYELQTLELDMASLNMTMPLSCTKNNSHHYIMVGNETGLELTLTNTSIINHKFCNLSDAHKKNLYDHALMSIISTFHLSIPNFNQYEAMSCDFNGGKISVQYNLSHAYAVDAANHCGTIANGVLQTFMRMAWGGSYIALDSGKGSWDCIMTSYQYLIIQNTTWEDHCQFSRPSPIGYLGLLSQRTRDIYISRRRRGTFTWTLSDSEGNETPGGYCLTRWMLIEAELKCFGNTAVAKCNEKHDEEFCDMLRLFDFNKQAIRRLKTPAQMSIQLINKAVNALINDQLIMKNHLRDIMGIPYCNYSKYCYLNHTVTGKTSLPRCCLVSNGSYLNETHFSDDIEQQADNMITELLQKEYMDRQGKTPLGLVDLFVFSTSFYLISIFLHLIKIPTHRHITGKPCPKPHRLNHMGICSCGLYKHPGVPVKWKR

SEQ ID NO: 24654 - protein, 490 aa, Artificial Sequence
  derived and/or modified protein sequence (artificial) from LASV(ISTH2010-NIG-2012;Clade II)__AIT17482__GPCmut3
MGQIITFFQEVPHVIEEVMNIVLIALSLLAILKGIYNVATCGLFGLVSFLLLCGRSCSTTYKGVYELQTLELDMASLNMTMPLSCTKNNSHHYIMVGNETGLELTLTNTSIINHKFCNLSDAHKKNLYDHALMSIISTFHLSIPNFNQYEAMSCDFNGGKISVQYNLSHAYAVDAANHCGTIANGVLQTFMRMAWGGSYIALDSGKGSWDCIMTSYQYLIIQNITWEDHCQFSRPSPIGYLGLLSQRTRDIYISRRRRGTFTWTLSDSEGNETPGGYCLTRWMLIEAELKCFGNTAVAKCNEKHDEEFCDMLRLFDFNKQAIRRLKTPAQMSIQLINKAVNALINDQLIMKNHLRDIMGIPYCNYSKYCYLNHTVTGKTSLPRCCLVSNGSYLNETHFSDDIEQQADNMITELLQKEYIDRQGKTPLGLVDLFVFSTSFYLISIFLHLVKIPTHRHVVGKPCPKPHRLNHMGICSCGLYKHPGVPVKWKR

SEQ ID NO: 24655 - protein, 490 aa, Artificial Sequence
  derived and/or modified protein sequence (artificial) from LASV(Lassa virus/H.sapiens-wt/NGA/2015/ISTH_0543;Clade II)__AVO03639__GPCmut3
MGQIITFFQEVPHVIEEVMNIVLIALSLLAILKGIYNVATCGLFGLVSFLLLCGRSCSTTYKGVYELQTLELDMANLNMTMPLSCTKNNSHHYIMVGNETGLELTLTNTSIINHKFCNLSDAHKKNLYDHALMSIISTFHLSIPNFNQYEAMSCDFNGGKISVQYNLSHTYAVDAANHCGTIANGVLQTFMRMAWGGSYIALDSGKGSWDCIMTSYQYLVIQNTTWEDHCQFSRPSPIGYLGLLSQRTRDIYISRRRRGTFTWTLSDSEGNETPGGYCLTRWMLIEAELKCFGNTAVAKCNEKHDEEFCDMLRLFDFNKQAIRRLKTPAQMSIQLINKAVNALINDQLIMKNHLRDIMGIPYCNYSKYCYLNHTVTGKTSLPRCCLVSNGSYLNETHFSDDIEQQADNMITELLQKEYIDRQGKTPLGLVDLFVFSTSFYLISIFLHLVKIPTHRHITGKPCPKPHRLNHMGICSCGLYKHPGVPVKWKR

SEQ ID NO: 24656 - protein, 490 aa, Artificial Sequence
  derived and/or modified protein sequence (artificial) from LASV(Lassa virus/H.sapiens-wt/NGA/2016/ISTH_0009;Clade II)__AVO03571__GPCmut3
MGQIITFFQEVPHVIEEVMNIVLIALSLLAILKGIYNVATCGLLGLVSFLLLCGRSCSTTYKGVYELQTLELDMASLNMTMPLSCTKNNSHHYIMVGNETGLELTLTNTSIINHKFCNLSDAHKKNLYDHALMSIISTFHLSIPNFNQYEAMSCDFNGGRISVQYNLSHSYAVDAANHCGTIANGVLQTFMRMAWGGSYIALDSGKGSWDCIMTSYQYLIIQNTTWEDHCQFSRPSPIGYLGLLSQRTRDIYISRRRRGTFTWTLSDSEGNETPGGYCLTRWMLIEAELKCFGNTAVAKCNEKHDEEFCDMLRLFDFNKQAIRRLKTPAQMSIQLINKAVNALINDQLIMKNHLRDIMGIPYCNYSKYCYLNHTVTGKTSLPRCCLVSNGSYLNETHFSDDIEQQADNMITELLQKEYIDRQGKTPLGLVDLFVFSTSFYLISIFLHLVKIPTHRHITGKPCPKPHRLNHMGICSCGLYNHPGVPVKWKR

SEQ ID NO: 24657 - protein, 490 aa, Artificial Sequence
  derived and/or modified protein sequence (artificial) from LASV(Lassa virus/H.sapiens-wt/NGA/2016/ISTH_0017;Clade II)__AVO03567__GPCmut3
MGQIITFFQEVPHVIEEVMNIVLIALSLLAILKGIYNVATCGLFGLVSFLLLCGRSCSTTYKGVYELQTLELDMASLNMTMPLSCTKNNSHHYIMVGNETGLELTLTNTSIINHKFCNLSDAHKKNLYDHALMSIISTFHLSIPNFNQYEAMSCDFNGGKISVQYNLSHTYAIDAANHCGTIANGVLQTFMRMAWGGSYIALDSGKGSWDCIMTSYQYLIIQNTTWEDHCQFSRPSPIGYLGLLSQRTRDIYISRRRRGTFTWTLSDSEGNETPGGYCLTRWMLIEAELKCFGNTAVAKCNEKHDEEFCDMLRLFDFNKQAIRRLKTPAQMSIQLINKAVNALINDQLIMKNHLRDIMGIPYCNYSKYCYLNHTVTGKTSLPRCCLVSNGSYLNETHFSDDIEQQADNMITELLQKEYMDRQGKTPLGLVDLFVFSTSFYLISIFLHLVRIPTHRHVIGKPCPKPHRLNHMGICSCGLYKHPGVPVKWKR

SEQ ID NO: 24658 - protein, 490 aa, Artificial Sequence
  derived and/or modified protein sequence (artificial) from LASV(Lassa virus/H.sapiens-wt/NGA/2018/ISTH_0959;Clade II)__AVV65099__GPCmut3
MGQIITFFQEVPHVIEEVMNIVLIALSLLAILKGIYNVVTCGLFGLVSFLLLCGRSCSTTYKGVYELQTLELDMASLNMTMPLSCTKNNSHHYIMVGNETGLELTLTNTSIINHKFCNLSDAHKKNLYDHALMSIISTFHLSIPNFNQYEAMSCDFNGGKISVQYNLSHAYAIDAANHCGTIANGVLQTFMRMAWGGSYIALDSGKGSWDCIMTSYQYLIIQNTTWEDHCQFSRPSPIGYLGLLSQRTRDIYISRRRRGTFTWTLSDSEGNETPGGYCLTRWMLIEAELKCFGNTAVAKCNEKHDEEFCDMLRLFDFNKQAIRRLKTPAQMSIQLINKAVNALINDQLIMKNHLRDIMGIPYCNYSKYCYLNHTVTGKTSLPRCCLVSNGSYLNETHFSDDIEQQADNMITELLQKEYIDRQGKTPLGLVDLFVFSTSFYLISIFLHLVKIPTHRHVIGKPCPKPHRLNHMGICSCGLYKHPGVPVKWKR

SEQ ID NO: 24659 - protein, 490 aa, Artificial Sequence
  derived and/or modified protein sequence (artificial) from LASV(LASV003-NIG-2008;Clade II)__AIT17580__GPCmut3
MGQIITFFQEVPHVIEEVMNIVLIALSLLAILKGIYNVATCGLFGLVSFLLLCGRSCSTTYKGVYELQTLELDMASLNMTMPLSCTKNNSHHYIMVGNETGLELTLTNTSIINHKFCNLSDAHKKNLYDHALMSIISTFHLSIPNFNQYEAMSCDFNGGKISVQYNLSHTYAVDAANHCGTIANGVLQTFMRMAWGGSYIALDSGKGSWDCIMTSYQYLIIQNTTWEDHCQFSRPSPIGYLGLLSQRTRDIYISRRRRGTFTWTLSDSESNETPGGYCLTRWMLIEAELKCFGNTAVAKCNEKHDEEFCDMLRLFDFNKQAIRRLKAPAQMSIQLINKAVNALINDQLIMKNHLRDIMGIPYCNYSKYCYLNHTVTGRTSLPRCCLVSNGSYLNETHFSDDIEQQADNMITELLQKEYMDRQGKTPLGLVDLFVFSTSFYLISIFLHLVKIPTHRHVIGKPCPKPHRLNHMGICSCGLYKHPGVPVKWKR

SEQ ID NO: 24660 - protein, 490 aa, Artificial Sequence
  derived and/or modified protein sequence (artificial) from LASV(LASV035-NIG-2009;Clade II)__AIT17588__GPCmut3
MGQIITFFQEVPHVIEEVMNIVLIALSLLAILKGIYNVATCGLFGLVSFLLLCGRSCSTTYKGVYELQTLELDMASLNMTMPLSCTKNNSHHYIMVGNETGLELTLTNTSIINHKFCNLSDAHKKNLYDHALMSIISTFHLSIPNFNQYEAMSCDFNGGKISVQYNLSHAYAVDAANHCGTIANGVLQTFMRMAWGGSYIALDSGKGSWDCIMTSYQYLIIQNTTWEDHCQFSRPSPIGYLGLLSQRTRDIYISRRRRGTFTWTLSDSEGNETPGGYCLTRWMLIEAELKCFGNTAVAKCNEKHDEEFCDMLRLFDFNKQAIRRLKAPAQMSIQLINKAVNALINDQLIMKNHLRDIMGIPYCNYSKYCYLNHTVTGKTSLPRCCLVSNGSYLNETHFSDDIEQQADNMITELLQKEYIDRQGKTPLGLVDLFVFSTSFYLISIFLHLVKIPTHRHVIGKPCPKPHRLNHMGICSCGLYKHPGVPVKWKR

SEQ ID NO: 24661 - protein, 490 aa, Artificial Sequence
  derived and/or modified protein sequence (artificial) from LASV(LASV1000-NIG-2009;Clade II)__AIT17782__GPCmut3
MGQIITFFQEVPHVIEEVMNIVLIALSLLAILKGIYNVATCGLFGLVSFLLLCGRSCSTTYKGVYELQTLELDMASLNMTMPLSCTKNNSHHYIMVGNETGLELTLTNTSIINHKFCNLSDAHKKNLYDHALMSIISTFHLSIPNFNQYEAMSCDFNGGKISVQYNLSHTYAVDAANHCGTIANGVLQTFMRMAWGGSYIALDSGKGSWDCIMTSYQYLIIQNTTWEDHCQFSRPSPIGYLGLLSQRTRDIYISRRRRGTFTWTLSDSEGNETPGGYCLTRWMLIEAELKCFGNTAVAKCNEKHDEEFCDMLRLFDFNKQAIKRLKTPAQMSIQLINKAVNALINDQLIMKNHLRDIMGIPYCNYSKYCYLNHTVTGKTSLPRCCLVSNGSYLNETHFSDDIEQQADNMITELLQKEYIDRQGKTPLGLVDLFVFSTSFYLISIFLHLVKIPTHRHVVGKPCPKPHRLNHMGICSCGLYKHPGVPVKWKR

SEQ ID NO: 24662 - protein, 490 aa, Artificial Sequence
  derived and/or modified protein sequence (artificial) from LASV(LASV221-NIG-2010;Clade II)__AIT17624__GPCmut3
MGQIITFFQEVPHVIEEVMNIVLIALSLLAILKGIYNVATCGLFGLVSFLLLCGRSCSTTYKGVYELQTLELDMASLNMTMPLSCTKNNSHHYIMVGNETGLELTLTNTSIINHKFCNLSDAHKKNLYDHALMSIISTFHLSIPNFNQYEAMSCDFNGGKISVQYNLSHTYAIDAANHCGTIANGVLQTFMRMAWGGSYIALDSGKGSWDCIMTSYQYLIIQNTTWEDHCQFSRPSPIGYLGLLSQRTRDIYISRRRRGTFTWTLSDSEGNETPGGYCLTRWMLIEAELKCFGNTAVAKCNEKHDEEFCDMLRLFDFNKQAIRRLKTPAQMSIQLINKAVNALINDQLIMKNHLRDIMGIPYCNYSKYCYLNHTVTGKTSLPRCCLVSNGSYLNETHFSDDIEQQADNMITEMLQKEYMDRQGKTPLGLVDLFVFSTSFYLISIFLHLVKIPTHRHVIGKPCPKPHRLNHMGICSCGLYKHPGVPVKWKR

SEQ ID NO: 24663 - protein, 490 aa, Artificial Sequence
  derived and/or modified protein sequence (artificial) from LASV(LASV237-NIG-2010;Clade II)__AIT17638__GPCmut3
MGQIITFFQEVPHVIEEVMNIVLIALSLLAILKGIYNVATCGLFGLVSFLLLCGRSCSTTYKGVYELQTLELDMASLNMTMPLSCTKNNSHHYIMVGNETGLELTLTNTSIINHKFCNLSDAHKKDLYDHALMSIISTFHLSIPNFNQYEAMSCDFNGGKISVQYNLSHTYAVDAANHCGTIANGVLQTFMRMAWGGSYIALDSGKGSWDCIMTSYQYLIIQNTTWEDHCQFSRPSPIGYLGLLSQRTRDIYISRRRRGTFTWTLSDSEGNETPGGYCLTRWMLIEAELKCFGNTAVAKCNEKHDEEFCDMLRLFDFNKQAIRRLKTPAQMSIQLINKAVNALINDQLIMKNHLRDIMGIPYCNYSKYCYLNHTVTGKTSLPRCCLVSNGSYLNETHFSDDIEQQADNMITELLQKEYMDRQGKTPLGLVDLFVFSTSFYLISIFLHLIKIPTHRHITGKPCPKPHRLNHMGICSCGLYKHPGVPVKWKR

SEQ ID NO: 24664 - protein, 490 aa, Artificial Sequence
  derived and/or modified protein sequence (artificial) from LASV(LASV253-NIG-2011;Clade II)__AIT17670__GPCmut3
MGQIITFFQEVPHVIEEVMNIVLIALSLLAILKGIYNVATCGLFGLVSFLLLCGRSCSTTYKGVYELQTLELDMASLNMTMPLSCTKNNSHHYIMVGNETGLELTLTNTSIINHKFCNLSDAHKKNLYDHALMSIISTFHLSIPNFNQYEAMSCDFNGGKISVQYNLSHTYAVDAANHCGTIANGVLQTFMRMAWGGSYIALDSGKGSWDCIMTSYQYLIIQNTTWEDHCQFSRPSPIGYLGLLSQRTRDIYISRRRRGTFTWTLSDSEGNETPGGYCLTRWMLIEAELKCFGNTAVAKCNEKHDEEFCDMLRLFDFNKQAIRRLKAPAQMSIQLINKAVNALINDQLIMKNHLRDIMGIPYCNYSKYCYLNHTVTGRTSLPRCCLVSNGSYLNETHFSDDIEQQADNMITELLQKEYIDRQGKTPLGLVDLFVFSTSFYLISIFLHLVKIPTHRHIIGKPCPKPHRLNHMGICSCGLYKHPGVPVKWKR

SEQ ID NO: 24665 - protein, 490 aa, Artificial Sequence
  derived and/or modified protein sequence (artificial) from LASV(LASV254-NIG-2011;Clade II)__AIT17674__GPCmut3
MGQIITFFQEVPHVIEEVMNIVLIALSLLAILKGIYNVATCGLFGLVSFLLLCGRSCSTTYKGVYELQTLELDMTNLNMTMPLSCTKNNSHHYIMVGNETGLELTLTNTSIINHKFCNLSDAHKKNLYNHALMSIISTFHLSIPNFNQYEAMSCDFNGGKISVQYNLSHSYAVDAANHCGTIANGVLQTFMRMAWGGSYIALDSGKGNWDCIMTSYQYLIIQNTTWEDHCQFSRPSPIGYLGLLSQRTRDIYISRRRRGTFTWTLSDSEGNETPGGYCLTRWMLIEAELKCFGNTAVAKCNEKHDEEFCDMLRLFDFNKQAIRRLKTPAQANIQLINKAVNALINDQLIMKNHLRDIMGIPYCNYSKYCYLNHTVTGKTSLPRCCLVSNGSYLNETHFSDDIEQQADNMITELLQKEYMDRQGKTPLGLVDLFVFSTSFYLISIFLHLVKIPTHRHVIGKPCPKPHRLNHMGICSCGLYKHPGVPVKWKR

SEQ ID NO: 24666 - protein, 490 aa, Artificial Sequence
  derived and/or modified protein sequence (artificial) from LASV(Nig08-A19;Clade III)__ADU56618__GPCmut3
MGQIVTFFQEVPHVIEEVMNIVLIALSILAILKGLYNIATCGLIGLVTFLLLSGRSCSMTYKGVYELQTLELNMNTLNMTMPLSCTKNNSHHYIMVGNETGLELTLTNTSLLHHKFCNLSDAHKKNLYDHTLMSIISTFHLSIPNFNQYEAMSCDFNGGKITVQYNLSHSYAIDAANHCGTVANGVLQTFMRMAWGGSYIALDSGRGKWDCIMTSYQYLIIQNTTWEDHCQFSRPSPIGYLGLLSQRTRDIYISRRRRGTFTWTLSDSEGNETPGGYCLTRWMLIEAELKCFGNTAVAKCNEKHDEEFCDMLRLFDFNKQAIRRLKAPAQMSIQLINKAVNALINDQLIMKNHLRDIMGIPYCNYSKYCYLNHTSTGRTSLPRCCLVSNGSYLNETHFSDDIEQQADNMITEMLQKEYLDRQGKTPLGLVDLFVFSTSFYLISIFLHLVKIPTHRHIVGKPCPKPHRLNHMGICSCGLYKQPGVPVRWKR

SEQ ID NO: 24667 - protein, 491 aa, Artificial Sequence
  derived and/or modified protein sequence (artificial) from LASV(G1180-SLE-2010;Clade IV)__AIT17168__GPCmut3
MGQIVTFFQEVPHVIEEVMNIVLIALSILAVLKGLYNFATCGLVGLLTFLLLCGRSCTASRYKGVYELQTLELNMETLNMTMPLSCTKNNSHHYIMVGNETGLELTLTNTSIINHKFCNLSDAHKKNLYDHALMSIISTFHLSIPNFNQYEAMSCDFNGGKISVQYNLSHSYAGDAANHCGTVANGVLQTFMRMAWGGSYIALDSGHGSWDCIMTSYQYLIIQNTTWEDHCQFSRPSPIGYLGLLSQRTRDIYISRRRRGTFTWTLSDSEGKDTPGGYCLTRWMLIEAELKCFGNTAVAKCNEKHDEEFCDMLRLFDFNKQAIQRLKAPAQMSIQLINKAVNALINDQLIMKNHLRDIMGIPYCNYSKYCYLNHTTTGKTSLPKCCLVSNGSYLNETHFSDDIEQQADNMITEMLQKEYMERQGKTPLGLVDLFVFSTSFYLISIFLHLVKIPTHRHIVGKSCPKPHRLNHMGICSCGLYKQPGVPVKWKR

SEQ ID NO: 24668 - protein, 491 aa, Artificial Sequence
  derived and/or modified protein sequence (artificial) from LASV(G1442-SLE-2011;Clade IV)__AIT17180__GPCmut3
MGQIVTFFQEVPHVIEEVMNIVLIALSILAVLKGLYNVATCGLIGLVTFLLLCGRSCTTTLYKGVYELQTLELNMETLNMTMPLSCTKNNSHHYIRVGNETGLELTLTNTSIINHKFCNLSDAHKKNLYDHALMSIISTFHLSIPNFNQYEAMSCDFNGGKISVQYNLSHSYAGDAANHCGTVANGVLQTFMRMAWGGSYIALDSGRGNWDCIMTSYQYLIIQNTTWDDHCQFSRPSPIGYLGLLSQRTRDVYISRRRRGTFTWTLSDSEGKDTPGGYCLTRWMLIEAELKCFGNTAVAKCNEKHDEEFCDMLRLFDFNKQAIQRLKAPAQMSIQLINKAVNALINDQLIMKNHLRDIMGIPYCNYSKYCYLNNTATGKTSLPKCCLISNGSYLNETHFSDDIEQEADNMITEMLQKEYMERQGKTPLGLVDLFVFSTSFYLISIFLHLVKIPTHRHIVGKSCPKPHRLNHMGICSCGLYKQPGVPVRWKR

SEQ ID NO: 24669 - protein, 491 aa, Artificial Sequence
  derived and/or modified protein sequence (artificial) from LASV(G3010-SLE-2013;Clade IV)__AIT17344__GPCmut3
MGQIVTFFQEVPHVIEEVMNIVLIALSILAVLKGLYNFATCGLVGLVTFLLLCGRSCTTSLYKGVYELQTLELNMETLNMTMPLSCTKNNSHHYIMVGNETGLELTLTNTSIINHKFCNLSDAHKKNLYNHALMSIISTFHLSIPNFNQYEAMSCDFNGGKISVQYNLSHSYAGDAASHCGTVANGVLQTFMRMAWGGSYIALDSGYGKWDCIMTSYQYLIIQNTTWEDHCQFSRPSPIGYLGLLSQRTRDIYISRRRRGTFTWTLSDSEGKDTPGGYCLTRWMLIEAELKCFGNTAVAKCNEKHDEEFCDMLRLFDFNKQAIQRLKTPAQMSIQLINKAVNALINDQLIMKNHLRDIMGIPYCNYSKYCYLNHTTTGKTSLPKCCLVSNGSYLNETHFSDDIEQQADNMITEMLQKEYMERQGKTPLGLVDLFVFSTSFYLISIFLHLVKIPTHRHIVGKSCPKPHRLNHMGICSCGLYKQPGVPVRWKR

SEQ ID NO: 24670 - protein, 491 aa, Artificial Sequence
  derived and/or modified protein sequence (artificial) from LASV(G502-SLE-2009;Clade IV)__AIT17126__GPCmut3
MGQIVTFFQEVPHVIEEVMNIVLIALSILAVLKGLYNFATCGLVGLLTFLLLCGRSCTTGLYKGVYELQTLELNMETLNMTMPLSCTKNNSHHYIMVGNETGLELTLTNTSIINHKFCNLSDAHKKNLYDHALMSIISTFHLSIPNFNQYEAMSCDFNGGKISVQYNLSHSYAGDAADHCGTVANGVLQTFMRMAWGGSYIALDSGRGRWDCIMTSYQYLIIQNTTWEDHCQFSRPSPIGYLGLLSQRTRDIYISRRRRGTFTWTLSDSEGKDTPGGYCLTRWMLIEAELKCFGNTAVAKCNEKHDEEFCDMLRLFDFNKQAIQRLKAPAQMSIQLINKAVNALINDQLVMKNHLRDIMGIPYCNYSRYCYLNHTTTGRTSLPKCCLVSNGSYLNETHFSDDIEQQADNMITEMLQKEYMERQGKTPLGLVDLFVFSTSFYLISIFLHLVKIPTHRHIVGKSCPKPHRLNHMGICSCGLYKQPGVPVKWKR

SEQ ID NO: 24671 - protein, 491 aa, Artificial Sequence
  derived and/or modified protein sequence (artificial) from LASV(G733-SLE-2010;Clade IV)__AIT17154__GPCmut3
MGQIVTFFQEVPHVIEEVMNIVLIALSILAVLKGLYNFATCGIVGLVSFLLLCGRSCTTSLYKGVYELQTLELNMETLNMTMPLSCTKNNSHHYIMVGNETGLELTLTNTSIINHKFCNLSDAHKKNLYDHALMSIISTFHLSIPNFNQYEAMSCDFNGGKISVQYNLSHSYAGDAANHCGTIANGVLQTFMRMAWGGSYIALDSGRDRWDCIMTSYQYLIIQNTTWEDHCQFSRPSPIGYLGLLSQRTRDIYISRRRRGTFTWTLSDSEGKDTPGGYCLTRWMLIEAELKCFGNTAVAKCNEKHDEEFCDMLRLFDFNKQAIQRLKAPAQMSIQLINKAVNALINDQLIMKNHLRDIMGIPYCNYSKYCYLNHTTTGKTSLPKCCLVSNGSYLNETHFSDDIEQQADNMITEMLQKEYMERQGKTPLGLVDLFVFSTSFYLISIFLHLVKIPTHRHVVGKSCPKPHRLNHMGICSCGLYGQPGVPVKWKR

SEQ ID NO: 24672 - protein, 491 aa, Artificial Sequence
  derived and/or modified protein sequence (artificial) from MOPV/LASV reassortant(IGS-1;Clade IV)__AFY05576__GPCmut3
MGQIVTFFQEVPHVIEEVMNIVLIALSVLAVLKGLYNFATCGLVGLVTFLLLCGRSCTTSLYKGVYELQTLELNMETLNMTMPLSCTKNNSHHYIMVGNETGLELTLTNTSIINHKFCNLSDAHKKNLYDHALMSIISTFHLSIPNFNQYEAMSCDFNGGKISVQYNLSHSYAGDAANHCGTVANGVLQTFMRMAWGGSYIALDSGRGNWDCIMTSYQYLIIQNTTWEDHCQFSRPSPIGYLGLLSQRTRDIYISRRRRGTFTWTLSDSEGEDTPGGYCLTRWMLIEAELKCFGNTAVAKCNEKHDEEFCDMLRLFDFNKQAIQRLKAPAQMSIQLINKAVNALINDQLIMKNHLRDIMGIPYCNYSKYCYLNHTTTGRTSLPKCCLVSNGSYLNETHFSDDIEQQADNMITEMLQKEYMERQGKTPLGLVDLFVFSTSFYLISIFLHLVKIPTHRHIVGKSCPKPHRLNHMGICSCGLYKQPGVPVKWKR

SEQ ID NO: 24673 - protein, 491 aa, Artificial Sequence
  derived and/or modified protein sequence (artificial) from LASV(LM765-SLE-2012;Clade IV)__AIT17814__GPCmut3
MGQIVTFFQEVPHVIEEVMNIVLIALSILAVLKGLYNFATCGLVGLVTFLLLCGRSCTTSLYKGVYELQTLELNMETLNMTMPLSCTKNNSHHYIMVGNETGLELTLTNTSIIDHKFCNLSDAHRKNLYDHALMSIISTFHLSIPNFNQYEAMSCDFNGGKISVQYNLSHSYAKDAADHCGTVANGVLQTFMRMAWGGSYIALDSGRGRWDCIMTSYQYLIIQNTTWEDHCQFSRPSPIGYLGLLSQRTRDIYISRRRRGTFTWTLSDSEGKDTPGGYCLTRWMLIEAELKCFGNTAVAKCNEKHDEEFCDMLRLFDFNKQAIQRLKAPAQMSIQLINKAVNALINDQLIMKNHLRDIMGIPYCNYSKYCYLNHTTTGKTSLPKCCLVSNGSYLNETHFSDDIEQQADNMITEMLQKEYMERQGKTPLGLVDLFVFSTSFYLISIFLHLVKIPTHRHIVGKPCPKPHRLNHMGICSCGLYKQPGVPVKWKR

SEQ ID NO: 24674 - protein, 491 aa, Artificial Sequence
  derived and/or modified protein sequence (artificial) from LASV(LM776-SLE-2012;Clade IV)__AIT17824__GPCmut3
MGQIVTFFQEVPHVIEEVMNIVLIALSILAVLKGLYNFATCGLVGLVTFLLLCGRSCTTSVYKGVYELQTLELNMETLNMTMPLSCTKNNSHHYIMVGNETGLELTLTNTSIINHKFCNLSDAHKKNLYDHALMSIISTFHLSIPNFNQYEAMSCDFNGGKISVQYNLSHSYAGDAANHCGTVANGVLQTFMRMAWGGSYIALDSGHGKWDCIMTSYQYLIIQNTTWEDHCQFSRPSPIGYLGLLSQRTRDIYISRRRRGTFTWTLSDSEGKDTPGGYCLTRWMLIEAELKCFGNTAVAKCNEKHDEEFCDMLRLFDFNKQAIQRLKAPAQMSIQLINKAVNALINDQLIMKNHLRDIMGIPYCNYSKYCYLNHTTTGKTSLPKCCLVSNGSYLNETHFSDDIEQQADNMITEMLQKEYMERQGKTPLGLVDLFVFSTSFYLISIFLHLVKIPTHRHIVGKSCPKPHRLNHMGICSCGLYKQPGVPVRWKR

SEQ ID NO: 24675 - protein, 491 aa, Artificial Sequence
  derived and/or modified protein sequence (artificial) from LASV(Mad39;Clade IV)__ANH09722__GPCmut3
MGQIVTFFQEVPHVIEEVMNIVLIALSILAVLKGLYNVATCGLIGLVTFLLLCGRSCTTTLYKGVYELQALELNMETLNMTMPLSCTKNNSHHYIRVGNETGLELTLTNTSLINHKFCNLSDAHKKNLYDHALMSIISTFHLSIPNFNQYEAMSCDFNDGKISVQYNLSHTYAGDTANHCGTVANGVLQTFMRMAWGGSYIALDSGRGGWDCIMTSYQYLIIQNTTWEDHCQFSRPSPIGYLGLLSQRTRDIYISRRRRGTFTWTLSDSEGKDTPGGYCLTRWMLIEAELKCFGNTAVAKCNEKHDEEFCDMLRLFDFNKQAIQRLKAPAQMSIQLINKAVNALINDQLIMKNHLRDIMGIPYCNYSKYCYLNHTVTGKTSLPKCCLVSNGSYLNETHFSDDIEQQADNMITEMLQKEYMERQGKTPLGLVDLFVFSTSFYLISIFLHLVKIPTHRHVVGKPCPKPHRLNHMGICSCGFYKQPGVPVRWKR

SEQ ID NO: 24676 - protein, 491 aa, Artificial Sequence
  derived and/or modified protein sequence (artificial) from LASV(Z0947-SLE-2011;Clade IV)__AIT17840__GPCmut3
MGQIVTFFQEVPHVIEEVMNIVLIALSILAVLKGLYNFATCGLVGLVTFLLLCGRSCTISLYKGVYELQTLELNMETLNMTMPLSCTKNNSHHYIMVGNETGLELTLTNTSIINHKFCNLSDAHKKNLYDHALMSIISTFHLSIPNFNQYEAMSCDFNGGKISVQYNLSHSYAGDAANHCGTVANGVLQTFMRMAWGGSYIALDSGRDRWDCIMTSYQYLIIQNTTWEDHCQFSRPSPIGYLGLLSQRTRDIYISRRRRGTFTWTLSDSEGKDTPGGYCLTRWMLIEAELKCFGNTAVAKCNEKHDEEFCDMLRLFDFNKQAIQRLKAPAQMSIQLINKAVNALINDQLIMKNHLRDIMGIPYCNYSKYCYLNHTTTGKTSLPKCCLVSNGSYLNETHFSDDIEQQADNMITEMLQKEYMERQGKTPLGLVDLFVFSTSFYLISIFLHLVKIPTHRHIVGKPCPKPHRLNHMGICSCGLYKQPGVPVKWKR

SEQ ID NO: 24677 - RNA, 1476 nt, Artificial Sequence
  derived and/or modified CDS sequence (opt1) from LASV(Josiah;Clade IV)__NP_694870__GPCmut3
augggccagaucgugaccuucuuccaggaggucccccacgugaucgaggaggugaugaacaucguccugaucgcccucagcgugcuggccgugcugaaggggcucuacaacuucgcgaccugcggccuggucgggcuggugacguuccuccugcugugcggccgcuccugcaccaccagccucuacaaggggguguacgagcugcagacccuggagcucaacauggagacgcugaacaugaccaugccgcuguccugcaccaagaacaacagccaccacuacaucauggucggcaacgagaccggccucgagcugacgcugaccaacaccuccaucaucaaccacaaguucugcaaccucagcgacgcccacaagaagaaccuguacgaccacgcccugauguccaucaucagcaccuuccaccucuccauccccaacuucaaccaguacgaggccaugagcugcgacuucaacgggggcaagaucuccgugcaguacaaccugagccacuccuacgccggggacgcggccaaccacugcggcacgguggccaacgggguccugcagaccuucaugcggauggccuggggcggcagcuacaucgcgcucgacuccgggcgcggcaacugggacugcaucaugaccagcuaccaguaccugaucauccagaacaccacgugggaggaccacugccaguucucccggcccagccccaucggguaccugggccuccugucccagcgcacccgggacaucuacaucagccgccggcgccggggcaccuucaccuggacgcugagcgacuccgaggggaaggacaccccgggcggguacugccugacccgcuggaugcucaucgaggccgagcugaagugcuucggcaacaccgccguggccaagugcaacgagaagcacgacgaggaguucugcgacaugcugcggcuguucgacuucaacaagcaggccauccagcgccugaaggcgcccgcccagaugagcauccagcugaucaacaaggccgugaacgcccucaucaacgaccagcugaucaugaagaaccaccuccgggacaucauggggauccccuacugcaacuacuccaaguacugcuaccucaaccacacgaccaccggccgcaccagccugcccaagugcugccuggucuccaacggcagcuaccucaacgagacgcacuucuccgacgacaucgagcagcaggccgacaacaugaucaccgagaugcugcagaaggaguacauggagcggcaggggaagacgccccugggccucguggaccuguucguguucagcaccuccuucuaccugaucagcaucuuccugcaccucgucaagaucccgacccaccgccacaucguggggaaguccugccccaagccccaccggcugaaccacaugggcaucugcagcugcgggcuguacaagcagcccggcgugccggucaaguggaagcgcuga

SEQ ID NO: 24678 - RNA, 1473 nt, Artificial Sequence
  derived and/or modified CDS sequence (opt1) from LASV(LP;Clade I)__AAF86701__GPCmut3
augggccagaucaucaccuucuuccaggaggugccccacgucaucgaggaggugaugaacaucgugcugaucgcccucagccugcuggccauccucaaggggcuguacaacaucgcgaccugcggcaucaucgggcuggucgccuuccucuuccugugcggcaaguccugcagccugacgcucaagggcggguacgagcugcagacccuggagcucaacauggagacccugaacaugaccaugccgcuguccugcacgaagaacagcucccaccacuacauccgcgugggcaacgagaccgggcucgagcugacccugaccaacacgagcaucaucaaccacaaguucugcaaccucuccgacgcccacaagaagaaccuguacgaccacgcccugaugagcaucaucuccaccuuccaccucagcauccccaacuucaaccaguacgaggccauguccugcgacuucaacggcgggaagaucagcgugcaguacaaccugucccacagcuacgcgggcgacgccgccgagcacugcgggaccgucgccaacggcgugcugcagaccuucaugcggauggcguggggcgggcgcuacaucgcccucgacuccggcaaggggaacugggacugcaucaugacgagcuaccaguaccugaucauccagaacaccaccugggaggaccacugccaguucucccggcccagccccaucggcuaccugggccuccugucccagcgcacccgggacaucuacaucagccgccggcgccgggggacguucaccuggacccugagcgacuccgagggcaacgagacccccgggggcuacugccugacgcgcuggaugcucaucgaggccgagcugaagugcuucgggaacaccgccguggccaagugcaacgagaagcacgacgaggaguucugcgacaugcugcggcuguucgacuucaacaagcaggcgauccgccggcugaaggcccccgcccagaugagcauccagcugaucaacaaggccgucaacgcccucaucaacgaccagcugaucaugaagaaccaccuccgcgacaucaugggcauccccuacugcaacuacuccaaguacugcuaccucaaccacaccagcuccggccggaccagccugcccaagugcugccugaucuccaacgggagcuaccucaacgagacgcaguucuccgacgacaucgagcagcaggcggacaacaugaucaccgagaugcugcagaaggaguacaucgagcgccagggcaagaccccgcuggggcucguggacaucuucaucuucagcaccuccuucuaccugaucagcaucuuccugcaccugaucaagaucccgacgcaccggcacaucgugggcaagcccugccccaagccccaccgccucaaccacaugggggucugcuccugcggccuguacaagcacccgggcgugcccaccaaguggaagcgguga

SEQ ID NO: 24679 - RNA, 1473 nt, Artificial Sequence
  derived and/or modified CDS sequence (opt1) from LASV(803213;Clade II)__AAF86703__GPCmut3
augggccagaucaucaccuucuuccaggaggugccccacgucaucgaggaggugaugaacaucgugcugaucgcccucagccugcuggccauccucaaggggaucuacaacgucgcgaccugcggccuguucgggcugaucuccuuccuccugcugugcggccgcagcugcuccgugacguacaaggggguguacgagcuccagacccuggagcugaacauggccaaccucaacaugaccaugccgcugagcugcaccaagaacaacucccaccacuacaucauggucggcaacgagacgggccuggagcucacccugaccaacaccagcaucaucaaccacaaguucugcaaccuguccgacgcccacaagaagaaccucuacgaccacgcccugaugagcaucaucuccacguuccaccugagcauccccaacuucaaccaguacgaggccauguccugcgacuucaacgggggcaagaucagcgugcaguacaaccucucccacagcuucgcgguggacgccgccaaccacugcgggaccaucgccaacggcguccugcagaccuucaugcggauggcguggggcggguccuacaucgcccuggacagcggcaaggggaacugggacugcaucaugaccuccuaccaguaccucaucauccagaacacgaccugggaggaccacugccaguucagccgccccucccccaucggcuaccuggggcugcucagccagcggacccgcgacaucuacaucagccggcgccgccggggcaccuucacguggacccucuccgacagcgagggcaacgaggcccccgggggcuacugccugacccgguggaugcugaucgaggccgagcucaagugcuucgggaacaccgccguggcgaagugcaacgagaagcacgacgaggaguucugcgacaugcugcgccuguucgacuucaacaagcaggccaucaagcggcucaagacgcccgcccagauguccauccagcugaucaacaaggccgugaacgcccugaucaacgaccagcucaucaugaagaaccaccuccgcgacaucaugggcauccccuacugcaacuacagccgguacugcuaccugaaccacaccgucaccgggaagaccucccugccccgcugcugccuggugagcaacggcuccuaccugaacgagacgcacuucagcgacgacaucgagcagcaggcggacaacaugaucaccgagaugcuccagaaggaguacauggaccggcagggcaagaccccgcuggggcugguggaccucuucgucuucuccaccagcuucuaccugaucuccaucuuccugcaccuggugaagaucccgacgcaccgccacaucgugggcaagcccugccccaagccccaccggcucaaccacauggggaucugcagcugcggccuguacaagcacccggggguccccgugaaguggaagcgcuga

SEQ ID NO: 24680 - RNA, 1473 nt, Artificial Sequence
  derived and/or modified CDS sequence (opt1) from LASV(GA391;Clade III)__CAA36645__GPCmut3
augggccagaucgugaccuucuuccaggaggucccccacgugaucgaggaggugaugaacaucguccugaucgcccucagcauccuggccauccugaaggggcucuacaacguggcgaccugcggccugaucgggcuggugacguuccuccugcuguccggccgcagcugcucccucaucuacaaggggaccuacgagcugcagacccuggagcucaacauggagacccugaacaugacgaugccgcugagcugcaccaagaacaacucccaccacuacauccgggucggcaacgagaccggccucgagcugacccugacgaacaccagcauccucaaccacaaguucugcaaccuguccgacgcccacaagcgcaaccuguacgaccacagccucauguccaucaucagcaccuuccaccuguccauccccaacuucaaccaguacgaggccaugagcugcgacuucaacgggggcaagaucaccgugcaguacaaccugucccacagcuucgccguggacgccgcggggcacugcggcacgcucgccaacgggguccugcagaccuucaugcggauggccuggggcggcuccuacaucgcccuggacagcgggcgcggcaacugggacugcaucaugaccuccuaccaguaccucaucauccagaacaccacgugggacgaccacugccaguucagccggcccucccccaucggguaccugggccugcucagccagcgcacccgggacaucuacaucagccgccggcgccggggcaccuucaccuggacgcucuccgacagcgaggggaacgagaccccgggcggguacugccugacccgcuggaugcugaucgaggcggagcucaagugcuucggcaacaccgccguggccaagugcaacgagaagcacgacgaggaguucugcgacaugcugcggcuguucgacuucaacaagcaggccauccgccggcucaagacgcccgcccagauguccauccagcugaucaacaaggcggugaacgcccugaucaacgaccagcucaucaugaagaaccaccuccgcgacaucauggggauccccuacugcaacuacagccgguacugcuaccugaaccacaccuccaccggcaagaccagccugccccgcugcugccugaucuccaacggcagcuaccugaacgagacgaaguucuccgacgacaucgagcagcaggccgacaacaugaucaccgagaugcuccagaaggaguacaucgaccggcaggggaagacgccccugggccuggucgaccuguucguguucagcaccuccuucuaccucaucagcaucuuccugcaccuggugaagaucccgacccaccgccacaucgucgggaagcccugccccaagccccaccggcucaaccacaugggcaucugcuccugcgggcuguacaagcagccgggcgugcccgugcgcuggaagcgguga

SEQ ID NO: 24681 - RNA, 1476 nt, Artificial Sequence
  derived and/or modified CDS sequence (opt1) from LASV(AV;Clade V)__CCA30314__GPCmut3
augggccagaucgugaccuucuuccaggaggucccccacgugaucgaggaggugaugaacaucguccugaucgcccucagcauccuggccgugcugaaggggcucuacaacaucgcgaccugcggccugaucgggcugaucacguuccuccugcugugcggccgcuccugcagcuccaaccucuacaaggggguguacgagcugcagagccuggaccucaacauggagacccugaacaugaccaugccgcuguccugcaccaagaacaacagccaccacuacauccgggucggcaacgacacgggccucgagcugacccugaccaacaccuccauccucaaccacaaguucugcaaccugagcgacgcccacaagaaggaccuguacgaccacgcccucauguccaucaucagcacguuccaccuguccauccccaacuucaaccaguacgaggccaugagcugcgacuucaacgggggcaagaucuccgugcaguacaaccugagccacuccuacgccaucgacgcggccaaccacugcgggaccguggccaacggcauccuccagaccuucaugcgcauggccuggggcgggagcuacaucgcgcuggacuccggccgggggaacugggacugcaucaugaccagcuaccaguaccugaucauccagaacacgaccugggagaaccacugccaguucucccgccccagccccaucggcuaccucgggcugcugagccagcggacccgcgacaucuacaucucccggcgccgccggggcaccuucacguggacccugagcgacuccgagggcaacgccacccccgggggcuacugccucacccgguggaugcugaucgaggccgagcugaagugcuucgggaacacggccgucgccaagugcaacgagaagcacgacgaggaguucugcgacaugcuccgccuguucgacuucaacaagcaggcgaucagccggcugaagucccccgcccagaugagcauccagcucaucaacaaggccgugaacgcccugaucaacgaccagcugaucaugaagaaccaccuccgcgacaucaugggcauccccuacugcaacuacuccaaguacugcuaccugaaccacaccaucaccgggaagaccagccugcccaagugcugccucguguccaacggcagcuaccugaacgagacgcacuucuccgacgacaucgagcagcaggccgacaacaugaucaccgagaugcugcagaaggaguacauggagcggcagggcaagaccccgcucgggcuggucgaccuguucguguucagcaccuccuucuaccugaucagcaucuuccuccgccuggugaagaucccgacgcaccggcacaucgucggcaagcccugccccaagccccaccgccugaaccacauggggaucugcuccugcggccucuacaagcagccgggggugcccgugcgguggaagcgcuga

SEQ ID NO: 24682 - RNA, 1473 nt, Artificial Sequence
  derived and/or modified CDS sequence (opt1) from LASV(Togo/2016/7082;Clade VI)__AMR44577__GPCmut3
augggccagaucaucaccuucuuccaggaggugccccacgucaucgaggaggugaugaacaucgugcugaucgcccucagccugcuggccauccucaagggggucuacaacguggcgaccugcggcaucaucgggcuggugacguuccuguuccucugcggccgcuccugcagccugaucuacaagggguccuacgagcugcagacccucgagcugaacauggagacccugaacaugaccaugccgcucagcugcacgaagaacuccagccaccacuacauccgggucggcaacgagaccggccuggagcugacccucaccaacacguccaucaucaaccacaaguucugcaaccugagcgacgcccacaagcgcaaccuguacgaccacgcccucauguccauccugagcaccuuccaccuguccauccccaacuucaaccaguacgaggccaugagcugcgacuucaacgggggcaagaucuccgugcaguacaaccucagccacgccuacgcgguggacgccgccgagcacugcgggaccgucgccaacggcgugcugcagaccuucaugcggauggcguggggcggguccuacaucgcccuggacagcggccgcgggaacugggacugcaucaugacguccuaccaguaccucaucauccagaacaccaccugggaggaccacugccaguucagccggcccucccccaucggcuaccuggggcugcucagccagcgcacccgggacaucuacaucagccgccggcgccggggcacguucaccuggacccucuccgacagcgagggcaacgagacccccgggggcuacugccugacgcgcuggaugcugaucgaggccgagcucaagugcuucgggaacaccgccguggccaagugcaacgagaagcacgacgaggaguucugcgacaugcugcggcuguucgacuucaacaagcaggcgauccagcgccucaagucccccgcccagaugagcauccagcugaucaacaaggccgucaacgcccugaucaacgaccagcucaucaugaagaaccaccuccgggacaugaugggcauccccuacugcaacuacuccaaguacugcuaccugaaccacaccagcuccgggcgcaccagccugcccaagugcugccugguguccaacggcagcuaccugaacgagacgcacuucuccgacgacaucgagcagcaggccgacaacaugaucaccgagaugcuccagaaggaguacaucgaccggcagggcaagaccccgcuggggcugguggaccucuucgucuucagcaccuccuucuaccugaucagcaucuuccugcaccugaucaagaucccgacgcaccgccacaucgugggcaagcccugccccaagccccaccggcucaaccacauggggaucugcuccugcggccuguacaagcagccgggggugcccacccgcuggaagcgguga

SEQ ID NO: 24683 - RNA, 1473 nt, Artificial Sequence
  derived and/or modified CDS sequence (opt1) from LASV(KAK-428;Clade n.d. (VII))__ANH09740__GPCmut3
augggccagaucgugaccuucuuccaggaggucccccacgugaucgaggaggugaugaacaucguccugaucgcccucagccugcuggccauccucaaggggcuguacaacuucgcgaccugcggcgugaucgggcugaucacguuccuccugcugugcggccgcuccugcagcgccaccuacaaggggcaguacgagcuccagacccuggagcugaacauggagucccucaacaugaccaugccgcugagcugcacgaagaacaacucccaccacuacauccgggccggcaacaacaccggccuggagcucacccugaccaacacgagcaucaucucccacaaguucugcaaccugagcgacgcccacaagaagaaccucuacgaccacacccugauguccaucaucaccaccuuccaccugagcauccccaacuucaaccaguacgaggccauguccugcgacuucaacgggggcaagaucagcauccaguacaaccucucccacagcuacgcgggggacgccgcccagcacugcggcacgguggccaacgggguccugcagaccuucaugcgcauggcguggggcggcuccuaccuggcccucgacagcgggcggcgcggcugggacugcaucaucuccagcuaccaguaccugaucauccagaacaccaccugggacgaccacugccaguucucccggcccagccccaucggguaccugggcuucgugagccagaagacgcgcgacaucuacaucucccggcgccgccggggcaccuucaccuggacccugagcgacuccgaggggcacgacaugccgggcggguacugccucacgcgguggaugcugaucgaggccgaccugaagugcuucggcaacaccgccguggccaagugcaacgagaagcacgacgaggaguucugcgacauguggcgccucuucgacuucaacaagcaggcgauccagcggcugaaggcccccgcccagaugaacauccagcugaucaacaaggccgucaacgcccucaucaacgaccagcugaugaugaagaaccaccuccgcgacaucauggggauccccuacugcaacuacagcaaguucugcuaccugaacaacaccaccacgggccggaccucccugccccgcugcugccugaucagcaacggcuccuaccucaacgagacccacuucagcgacgacaucgagcagcaggcggacaacaugaucaccgagaugcugcagaaggaguacauggaccggcaggggaagacgccccugggccucguggaccuguucguguucuccaccagcuucuaccugaucaccaucuuccuccaccuggucaagaucccgacccaccgccacaucguggggaagcccugccccaagccccaccggcugaaccacaugggcaucugcuccugcgggcuguacaagcagccgggcgugcccguccgcuggaagcgguga

SEQ ID NO: 24684 - RNA, 1473 nt, Artificial Sequence; identical to SEQ ID NO: 24678
  derived and/or modified CDS sequence (opt1) from LASV(Pinneo-NIG-1969;Clade I)__AIT17836__GPCmut3

SEQ ID NO: 24685 - RNA, 1473 nt, Artificial Sequence
  derived and/or modified CDS sequence (opt1) from LASV(ISTH0009-NIG-2011;Clade II)__AIT17404__GPCmut3
augggccagaucaucaccuucuuccaggaggugccccacgucaucgaggaggugaugaacaucgugcugaucgcccucagccugcuggccauccucaaggggaucuacaacgucgcgaccugcggccuguucgggcugguguccuuccuccugcugugcggccgcagcugcuccacgaccuacaaggggguguacgagcuccagacccuggagcuggacauggccagccucaacaugaccaugccgcuguccugcacgaagaacaacagccaccacuacaucauggucggcaacgagaccggccuggagcucacccugaccaacacguccaucaucaaccacaaguucugcaaccugagcgacgcccacaagaagaaccucuacgaccacgcccugauguccaucaucagcaccuuccaccuguccauccccaacuucaaccaguacgaggccaugagcugcgacuucaacgggggcaagaucuccgugcaguacaaccucagccacgcguacgccguggacgccgccaaccacugcgggaccaucgcgaacggcguccugcagaccuucaugcggauggccuggggcggguccuacaucgcccuggacagcggcaagggguccugggacugcaucaugacgagcuaccaguaccucaucauccagaacaccaccugggaggaccacugccaguucucccgccccagccccaucggcuaccuggggcugcucagccagcggacccgcgacaucuacaucucccggcgccgccggggcacguucaccuggacccucagcgacuccgagggcaacgagacccccgggggcuacugccugacgcgguggaugcugaucgaggccgagcucaagugcuucgggaacaccgccguggcgaagugcaacgagaagcacgacgaggaguucugcgacaugcugcgccuguucgacuucaacaagcaggccauccggcgccucaagacccccgcccagaugagcauccagcugaucaacaaggccgugaacgcccugaucaacgaccagcucaucaugaagaaccaccuccgggacaucaugggcaucccguacugcaacuacuccaaguacugcuaccugaaccacaccgucacggggaagaccagccugccccgcugcugccugguguccaacggcagcuaccugaacgagacccacuucuccgacgacaucgagcagcaggcggacaacaugaucaccgagcuccugcagaaggaguacauggaccggcagggcaagacgccccuggggcucguggaccuguucgucuucagcaccuccuucuaccugaucagcaucuuccugcaccucaucaagaucccgacccaccgccacaucaccggcaagcccugccccaagccccaccggcugaaccacauggggaucugcuccugcggccuguacaagcacccgggggugcccgugaaguggaagcgcuga

SEQ ID NO: 24686 - RNA, 1473 nt, Artificial Sequence
  derived and/or modified CDS sequence (opt1) from LASV(ISTH2010-NIG-2012;Clade II)__AIT17482__GPCmut3
augggccagaucaucaccuucuuccaggaggugccccacgucaucgaggaggugaugaacaucgugcugaucgcccucagccugcuggccauccucaaggggaucuacaacgucgcgaccugcggccuguucgggcugguguccuuccuccugcugugcggccgcagcugcuccacgaccuacaaggggguguacgagcuccagacccuggagcuggacauggccagccucaacaugaccaugccgcuguccugcacgaagaacaacagccaccacuacaucauggucggcaacgagaccggccuggagcucacccugaccaacacguccaucaucaaccacaaguucugcaaccugagcgacgcccacaagaagaaccucuacgaccacgcccugauguccaucaucagcaccuuccaccuguccauccccaacuucaaccaguacgaggccaugagcugcgacuucaacgggggcaagaucuccgugcaguacaaccucagccacgcguacgccguggacgccgccaaccacugcgggaccaucgcgaacggcguccugcagaccuucaugcggauggccuggggcggguccuacaucgcccuggacagcggcaagggguccugggacugcaucaugacgagcuaccaguaccucaucauccagaacaucaccugggaggaccacugccaguucucccgccccagccccaucggcuaccuggggcugcucagccagcggacccgcgacaucuacaucucccggcgccgccggggcaccuucacguggacccucagcgacuccgagggcaacgagacccccgggggcuacugccugacccgguggaugcugaucgaggccgagcucaagugcuucgggaacacggccguggcgaagugcaacgagaagcacgacgaggaguucugcgacaugcugcgccuguucgacuucaacaagcaggccauccggcgccucaagacccccgcccagaugagcauccagcugaucaacaaggccgugaacgcccugaucaacgaccagcucaucaugaagaaccaccuccgggacaucaugggcauccccuacugcaacuacuccaaguacugcuaccugaaccacaccgucaccgggaagacgagccugccccgcugcugccugguguccaacggcagcuaccugaacgagacccacuucuccgacgacaucgagcagcaggcggacaacaugaucaccgagcuccugcagaaggaguacaucgaccggcagggcaagaccccgcuggggcucguggaccuguucgucuucagcacguccuucuaccugaucagcaucuuccugcaccucgugaagaucccgacccaccgccacguggucggcaagcccugccccaagccccaccggcugaaccacauggggaucugcuccugcggccuguacaagcacccgggggugcccgugaaguggaagcgcuga

SEQ ID NO: 24687 - RNA, 1473 nt, Artificial Sequence
  derived and/or modified CDS sequence (opt1) from LASV(Lassa virus/H.sapiens-wt/NGA/2015/ISTH_0543;Clade II)__AVO03639__GPCmut3
augggccagaucaucaccuucuuccaggaggugccccacgucaucgaggaggugaugaacaucgugcugaucgcccucagccugcuggccauccucaaggggaucuacaacgucgcgaccugcggccuguucgggcugguguccuuccuccugcugugcggccgcagcugcuccacgaccuacaaggggguguacgagcuccagacccuggagcuggacauggccaaccucaacaugaccaugccgcugagcugcacgaagaacaacucccaccacuacaucauggucggcaacgagaccggccuggagcucacccugaccaacacgagcaucaucaaccacaaguucugcaaccuguccgacgcccacaagaagaaccucuacgaccacgcccugaugagcaucaucuccaccuuccaccugagcauccccaacuucaaccaguacgaggccauguccugcgacuucaacgggggcaagaucagcgugcaguacaaccucucccacaccuacgcgguggacgccgccaaccacugcgggaccaucgccaacggcguccugcagacguucaugcggauggcguggggcgggagcuacaucgcccuggacuccggcaaggggagcugggacugcaucaugaccuccuaccaguaccucgugauccagaacaccaccugggaggaccacugccaguucagccgccccucccccaucggcuaccuggggcugcucagccagcggacgcgcgacaucuacaucagccggcgccgccggggcaccuucaccuggacccucuccgacagcgagggcaacgagacgcccgggggcuacugccugacccgguggaugcugaucgaggccgagcucaagugcuucgggaacaccgccguggccaagugcaacgagaagcacgacgaggaguucugcgacaugcugcgccuguucgacuucaacaagcaggcgauccggcgccucaagacccccgcccagauguccauccagcugaucaacaaggccgucaacgcccugaucaacgaccagcucaucaugaagaaccaccuccgggacaucaugggcauccccuacugcaacuacagcaaguacugcuaccugaaccacacggugaccgggaagaccucccugccccgcugcugccuggugagcaacggcuccuaccugaacgagacccacuucagcgacgacaucgagcagcaggccgacaacaugaucacggagcuccugcagaaggaguacaucgaccggcagggcaagaccccgcuggggcucgucgaccuguucguguucuccaccagcuucuaccugaucuccaucuuccugcaccucgugaagaucccgacccaccgccacaucacgggcaagcccugccccaagccccaccggcugaaccacauggggaucugcagcugcggccuguacaagcacccggggguccccgugaaguggaagcgcuga

SEQ ID NO: 24688 - RNA, 1473 nt, Artificial Sequence
  derived and/or modified CDS sequence (opt1) from LASV(Lassa virus/H.sapiens-wt/NGA/2016/ISTH_0009;Clade II)__AVO03571__GPCmut3
augggccagaucaucaccuucuuccaggaggugccccacgucaucgaggaggugaugaacaucgugcugaucgcccucagccugcuggccauccucaaggggaucuacaacgucgcgaccugcggccugcuggggcucguguccuuccugcugcucugcggccgcagcugcuccacgaccuacaaggggguguacgagcugcagacccuggagcucgacauggccagccugaacaugaccaugccgcuguccugcacgaagaacaacagccaccacuacaucauggucggcaacgagaccggccucgagcugacccugaccaacacguccaucaucaaccacaaguucugcaaccucagcgacgcccacaagaagaaccuguacgaccacgcccugauguccaucaucagcaccuuccaccucuccauccccaacuucaaccaguacgaggccaugagcugcgacuucaacgggggccggaucuccgugcaguacaaccugagccacuccuacgcgguggacgccgccaaccacugcgggaccaucgccaacggcguccugcagaccuucaugcgcauggcguggggcgggagcuacaucgcccucgacuccggcaaggggagcugggacugcaucaugacguccuaccaguaccugaucauccagaacaccaccugggaggaccacugccaguucagccggcccagccccaucggcuaccuggggcuccugucccagcgcacccgggacaucuacaucagccgccggcgccggggcacguucaccuggacccuguccgacagcgagggcaacgagacccccgggggcuacugccugacgcgcuggaugcucaucgaggccgagcugaagugcuucgggaacaccgccguggccaagugcaacgagaagcacgacgaggaguucugcgacaugcugcggcuguucgacuucaacaagcaggcgauccgccggcugaagacccccgcccagauguccauccagcugaucaacaaggccgugaacgcccucaucaacgaccagcugaucaugaagaaccaccuccgcgacaucaugggcaucccguacugcaacuacagcaaguacugcuaccucaaccacaccgucacggggaagaccucccugccccggugcugccuggugagcaacggcuccuaccucaacgagacccacuucagcgacgacaucgagcagcaggccgacaacaugaucaccgagcugcugcagaaggaguacaucgaccgccagggcaagacgccccucgggcugguggaccuguucgucuucuccaccagcuucuaccugaucuccaucuuccuccaccuggugaagaucccgacccaccggcacaucaccggcaagcccugccccaagccccaccgccugaaccacauggggaucugcagcugcggccucuacaaccacccgggggugcccgucaaguggaagcgguga

SEQ ID NO: 24689 - RNA, 1473 nt, Artificial Sequence
  derived and/or modified CDS sequence (opt1) from LASV(Lassa virus/H.sapiens-wt/NGA/2016/ISTH_0017;Clade II)__AVO03567__GPCmut3
augggccagaucaucaccuucuuccaggaggugccccacgucaucgaggaggugaugaacaucgugcugaucgcccucagccugcuggccauccucaaggggaucuacaacgucgcgaccugcggccuguucgggcugguguccuuccuccugcugugcggccgcagcugcuccacgaccuacaaggggguguacgagcuccagacccuggagcuggacauggccagccucaacaugaccaugccgcuguccugcacgaagaacaacagccaccacuacaucauggucggcaacgagaccggccuggagcucacccugaccaacacguccaucaucaaccacaaguucugcaaccugagcgacgcccacaagaagaaccucuacgaccacgcccugauguccaucaucagcaccuuccaccuguccauccccaacuucaaccaguacgaggccaugagcugcgacuucaacgggggcaagaucuccgugcaguacaaccucagccacaccuacgcgaucgacgccgccaaccacugcgggaccaucgccaacggcgugcugcagacguucaugcggauggcguggggcggguccuacaucgcccuggacagcggcaagggguccugggacugcaucaugaccagcuaccaguaccucaucauccagaacaccaccugggaggaccacugccaguucucccgccccagccccaucggcuaccuggggcugcucagccagcggacgcgcgacaucuacaucucccggcgccgccggggcaccuucaccuggacccucagcgacuccgagggcaacgagacgcccgggggcuacugccugacccgguggaugcugaucgaggccgagcucaagugcuucgggaacaccgccgucgccaagugcaacgagaagcacgacgaggaguucugcgacaugcugcgccuguucgacuucaacaagcaggcgauccggcgccucaagacccccgcccagaugagcauccagcugaucaacaaggccgugaacgcccugaucaacgaccagcucaucaugaagaaccaccuccgggacaucaugggcauccccuacugcaacuacuccaaguacugcuaccugaaccacacggugaccgggaagaccagccugccccgcugcugccuggucuccaacggcagcuaccugaacgagacccacuucuccgacgacaucgagcagcaggccgacaacaugaucacggagcuccugcagaaggaguacauggaccggcagggcaagaccccgcuggggcucguggaccuguucguguucagcaccuccuucuaccugaucagcaucuuccugcaccucguccgcaucccgacccaccggcacgugaucggcaagcccugccccaagccccaccgccugaaccacauggggaucugcuccugcggccuguacaagcacccgggggugcccgucaaguggaagcgguga

SEQ ID NO: 24690 - RNA, 1473 nt, Artificial Sequence
  derived and/or modified CDS sequence (opt1) from LASV(Lassa virus/H.sapiens-wt/NGA/2018/ISTH_0959;Clade II)__AVV65099__GPCmut3
augggccagaucaucaccuucuuccaggaggugccccacgucaucgaggaggugaugaacaucgugcugaucgcccucagccugcuggccauccucaaggggaucuacaacgucgugaccugcggccuguucgggcugguguccuuccuccugcugugcggccgcagcugcuccacgaccuacaagggggucuacgagcuccagacccuggagcuggacauggcgagccucaacaugaccaugccgcuguccugcacgaagaacaacagccaccacuacaucauggugggcaacgagaccggccuggagcucacccugaccaacacguccaucaucaaccacaaguucugcaaccugagcgacgcccacaagaagaaccucuacgaccacgcccugauguccaucaucagcaccuuccaccuguccauccccaacuucaaccaguacgaggccaugagcugcgacuucaacgggggcaagaucuccgugcaguacaaccucagccacgccuacgcgaucgacgccgccaaccacugcgggaccaucgccaacggcguccugcagaccuucaugcggauggcguggggcggguccuacaucgcccuggacagcggcaagggguccugggacugcaucaugacgagcuaccaguaccucaucauccagaacaccaccugggaggaccacugccaguucucccgccccagccccaucggcuaccuggggcugcucagccagcggacccgcgacaucuacaucucccggcgccgccggggcacguucaccuggacccucagcgacuccgagggcaacgagacccccgggggcuacugccugacgcgguggaugcugaucgaggccgagcucaagugcuucgggaacaccgccguggccaagugcaacgagaagcacgacgaggaguucugcgacaugcugcgccuguucgacuucaacaagcaggcgauccggcgccucaagacccccgcccagaugagcauccagcugaucaacaaggccgugaacgcccugaucaacgaccagcucaucaugaagaaccaccuccgggacaucaugggcaucccguacugcaacuacuccaaguacugcuaccugaaccacaccgucacggggaagaccagccugccccgcugcugccugguguccaacggcagcuaccugaacgagacccacuucuccgacgacaucgagcagcaggccgacaacaugaucaccgagcuccugcagaaggaguacaucgaccggcagggcaagacgccccuggggcucguggaccuguucgucuucagcaccuccuucuaccugaucagcaucuuccugcaccucgugaagaucccgacccaccgccacgugaucggcaagcccugccccaagccccaccggcugaaccacauggggaucugcuccugcggccuguacaagcacccggggguccccgugaaguggaagcgcuga

SEQ ID NO: 24691 - RNA, 1473 nt, Artificial Sequence
  derived and/or modified CDS sequence (opt1) from LASV(LASV003-NIG-2008;Clade II)__AIT17580__GPCmut3
augggccagaucaucaccuucuuccaggaggugccccacgucaucgaggaggugaugaacaucgugcugaucgcccucagccugcuggccauccucaaggggaucuacaacgucgcgaccugcggccuguucgggcugguguccuuccuccugcugugcggccgcagcugcuccacgaccuacaaggggguguacgagcuccagacccuggagcuggacauggccagccucaacaugaccaugccgcuguccugcacgaagaacaacagccaccacuacaucauggucggcaacgagaccggccuggagcucacccugaccaacacguccaucaucaaccacaaguucugcaaccugagcgacgcccacaagaagaaccucuacgaccacgcccugauguccaucaucagcaccuuccaccuguccauccccaacuucaaccaguacgaggccaugagcugcgacuucaacgggggcaagaucuccgugcaguacaaccucagccacaccuacgcgguggacgccgccaaccacugcgggaccaucgccaacggcguccugcagacguucaugcggauggcguggggcggguccuacaucgcccuggacagcggcaagggguccugggacugcaucaugaccagcuaccaguaccucaucauccagaacaccaccugggaggaccacugccaguucucccgccccagccccaucggcuaccuggggcugcucagccagcggacgcgcgacaucuacaucucccggcgccgccggggcaccuucaccuggacccucagcgacuccgagagcaacgagacgccgggcggguacugccugacccgguggaugcugaucgaggccgagcucaagugcuucggcaacaccgccguggccaagugcaacgagaagcacgacgaggaguucugcgacaugcugcgccuguucgacuucaacaagcaggcgauccggcgccucaaggcccccgcccagauguccauccagcugaucaacaaggccgugaacgcccugaucaacgaccagcucaucaugaagaaccaccuccgggacaucauggggauccccuacugcaacuacagcaaguacugcuaccugaaccacaccgucacgggccgcaccucccugccccggugcugccuggugagcaacggguccuaccugaacgagacccacuucagcgacgacaucgagcagcaggcggacaacaugaucaccgagcuccugcagaaggaguacauggaccgccagggcaagacgccccugggccucguggaccuguucgucuucuccaccagcuucuaccugaucuccaucuuccugcaccucgugaagaucccgacccaccggcacgugaucgggaagcccugccccaagccccaccgccugaaccacaugggcaucugcagcugcgggcuguacaagcacccgggcguccccgugaaguggaagcgguga

SEQ ID NO: 24692 - RNA, 1473 nt, Artificial Sequence
  derived and/or modified CDS sequence (opt1) from LASV(LASV035-NIG-2009;Clade II)__AIT17588__GPCmut3
augggccagaucaucaccuucuuccaggaggugccccacgucaucgaggaggugaugaacaucgugcugaucgcccucagccugcuggccauccucaaggggaucuacaacgucgcgaccugcggccuguucgggcugguguccuuccuccugcugugcggccgcagcugcuccacgaccuacaaggggguguacgagcuccagacccuggagcuggacauggccagccucaacaugaccaugccgcuguccugcacgaagaacaacagccaccacuacaucauggucggcaacgagaccggccuggagcucacccugaccaacacguccaucaucaaccacaaguucugcaaccugagcgacgcccacaagaagaaccucuacgaccacgcccugauguccaucaucagcaccuuccaccuguccauccccaacuucaaccaguacgaggccaugagcugcgacuucaacgggggcaagaucuccgugcaguacaaccucagccacgcguacgccguggacgccgccaaccacugcgggaccaucgcgaacggcguccugcagaccuucaugcggauggccuggggcggguccuacaucgcccuggacagcggcaagggguccugggacugcaucaugacgagcuaccaguaccucaucauccagaacaccaccugggaggaccacugccaguucucccgccccagccccaucggcuaccuggggcugcucagccagcggacccgcgacaucuacaucucccggcgccgccggggcacguucaccuggacccucagcgacuccgagggcaacgagacccccgggggcuacugccugacgcgguggaugcugaucgaggccgagcucaagugcuucgggaacaccgccguggcgaagugcaacgagaagcacgacgaggaguucugcgacaugcugcgccuguucgacuucaacaagcaggccauccggcgccucaaggcccccgcccagaugagcauccagcugaucaacaaggccgugaacgcgcugaucaacgaccagcucaucaugaagaaccaccuccgggacaucaugggcauccccuacugcaacuacuccaaguacugcuaccugaaccacaccgucaccgggaagacgagccugccccgcugcugccugguguccaacggcagcuaccugaacgagacccacuucuccgacgacaucgagcagcaggccgacaacaugaucaccgagcuccugcagaaggaguacaucgaccggcagggcaagaccccgcuggggcucguggaccuguucgucuucagcacguccuucuaccugaucagcaucuuccugcaccucgugaagaucccgacccaccgccacgugaucggcaagcccugccccaagccccaccggcugaaccacauggggaucugcuccugcggccuguacaagcacccggggguccccgugaaguggaagcgcuga

SEQ ID NO: 24693 - RNA, 1473 nt, Artificial Sequence
  derived and/or modified CDS sequence (opt1) from LASV(LASV1000-NIG-2009;Clade II)__AIT17782__GPCmut3
augggccagaucaucaccuucuuccaggaggugccccacgucaucgaggaggugaugaacaucgugcugaucgcccucagccugcuggccauccucaaggggaucuacaacgucgcgaccugcggccuguucgggcugguguccuuccuccugcugugcggccgcagcugcuccacgaccuacaaggggguguacgagcuccagacccuggagcuggacauggccagccucaacaugaccaugccgcuguccugcacgaagaacaacagccaccacuacaucauggucggcaacgagaccggccuggagcucacccugaccaacacguccaucaucaaccacaaguucugcaaccugagcgacgcccacaagaagaaccucuacgaccacgcccugauguccaucaucagcaccuuccaccuguccauccccaacuucaaccaguacgaggccaugagcugcgacuucaacgggggcaagaucuccgugcaguacaaccucagccacaccuacgcgguggacgccgccaaccacugcgggaccaucgccaacggcguccugcagacguucaugcggauggcguggggcggguccuacaucgcccuggacagcggcaagggguccugggacugcaucaugaccagcuaccaguaccucaucauccagaacaccaccugggaggaccacugccaguucucccgccccagccccaucggcuaccuggggcugcucagccagcggacgcgcgacaucuacaucucccggcgccgccggggcaccuucaccuggacccucagcgacuccgagggcaacgagacgcccgggggcuacugccugacccgguggaugcugaucgaggccgagcucaagugcuucgggaacaccgccguggccaagugcaacgagaagcacgacgaggaguucugcgacaugcugcgccuguucgacuucaacaagcaggcgaucaagcggcucaagacccccgcccagaugagcauccagcugaucaacaaggccgugaacgcccugaucaacgaccagcucaucaugaagaaccaccuccgcgacaucaugggcauccccuacugcaacuacuccaaguacugcuaccugaaccacacggucaccgggaagaccagccugccccggugcugccugguguccaacggcagcuaccugaacgagacccacuucuccgacgacaucgagcagcaggccgacaacaugaucacggagcuccugcagaaggaguacaucgaccgccagggcaagaccccgcuggggcucguggaccuguucgucuucagcaccuccuucuaccugaucagcaucuuccugcaccucgugaagaucccgacccaccggcacguggucggcaagcccugccccaagccccaccgccugaaccacauggggaucugcuccugcggccuguacaagcacccgggggugcccgugaaguggaagcgguga

SEQ ID NO: 24694 - RNA, 1473 nt, Artificial Sequence
  derived and/or modified CDS sequence (opt1) from LASV(LASV221-NIG-2010;Clade II)__AIT17624__GPCmut3
augggccagaucaucaccuucuuccaggaggugccccacgucaucgaggaggugaugaacaucgugcugaucgcccucagccugcuggccauccucaaggggaucuacaacgucgcgaccugcggccuguucgggcugguguccuuccuccugcugugcggccgcagcugcuccacgaccuacaaggggguguacgagcuccagacccuggagcuggacauggccagccucaacaugaccaugccgcuguccugcacgaagaacaacagccaccacuacaucauggucggcaacgagaccggccuggagcucacccugaccaacacguccaucaucaaccacaaguucugcaaccugagcgacgcccacaagaagaaccucuacgaccacgcccugauguccaucaucagcaccuuccaccuguccauccccaacuucaaccaguacgaggccaugagcugcgacuucaacgggggcaagaucuccgugcaguacaaccucagccacaccuacgcgaucgacgccgccaaccacugcgggaccaucgccaacggcgugcugcagacguucaugcggauggcguggggcggguccuacaucgcccuggacagcggcaagggguccugggacugcaucaugaccagcuaccaguaccucaucauccagaacaccaccugggaggaccacugccaguucucccgccccagccccaucggcuaccuggggcugcucagccagcggacgcgcgacaucuacaucucccggcgccgccggggcaccuucaccuggacccucagcgacuccgagggcaacgagacgcccgggggcuacugccugacccgguggaugcugaucgaggccgagcucaagugcuucgggaacaccgccgucgccaagugcaacgagaagcacgacgaggaguucugcgacaugcugcgccuguucgacuucaacaagcaggcgauccggcgccucaagacccccgcccagaugagcauccagcugaucaacaaggccgugaacgcccugaucaacgaccagcucaucaugaagaaccaccuccgggacaucaugggcauccccuacugcaacuacuccaaguacugcuaccugaaccacacggugaccgggaagaccagccugccccgcugcugccuggucuccaacggcagcuaccugaacgagacccacuucuccgacgacaucgagcagcaggccgacaacaugaucacggagaugcuccagaaggaguacauggaccggcagggcaagaccccgcuggggcugguggaccucuucguguucagcaccuccuucuaccugaucagcaucuuccugcaccuggucaagaucccgacccaccgccacgugaucggcaagcccugccccaagccccaccggcucaaccacauggggaucugcuccugcggccuguacaagcacccgggggugcccgucaaguggaagcgcuga

SEQ ID NO: 24695 - RNA, 1473 nt, Artificial Sequence
  derived and/or modified CDS sequence (opt1) from LASV(LASV237-NIG-2010;Clade II)__AIT17638__GPCmut3
augggccagaucaucaccuucuuccaggaggugccccacgucaucgaggaggugaugaacaucgugcugaucgcccucagccugcuggccauccucaaggggaucuacaacgucgcgaccugcggccuguucgggcugguguccuuccuccugcugugcggccgcagcugcuccacgaccuacaaggggguguacgagcuccagacccuggagcuggacauggccagccucaacaugaccaugccgcuguccugcacgaagaacaacagccaccacuacaucauggucggcaacgagaccggccuggagcucacccugaccaacacguccaucaucaaccacaaguucugcaaccugagcgacgcccacaagaaggaccucuacgaccacgcccugauguccaucaucagcaccuuccaccuguccauccccaacuucaaccaguacgaggccaugagcugcgacuucaacgggggcaagaucuccgugcaguacaaccucagccacaccuacgcgguggacgccgccaaccacugcgggaccaucgccaacggcguccugcagacguucaugcggauggcguggggcggguccuacaucgcccuggacagcggcaagggguccugggacugcaucaugaccagcuaccaguaccucaucauccagaacaccaccugggaggaccacugccaguucucccgccccagccccaucggcuaccuggggcugcucagccagcggacgcgcgacaucuacaucucccggcgccgccggggcaccuucaccuggacccucagcgacuccgagggcaacgagacgcccgggggcuacugccugacccgguggaugcugaucgaggccgagcucaagugcuucgggaacaccgccguggccaagugcaacgagaagcacgacgaggaguucugcgacaugcugcgccuguucgacuucaacaagcaggcgauccggcgccucaagacccccgcccagaugagcauccagcugaucaacaaggccgugaacgcccugaucaacgaccagcucaucaugaagaaccaccuccgggacaucaugggcauccccuacugcaacuacuccaaguacugcuaccugaaccacacggucaccgggaagaccagccugccccgcugcugccugguguccaacggcagcuaccugaacgagacccacuucuccgacgacaucgagcagcaggccgacaacaugaucacggagcuccugcagaaggaguacauggaccggcagggcaagaccccgcuggggcucguggaccuguucgucuucagcaccuccuucuaccugaucagcaucuuccugcaccucaucaagaucccgacccaccgccacaucacgggcaagcccugccccaagccccaccggcugaaccacauggggaucugcuccugcggccuguacaagcacccgggggugcccgugaaguggaagcgcuga

SEQ ID NO: 24696 - RNA, 1473 nt, Artificial Sequence
  derived and/or modified CDS sequence (opt1) from LASV(LASV253-NIG-2011;Clade II)__AIT17670__GPCmut3
augggccagaucaucaccuucuuccaggaggugccccacgucaucgaggaggugaugaacaucgugcugaucgcccucagccugcuggccauccucaaggggaucuacaacgucgcgaccugcggccuguucgggcugguguccuuccuccugcugugcggccgcagcugcuccacgaccuacaaggggguguacgagcuccagacccuggagcuggacauggccagccucaacaugaccaugccgcuguccugcacgaagaacaacagccaccacuacaucauggucggcaacgagaccggccuggagcucacccugaccaacacguccaucaucaaccacaaguucugcaaccugagcgacgcccacaagaagaaccucuacgaccacgcccugauguccaucaucagcaccuuccaccuguccauccccaacuucaaccaguacgaggccaugagcugcgacuucaacgggggcaagaucuccgugcaguacaaccucagccacaccuacgcgguggacgccgccaaccacugcgggaccaucgccaacggcguccugcagacguucaugcggauggcguggggcggguccuacaucgcccuggacagcggcaagggguccugggacugcaucaugaccagcuaccaguaccucaucauccagaacaccaccugggaggaccacugccaguucucccgccccagccccaucggcuaccuggggcugcucagccagcggacgcgcgacaucuacaucucccggcgccgccggggcaccuucaccuggacccucagcgacuccgagggcaacgagacgcccgggggcuacugccugacccgguggaugcugaucgaggccgagcucaagugcuucgggaacaccgccguggccaagugcaacgagaagcacgacgaggaguucugcgacaugcugcgccuguucgacuucaacaagcaggcgauccggcgccucaaggcccccgcccagaugagcauccagcugaucaacaaggccgugaacgcccugaucaacgaccagcucaucaugaagaaccaccuccgggacaucaugggcaucccguacugcaacuacuccaaguacugcuaccugaaccacaccgucacggggcgcaccagccugccccggugcugccugguguccaacggcagcuaccugaacgagacccacuucuccgacgacaucgagcagcaggcggacaacaugaucaccgagcuccugcagaaggaguacaucgaccgccagggcaagacgccccuggggcucguggaccuguucgucuucagcaccuccuucuaccugaucagcaucuuccugcaccucgugaagaucccgacccaccggcacaucaucggcaagcccugccccaagccccaccgccugaaccacauggggaucugcuccugcggccuguacaagcacccgggggugcccgucaaguggaagcgguga

SEQ ID NO: 24697 - RNA, 1473 nt, Artificial Sequence
  derived and/or modified CDS sequence (opt1) from LASV(LASV254-NIG-2011;Clade II)__AIT17674__GPCmut3
augggccagaucaucaccuucuuccaggaggugccccacgucaucgaggaggugaugaacaucgugcugaucgcccucagccugcuggccauccucaaggggaucuacaacgucgcgaccugcggccuguucgggcugguguccuuccuccugcugugcggccgcagcugcuccacgaccuacaaggggguguacgagcuccagacccuggagcuggacaugaccaaccucaacaugacgaugccgcugagcugcaccaagaacaacucccaccacuacaucauggucggcaacgagaccggccuggagcucacccugacgaacaccagcaucaucaaccacaaguucugcaaccuguccgacgcccacaagaagaaccucuacaaccacgcccugaugagcaucaucuccaccuuccaccugagcauccccaacuucaaccaguacgaggccauguccugcgacuucaacgggggcaagaucagcgugcaguacaaccucucccacagcuacgccguggacgcggccaaccacugcgggaccaucgccaacggcguccugcagacguucaugcggauggccuggggcggguccuacaucgcgcuggacagcggcaaggggaacugggacugcaucaugaccuccuaccaguaccucaucauccagaacaccaccugggaggaccacugccaguucagccgccccucccccaucggcuaccuggggcugcucagccagcggacgcgcgacaucuacaucagccggcgccgccggggcaccuucaccuggacccucuccgacagcgagggcaacgagacgcccgggggcuacugccugacccgguggaugcugaucgaggccgagcucaagugcuucgggaacaccgccguggccaagugcaacgagaagcacgacgaggaguucugcgacaugcugcgccuguucgacuucaacaagcaggccauccggcgccucaagacccccgcgcaggccaacauccagcugaucaacaaggccgugaacgcccugaucaacgaccagcucaucaugaagaaccaccuccgggacaucaugggcauccccuacugcaacuacuccaaguacugcuaccugaaccacacggucaccgggaagaccagccugccccgcugcugccugguguccaacggcagcuaccugaacgagacccacuucuccgacgacaucgagcagcaggccgacaacaugaucacggagcuccugcagaaggaguacauggaccggcagggcaagaccccgcuggggcucguggaccuguucgucuucagcaccuccuucuaccugaucagcaucuuccugcaccucgugaagaucccgacccaccgccacgugaucggcaagcccugccccaagccccaccggcugaaccacauggggaucugcuccugcggccuguacaagcacccggggguccccgugaaguggaagcgcuga

SEQ ID NO: 24698 - RNA, 1473 nt, Artificial Sequence
  derived and/or modified CDS sequence (opt1) from LASV(Nig08-A19;Clade III)__ADU56618__GPCmut3
augggccagaucgugaccuucuuccaggaggucccccacgugaucgaggaggugaugaacaucguccugaucgcccucagcauccuggccauccugaaggggcucuacaacaucgcgaccugcggccugaucgggcuggugacguuccuccugcuguccggccgcagcugcuccaugaccuacaaggggguguacgagcuccagacccuggagcugaacaugaacacccucaacaugacgaugccgcugagcugcaccaagaacaacucccaccacuacaucauggucggcaacgagaccggccuggagcucacccugacgaacaccagccugcuccaccacaaguucugcaaccuguccgacgcccacaagaagaaccuguacgaccacacccucaugagcaucaucuccaccuuccaccugagcauccccaacuucaaccaguacgaggccauguccugcgacuucaacgggggcaagaucacggugcaguacaaccugagccacuccuacgccaucgacgccgcgaaccacugcgggaccguggccaacggcguccuccagaccuucaugcggauggccuggggcgggagcuacaucgcccuggacuccggccgcgggaagugggacugcaucaugaccagcuaccaguaccugaucauccagaacacgaccugggaggaccacugccaguucucccggcccagccccaucggcuaccucgggcugcugucccagcgcacccgggacaucuacaucagccgccggcgccggggcaccuucacguggacccugagcgacuccgagggcaacgagacccccgggggcuacugccucacccgcuggaugcugaucgaggcggagcugaagugcuucgggaacacggccguggccaagugcaacgagaagcacgacgaggaguucugcgacaugcuccggcuguucgacuucaacaagcaggccauccgccggcugaaggcccccgcgcagaugagcauccagcucaucaacaaggccgugaacgcccugaucaacgaccagcugaucaugaagaaccaccuccgcgacaucaugggcauccccuacugcaacuacuccaaguacugcuaccugaaccacaccagcaccgggcggaccucccugccccgcugcugccucgucagcaacggcuccuaccugaacgagacgcacuucagcgacgacaucgagcagcaggccgacaacaugaucaccgagaugcugcagaaggaguaccucgaccggcagggcaagaccccgcuggggcugguggaccuguucguguucuccaccagcuucuaccucaucuccaucuuccugcaccuggucaagaucccgacgcaccgccacaucgugggcaagcccugccccaagccccaccggcucaaccacauggggaucugcagcugcggccuguacaagcagccgggggugcccguccgcuggaagcgguga

SEQ ID NO: 24699 - RNA, 1476 nt, Artificial Sequence
  derived and/or modified CDS sequence (opt1) from LASV(G1180-SLE-2010;Clade IV)__AIT17168__GPCmut3
augggccagaucgugaccuucuuccaggaggucccccacgugaucgaggaggugaugaacaucguccugaucgcccucagcauccuggccgugcugaaggggcucuacaacuucgcgaccugcggccugguggggcugcucaccuuccugcugcucugcggccgcuccugcaccgccagccgguacaagggggucuacgagcugcagacccuggagcucaacauggagacccugaacaugacgaugccgcuguccugcaccaagaacaacagccaccacuacaucauggugggcaacgagaccggccucgagcugacccugacgaacaccuccaucaucaaccacaaguucugcaaccucagcgacgcccacaagaagaaccuguacgaccacgcccugauguccaucaucagcaccuuccaccucuccauccccaacuucaaccaguacgaggccaugagcugcgacuucaacgggggcaagaucuccgugcaguacaaccugagccacuccuacgcgggggacgccgccaaccacugcggcaccgucgccaacggggugcugcagacguucaugcgcauggcguggggcggcagcuacaucgcccucgacuccgggcacggcagcugggacugcaucaugaccuccuaccaguaccugaucauccagaacaccaccugggaggaccacugccaguucagccggcccucccccaucggguaccugggccuccugagccagcgcacgcgggacaucuacaucagccgccggcgccggggcaccuucaccuggacccuguccgacagcgaggggaaggacacgccgggcggguacugccugacccgcuggaugcucaucgaggccgagcugaagugcuucggcaacaccgccguggccaagugcaacgagaagcacgacgaggaguucugcgacaugcugcggcuguucgacuucaacaagcaggcgauccagcgccugaaggcccccgcccagauguccauccagcugaucaacaaggccgucaacgcccucaucaacgaccagcugaucaugaagaaccaccuccgggacaucauggggauccccuacugcaacuacagcaaguacugcuaccucaaccacaccacgaccggcaagaccucccugcccaagugcugccuggugagcaacggcuccuaccucaacgagacccacuucagcgacgacaucgagcagcaggcggacaacaugaucacggagaugcugcagaaggaguacauggagcgccaggggaagacgccccugggccucguggaccuguucgucuucuccaccagcuucuaccugaucuccaucuuccugcaccucgugaagaucccgacccaccggcacaucgugggcaagagcugccccaagccccaccgccugaaccacauggggaucugcuccugcgggcuguacaagcagcccggcgucccggugaaguggaagcgguga

SEQ ID NO: 24700 - RNA, 1476 nt, Artificial Sequence
  derived and/or modified CDS sequence (opt1) from LASV(G1442-SLE-2011;Clade IV)__AIT17180__GPCmut3
augggccagaucgugaccuucuuccaggaggucccccacgugaucgaggaggugaugaacaucguccugaucgcccucagcauccuggccgugcugaaggggcucuacaacguggcgaccugcggccugaucgggcuggucacguuccuccugcugugcggccgcuccugcaccaccacccucuacaaggggguguacgagcugcagacgcuggagcucaacauggagacccugaacaugaccaugccgcugagcugcaccaagaacaacucccaccacuacauccgggugggcaacgagacgggccucgagcugacccugaccaacaccagcaucaucaaccacaaguucugcaaccucuccgacgcccacaagaagaaccuguacgaccacgcccugaugagcaucaucuccacguuccaccucagcauccccaacuucaaccaguacgaggccauguccugcgacuucaacgggggcaagaucagcguccaguacaaccugucccacagcuacgccggggacgcggccaaccacugcggcaccguggccaacggggugcugcagaccuucaugcgcauggccuggggcggcuccuacaucgcgcucgacagcgggcggggcaacugggacugcaucaugaccuccuaccaguaccugaucauccagaacacgaccugggacgaccacugccaguucagccgccccucccccaucggguaccugggccuccugagccagcggacccgcgacgucuacaucucccggcgccgccggggcaccuucacguggacccugagcgacagcgaggggaaggacaccccgggcggguacugccugacccgguggaugcucaucgaggccgagcugaagugcuucggcaacacggccguggccaagugcaacgagaagcacgacgaggaguucugcgacaugcugcgccucuucgacuucaacaagcaggccauccagcggcugaaggcgcccgcccagauguccauccagcugaucaacaaggccgugaacgcccucaucaacgaccagcugaucaugaagaaccaccuccgcgacaucauggggauccccuacugcaacuacagcaaguacugcuaccugaacaacaccgccaccggcaagaccucccugcccaagugcugccugaucagcaacggcuccuaccucaacgagacgcacuucagcgacgacaucgagcaggaggcggacaacaugaucaccgagaugcugcagaaggaguacauggagcggcaggggaagacgccccugggccucgucgaccuguucguguucuccaccagcuucuaccugaucuccaucuuccugcaccucgugaagaucccgacccaccgccacaucgucggcaagagcugccccaagccccaccggcugaaccacauggggaucugcuccugcgggcuguacaagcagcccggcgugccggugcgcuggaagcgguga

SEQ ID NO: 24701 - RNA, 1476 nt, Artificial Sequence
  derived and/or modified CDS sequence (opt1) from LASV(G3010-SLE-2013;Clade IV)__AIT17344__GPCmut3
augggccagaucgugaccuucuuccaggaggucccccacgugaucgaggaggugaugaacaucguccugaucgcccucagcauccuggccgugcugaaggggcucuacaacuucgcgaccugcggccugguggggcuggucacguuccuccugcugugcggccgcuccugcaccaccagccucuacaaggggguguacgagcugcagacccuggagcucaacauggagacgcugaacaugaccaugccgcuguccugcaccaagaacaacagccaccacuacaucauggugggcaacgagaccggccucgagcugacgcugaccaacaccuccaucaucaaccacaaguucugcaaccucagcgacgcccacaagaagaaccuguacaaccacgcccugauguccaucaucagcaccuuccaccucuccauccccaacuucaaccaguacgaggccaugagcugcgacuucaacgggggcaagaucuccguccaguacaaccugagccacuccuacgccggggacgcggccagccacugcggcacgguggccaacggggugcugcagaccuucaugcggauggccuggggcggcuccuacaucgcgcucgacagcggguacggcaagugggacugcaucaugaccuccuaccaguaccugaucauccagaacaccacgugggaggaccacugccaguucagccgccccucccccaucggguaccugggccuccugagccagcggacccgcgacaucuacaucagccggcgccgccggggcaccuucaccuggacgcuguccgacagcgaggggaaggacaccccgggcggguacugccugacccgguggaugcucaucgaggccgagcugaagugcuucggcaacaccgccgucgccaagugcaacgagaagcacgacgaggaguucugcgacaugcugcgccucuucgacuucaacaagcaggccauccagcggcugaagacgcccgcgcagauguccauccagcugaucaacaaggccgugaacgcccucaucaacgaccagcugaucaugaagaaccaccuccgcgacaucauggggauccccuacugcaacuacagcaaguacugcuaccugaaccacaccaccaccggcaagacgucccugcccaagugcugccuggugagcaacggcuccuaccucaacgagacccacuucagcgacgacaucgagcagcaggccgacaacaugaucaccgagaugcugcagaaggaguacauggagcggcaggggaagacgccccugggccucgucgaccuguucguguucuccaccagcuucuaccugaucuccaucuuccugcaccucgugaagaucccgacccaccgccacaucgucggcaagagcugccccaagccccaccggcugaaccacauggggaucugcuccugcgggcuguacaagcagcccggcgugccggugcgcuggaagcgguga

SEQ ID NO: 24702 - RNA, 1476 nt, Artificial Sequence
  derived and/or modified CDS sequence (opt1) from LASV(G502-SLE-2009;Clade IV)__AIT17126__GPCmut3
augggccagaucgugaccuucuuccaggaggucccccacgugaucgaggaggugaugaacaucguccugaucgcccucagcauccuggccgugcugaaggggcucuacaacuucgcgaccugcggccugguggggcugcucacguuccugcugcucugcggccgcuccugcaccaccgggcuguacaagggcgucuacgagcugcagacccucgagcugaacauggagacgcugaacaugaccaugccgcucagcugcaccaagaacaacucccaccacuacaucauggugggcaacgagaccgggcuggagcugacgcucaccaacaccagcaucaucaaccacaaguucugcaaccuguccgacgcccacaagaagaaccuguacgaccacgcccucaugagcaucaucuccaccuuccaccugagcauccccaacuucaaccaguacgaggccauguccugcgacuucaacggcgggaagaucagcgugcaguacaaccugucccacagcuacgccggcgacgcggccgaccacugcgggacggucgccaacggcgugcuccagaccuucaugcggauggccuggggcggguccuacaucgcgcuggacagcggccgcgggcggugggacugcaucaugaccuccuaccaguaccugaucauccagaacaccacgugggaggaccacugccaguucagccgccccucccccaucggcuaccucggccugcugagccagcggacccgcgacaucuacaucucccggcgccgccgggggaccuucaccuggacgcugagcgacagcgagggcaaggacacccccgggggcuacugccucacccgguggaugcugaucgaggccgagcugaagugcuucgggaacaccgccguggccaagugcaacgagaagcacgacgaggaguucugcgacaugcuccgccuguucgacuucaacaagcaggccauccagcggcugaaggcgcccgcccagauguccauccagcucaucaacaaggccgucaacgcccugaucaacgaccagcuggugaugaagaaccaccuccgcgacaucaugggcauccccuacugcaacuacagccgguacugcuaccugaaccacacgaccaccggccgcaccucccugcccaagugcugccucgugagcaacggguccuaccugaacgagacgcacuucagcgacgacaucgagcagcaggccgacaacaugaucaccgagaugcugcagaaggaguacauggagcggcagggcaagaccccgcucgggcuggucgaccuguucguguucuccaccagcuucuaccugaucuccaucuuccuccaccuggugaagaucccgacgcaccgccacaucgucggcaagagcugccccaagccccaccggcugaaccacauggggaucugcuccugcggccucuacaagcagcccggcgugccggugaaguggaagcgcuga

SEQ ID NO: 24703 - RNA, 1476 nt, Artificial Sequence
  derived and/or modified CDS sequence (opt1) from LASV(G733-SLE-2010;Clade IV)__AIT17154__GPCmut3
augggccagaucgugaccuucuuccaggaggucccccacgugaucgaggaggugaugaacaucguccugaucgcccucagcauccuggccgugcugaaggggcucuacaacuucgcgaccugcggcaucguggggcuggucuccuuccugcuccugugcggccgcagcugcacgaccucccuguacaaggggguguacgagcuccagacccuggagcugaacauggagacccucaacaugacgaugccgcugagcugcaccaagaacaacucccaccacuacaucauggugggcaacgagaccggccuggagcucacccugacgaacaccagcaucaucaaccacaaguucugcaaccuguccgacgcccacaagaagaaccucuacgaccacgcccugaugagcaucaucuccaccuuccaccugagcauccccaacuucaaccaguacgaggccauguccugcgacuucaacgggggcaagaucagcguccaguacaaccucucccacagcuacgccggggacgcggccaaccacugcggcaccaucgccaacggggugcugcagacguucaugcggauggccuggggcggcuccuacaucgcgcuggacagcgggcgcgaccggugggacugcaucaugaccuccuaccaguaccucaucauccagaacaccaccugggaggaccacugccaguucagccgccccucccccaucggcuaccuggggcugcucagccagcggacgcgcgacaucuacaucagccggcgccgccggggcaccuucaccuggacccucuccgacagcgagggcaaggacacgcccgggggcuacugccugacccgguggaugcugaucgaggccgagcucaagugcuucgggaacaccgccguggccaagugcaacgagaagcacgacgaggaguucugcgacaugcugcgccuguucgacuucaacaagcaggccauccagcggcucaaggcgcccgcccagauguccauccagcugaucaacaaggccgucaacgcccugaucaacgaccagcucaucaugaagaaccaccuccgcgacaucaugggcauccccuacugcaacuacagcaaguacugcuaccugaaccacaccacgaccgggaagaccucccugcccaagugcugccuggugagcaacggcuccuaccugaacgagacccacuucagcgacgacaucgagcagcaggccgacaacaugaucacggagaugcuccagaaggaguacauggagcggcagggcaagaccccgcuggggcugguggaccucuucgucuucuccaccagcuucuaccugaucuccaucuuccugcaccuggugaagaucccgacccaccgccacguggucggcaagagcugccccaagccccaccggcucaaccacauggggaucugcuccugcggccuguacgggcagcccggcgugccggugaaguggaagcgcuga

SEQ ID NO: 24704 - RNA, 1476 nt, Artificial Sequence
  derived and/or modified CDS sequence (opt1) from MOPV/LASV reassortant(IGS-1;Clade IV)__AFY05576__GPCmut3
augggccagaucgugaccuucuuccaggaggucccccacgugaucgaggaggugaugaacaucguccugaucgcccucagcgugcuggccgugcugaaggggcucuacaacuucgcgaccugcggccuggucgggcuggugacguuccuccugcugugcggccgcuccugcaccaccagccucuacaaggggguguacgagcugcagacccuggagcucaacauggagacgcugaacaugaccaugccgcuguccugcaccaagaacaacagccaccacuacaucauggucggcaacgagaccggccucgagcugacgcugaccaacaccuccaucaucaaccacaaguucugcaaccucagcgacgcccacaagaagaaccuguacgaccacgcccugauguccaucaucagcaccuuccaccucuccauccccaacuucaaccaguacgaggccaugagcugcgacuucaacgggggcaagaucuccgugcaguacaaccugagccacuccuacgccggggacgcggccaaccacugcggcacgguggccaacgggguccugcagaccuucaugcggauggccuggggcggcagcuacaucgcgcucgacuccgggcgcggcaacugggacugcaucaugaccagcuaccaguaccugaucauccagaacaccacgugggaggaccacugccaguucucccggcccagccccaucggguaccugggccuccugucccagcgcacccgggacaucuacaucagccgccggcgccggggcaccuucaccuggacgcugagcgacuccgagggggaggacaccccgggcggguacugccugacccgcuggaugcucaucgaggccgagcugaagugcuucggcaacaccgccguggccaagugcaacgagaagcacgacgaggaguucugcgacaugcugcggcuguucgacuucaacaagcaggccauccagcgccugaaggcgcccgcccagaugagcauccagcugaucaacaaggccgugaacgcccucaucaacgaccagcugaucaugaagaaccaccuccgggacaucauggggauccccuacugcaacuacuccaaguacugcuaccucaaccacacgaccaccggccgcaccagccugcccaagugcugccuggucuccaacggcagcuaccucaacgagacgcacuucuccgacgacaucgagcagcaggccgacaacaugaucaccgagaugcugcagaaggaguacauggagcggcaggggaagacgccccugggccucguggaccuguucguguucagcaccuccuucuaccugaucagcaucuuccugcaccucgucaagaucccgacccaccgccacaucguggggaaguccugccccaagccccaccggcugaaccacaugggcaucugcagcugcgggcuguacaagcagcccggcgugccggucaaguggaagcgcuga

SEQ ID NO: 24705 - RNA, 1476 nt, Artificial Sequence
  derived and/or modified CDS sequence (opt1) from LASV(LM765-SLE-2012;Clade IV)__AIT17814__GPCmut3
augggccagaucgugaccuucuuccaggaggucccccacgugaucgaggaggugaugaacaucguccugaucgcccucagcauccuggccgugcugaaggggcucuacaacuucgcgaccugcggccugguggggcuggucacguuccuccugcugugcggccgcuccugcaccaccagccucuacaaggggguguacgagcugcagacccuggagcucaacauggagacgcugaacaugaccaugccgcuguccugcaccaagaacaacagccaccacuacaucauggugggcaacgagaccggccucgagcugacgcugaccaacaccuccaucaucgaccacaaguucugcaaccucagcgacgcccaccggaagaaccuguacgaccacgcccugauguccaucaucagcaccuuccaccucuccauccccaacuucaaccaguacgaggccaugagcugcgacuucaacgggggcaagaucuccguccaguacaaccugagccacuccuacgccaaggacgcggccgaccacugcgggacgguggccaacggcgugcugcagaccuucaugcgcauggccuggggcgggagcuacaucgcgcucgacuccggccgggggcgcugggacugcaucaugaccagcuaccaguaccugaucauccagaacaccacgugggaggaccacugccaguucucccggcccagccccaucggcuaccuggggcuccugucccagcgcacccgggacaucuacaucagccgccggcgccggggcaccuucaccuggacgcugagcgacuccgagggcaaggacacccccgggggcuacugccugacccgcuggaugcucaucgaggccgagcugaagugcuucgggaacaccgccgucgccaagugcaacgagaagcacgacgaggaguucugcgacaugcugcggcuguucgacuucaacaagcaggccauccagcgccugaaggcgcccgcccagaugagcauccagcugaucaacaaggccgugaacgcccucaucaacgaccagcugaucaugaagaaccaccuccgggacaucaugggcauccccuacugcaacuacuccaaguacugcuaccucaaccacacgaccaccgggaagaccagccugcccaagugcugccugguguccaacggcagcuaccucaacgagacgcacuucuccgacgacaucgagcagcaggccgacaacaugaucaccgagaugcugcagaaggaguacauggagcgccagggcaagaccccgcuggggcucgucgaccuguucguguucagcaccuccuucuaccugaucagcaucuuccugcaccucgugaagaucccgacgcaccggcacaucgucggcaagcccugccccaagccccaccgccugaaccacauggggaucugcuccugcggccuguacaagcagccgggggugcccgugaaguggaagcgguga

SEQ ID NO: 24706 - RNA, 1476 nt, Artificial Sequence
  derived and/or modified CDS sequence (opt1) from LASV(LM776-SLE-2012;Clade IV)__AIT17824__GPCmut3
augggccagaucgugaccuucuuccaggaggucccccacgugaucgaggaggugaugaacaucguccugaucgcccucagcauccuggccgugcugaaggggcucuacaacuucgcgaccugcggccugguggggcuggucacguuccuccugcugugcggccgcuccugcaccaccagcguguacaaggggguguacgagcuccagacccuggagcugaacauggagacgcucaacaugaccaugccgcuguccugcaccaagaacaacagccaccacuacaucauggucggcaacgagaccggccuggagcucacgcugaccaacaccuccaucaucaaccacaaguucugcaaccugagcgacgcccacaagaagaaccucuacgaccacgcccugauguccaucaucagcaccuuccaccuguccauccccaacuucaaccaguacgaggccaugagcugcgacuucaacgggggcaagaucuccgugcaguacaaccucagccacuccuacgccggggacgcggccaaccacugcggcacgguggccaacgggguccugcagaccuucaugcggauggccuggggcggcagcuacaucgcgcuggacuccgggcacggcaagugggacugcaucaugaccagcuaccaguaccucaucauccagaacaccacgugggaggaccacugccaguucucccgccccagccccaucggguaccugggccugcucucccagcggacccgcgacaucuacaucagccggcgccgccggggcaccuucaccuggacgcucagcgacuccgaggggaaggacaccccgggcggguacugccugacccgguggaugcugaucgaggccgagcucaagugcuucggcaacaccgccguggccaagugcaacgagaagcacgacgaggaguucugcgacaugcugcgccuguucgacuucaacaagcaggccauccagcggcucaaggcgcccgcccagaugagcauccagcugaucaacaaggccgugaacgcccugaucaacgaccagcucaucaugaagaaccaccuccgcgacaucauggggauccccuacugcaacuacuccaaguacugcuaccugaaccacacgaccaccggcaagaccagccugcccaagugcugccuggucuccaacggcagcuaccugaacgagacgcacuucuccgacgacaucgagcagcaggccgacaacaugaucaccgagaugcuccagaaggaguacauggagcggcaggggaagacgccccugggccugguggaccucuucguguucagcaccuccuucuaccugaucagcaucuuccugcaccuggucaagaucccgacccaccgccacaucguggggaaguccugccccaagccccaccggcucaaccacaugggcaucugcagcugcgggcuguacaagcagcccggcgugccgguccgcuggaagcgguga

SEQ ID NO: 24707 - RNA, 1476 nt, Artificial Sequence
  derived and/or modified CDS sequence (opt1) from LASV(Mad39;Clade IV)__ANH09722__GPCmut3
augggccagaucgugaccuucuuccaggaggucccccacgugaucgaggaggugaugaacaucguccugaucgcccucagcauccuggccgugcugaaggggcucuacaacguggcgaccugcggccugaucgggcuggucacguuccuccugcugugcggccgcuccugcaccaccacccucuacaaggggguguacgagcugcaggcccuggagcucaacauggagacgcugaacaugaccaugccgcugagcugcaccaagaacaacucccaccacuacauccgggugggcaacgagaccggccucgagcugacgcugaccaacaccagccucaucaaccacaaguucugcaaccuguccgacgcccacaagaagaaccuguacgaccacgcccucaugagcaucaucuccaccuuccaccugagcauccccaacuucaaccaguacgaggccauguccugcgacuucaacgacgggaagaucagcguccaguacaaccugucccacacguacgcgggcgacaccgccaaccacugcgggaccguggccaacggcgugcuccagaccuucaugcgcauggccuggggcgggagcuacaucgcgcuggacuccggccgcgggggcugggacugcaucaugacgagcuaccaguaccugaucauccagaacaccaccugggaggaccacugccaguucucccggcccagccccaucggguaccucggccugcugucccagcggacccgcgacaucuacaucagccggcgccgccggggcacguucaccuggacccuguccgacagcgaggggaaggacaccccgggcggguacugccucacgcgguggaugcugaucgaggccgagcugaagugcuucggcaacaccgccgucgccaagugcaacgagaagcacgacgaggaguucugcgacaugcuccgccuguucgacuucaacaagcaggccauccagcggcugaaggcgcccgcccagaugagcauccagcucaucaacaaggccgugaacgcccugaucaacgaccagcugaucaugaagaaccaccuccgcgacaucauggggauccccuacugcaacuacuccaaguacugcuaccugaaccacaccgugaccggcaagacgagccugcccaagugcugccucgucuccaacggcagcuaccugaacgagacccacuucuccgacgacaucgagcagcaggccgacaacaugaucaccgagaugcugcagaaggaguacauggagcggcaggggaagacgccccucggccugguggaccuguucguguucagcaccuccuucuaccugaucagcaucuuccuccaccuggucaagaucccgacccaccgccacgugguggggaagcccugccccaagccccaccggcugaaccacaugggcaucugcuccugcggguucuacaagcagccgggcguccccgugcgcuggaagcgguga

SEQ ID NO: 24708 - RNA, 1476 nt, Artificial Sequence
  derived and/or modified CDS sequence (opt1) from LASV(Z0947-SLE-2011;Clade IV)__AIT17840__GPCmut3
augggccagaucgugaccuucuuccaggaggucccccacgugaucgaggaggugaugaacaucguccugaucgcccucagcauccuggccgugcugaaggggcucuacaacuucgcgaccugcggccugguggggcuggucacguuccuccugcugugcggccgcuccugcaccaucagccucuacaaggggguguacgagcugcagacccuggagcucaacauggagacccugaacaugacgaugccgcuguccugcaccaagaacaacagccaccacuacaucauggugggcaacgagaccggccucgagcugacccugacgaacaccuccaucaucaaccacaaguucugcaaccucagcgacgcccacaagaagaaccuguacgaccacgcccugauguccaucaucagcaccuuccaccucuccauccccaacuucaaccaguacgaggccaugagcugcgacuucaacgggggcaagaucuccguccaguacaaccugagccacuccuacgccggggacgcggccaaccacugcggcaccguggccaacggggugcugcagacguucaugcggauggccuggggcggcagcuacaucgcgcucgacuccgggcgcgaccggugggacugcaucaugaccagcuaccaguaccugaucauccagaacaccaccugggaggaccacugccaguucucccgccccagccccaucggcuaccuggggcuccugucccagcggacgcgcgacaucuacaucagccggcgccgccggggcaccuucaccuggacccugagcgacuccgagggcaaggacacgcccgggggcuacugccugacccgguggaugcucaucgaggccgagcugaagugcuucgggaacaccgccgucgccaagugcaacgagaagcacgacgaggaguucugcgacaugcugcgccucuucgacuucaacaagcaggccauccagcggcugaaggcgcccgcccagaugagcauccagcugaucaacaaggccgugaacgcccucaucaacgaccagcugaucaugaagaaccaccuccgcgacaucaugggcauccccuacugcaacuacuccaaguacugcuaccugaaccacaccacgaccgggaagaccagccugcccaagugcugccugguguccaacggcagcuaccucaacgagacccacuucuccgacgacaucgagcagcaggccgacaacaugaucacggagaugcugcagaaggaguacauggagcggcagggcaagaccccgcuggggcucgucgaccuguucguguucagcaccuccuucuaccugaucagcaucuuccugcaccucgugaagaucccgacccaccgccacaucgucggcaagcccugccccaagccccaccggcugaaccacauggggaucugcuccugcggccuguacaagcagccgggggugcccgugaaguggaagcgcuga

SEQ ID NO: 24709 - RNA, 1476 nt, Artificial Sequence
  derived and/or modified CDS sequence (opt1) from LASV(Josiah;Clade IV)__NP_694870__GPCmut3
augggccagaucgugaccuucuuccaggaggucccccacgugaucgaggaggugaugaacaucguccugaucgcccucagcgugcuggccgugcugaaggggcucuacaacuucgcgaccugcggccuggucgggcuggugacguuccuccugcugugcggccgcuccugcaccaccagccucuacaaggggguguacgagcugcagacccuggagcucaacauggagacgcugaacaugaccaugccgcuguccugcaccaagaacaacagccaccacuacaucauggucggcaacgagaccggccucgagcugacgcugaccaacaccuccaucaucaaccacaaguucugcaaccucagcgacgcccacaagaagaaccuguacgaccacgcccugauguccaucaucagcaccuuccaccucuccauccccaacuucaaccaguacgaggccaugagcugcgacuucaacgggggcaagaucuccgugcaguacaaccugagccacuccuacgccggggacgcggccaaccacugcggcacgguggccaacgggguccugcagaccuucaugcggauggccuggggcggcagcuacaucgcgcucgacuccgggcgcggcaacugggacugcaucaugaccagcuaccaguaccugaucauccagaacaccacgugggaggaccacugccaguucucccggcccagccccaucggguaccugggccuccugucccagcgcacccgggacaucuacaucagccgccggcgccggggcaccuucaccuggacgcugagcgacuccgaggggaaggacaccccgggcggguacugccucacccgcuggaugcugaucgaggccgagcugaagugcuucggcaacaccgccguggccaagugcaacgagaagcacgacgaggaguucugcgacaugcuccggcuguucgacuucaacaagcaggccauccagcgccugaaggcgcccgcccagaugagcauccagcucaucaacaaggccgugaacgcccugaucaacgaccagcugaucaugaagaaccaccuccgggacaucauggggauccccuacugcaacuacuccaaguacugcuaccugaaccacacgaccaccggccgcaccagccugcccaagugcugccucgucuccaacggcagcuaccugaacgagacgcacuucuccgacgacaucgagcagcaggccgacaacaugaucaccgagaugcugcagaaggaguacauggagcggcaggggaagaccccgcucggccugguggaccuguucguguucagcaccuccuucuaccugaucagcaucuuccuccaccuggucaagauccccacgcaccgccacaucguggggaaguccugccccaagccccaccggcugaaccacaugggcaucugcagcugcgggcucuacaagcagccgggcgugcccgucaaguggaagcgcuga

SEQ ID NO: 24710 - RNA, 1473 nt, Artificial Sequence
  derived and/or modified CDS sequence (opt1) from LASV(LP;Clade I)__AAF86701__GPCmut3
augggccagaucaucaccuucuuccaggaggugccccacgucaucgaggaggugaugaacaucgugcugaucgcccucagccugcuggccauccucaaggggcuguacaacaucgcgaccugcggcaucaucgggcuggucgccuuccucuuccugugcggcaaguccugcagccugacgcucaagggcggguacgagcugcagacccuggagcucaacauggagacccugaacaugaccaugccgcuguccugcacgaagaacagcucccaccacuacauccgcgugggcaacgagaccgggcucgagcugacccugaccaacacgagcaucaucaaccacaaguucugcaaccucuccgacgcccacaagaagaaccuguacgaccacgcccugaugagcaucaucuccaccuuccaccucagcauccccaacuucaaccaguacgaggccauguccugcgacuucaacggcgggaagaucagcgugcaguacaaccugucccacagcuacgcgggcgacgccgccgagcacugcgggaccgucgccaacggcgugcugcagaccuucaugcggauggcguggggcgggcgcuacaucgcccucgacuccggcaaggggaacugggacugcaucaugacgagcuaccaguaccugaucauccagaacaccaccugggaggaccacugccaguucucccggcccagccccaucggcuaccugggccuccugucccagcgcacccgggacaucuacaucagccgccggcgccgggggacguucaccuggacccugagcgacuccgagggcaacgagacccccgggggcuacugccucacgcgcuggaugcugaucgaggccgagcugaagugcuucgggaacaccgccguggccaagugcaacgagaagcacgacgaggaguucugcgacaugcuccggcuguucgacuucaacaagcaggcgauccgccggcugaaggccccggcccagaugagcauccagcucaucaacaaggccgucaacgcccugaucaacgaccagcugaucaugaagaaccaccuccgcgacaucaugggcauccccuacugcaacuacuccaaguacugcuaccugaaccacaccagcuccggccggaccagccugcccaagugcugccucaucuccaacgggagcuaccugaacgagacgcaguucuccgacgacaucgagcagcaggcggacaacaugaucaccgagaugcugcagaaggaguacaucgagcgccagggcaagaccccgcucgggcugguggacaucuucaucuucagcaccuccuucuaccugaucagcaucuuccugcaccucaucaagauccccacgcaccggcacaucgugggcaagcccugccccaagccgcaccgccugaaccacaugggggucugcuccugcggccuguacaagcaccccggcgugcccaccaaguggaagcgguga

SEQ ID NO: 24711 - RNA, 1473 nt, Artificial Sequence
  derived and/or modified CDS sequence (opt1) from LASV(803213;Clade II)__AAF86703__GPCmut3
augggccagaucaucaccuucuuccaggaggugccccacgucaucgaggaggugaugaacaucgugcugaucgcccucagccugcuggccauccucaaggggaucuacaacgucgcgaccugcggccuguucgggcugaucuccuuccuccugcugugcggccgcagcugcuccgugacguacaaggggguguacgagcuccagacccuggagcugaacauggccaaccucaacaugaccaugccgcugagcugcaccaagaacaacucccaccacuacaucauggucggcaacgagacgggccuggagcucacccugaccaacaccagcaucaucaaccacaaguucugcaaccuguccgacgcccacaagaagaaccucuacgaccacgcccugaugagcaucaucuccacguuccaccugagcauccccaacuucaaccaguacgaggccauguccugcgacuucaacgggggcaagaucagcgugcaguacaaccucucccacagcuucgcgguggacgccgccaaccacugcgggaccaucgccaacggcguccugcagaccuucaugcggauggcguggggcggguccuacaucgcccuggacagcggcaaggggaacugggacugcaucaugaccuccuaccaguaccucaucauccagaacacgaccugggaggaccacugccaguucagccgccccucccccaucggcuaccuggggcugcucagccagcggacccgcgacaucuacaucagccggcgccggcgcggcaccuucacguggacccuguccgacagcgagggcaacgaggcccccgggggcuacugccugacccgguggaugcucaucgaggccgagcugaagugcuucgggaacaccgccguggcgaagugcaacgagaagcacgacgaggaguucugcgacaugcugcgccucuucgacuucaacaagcaggccaucaagcggcugaagacgccggcccagauguccauccagcugaucaacaaggccgugaacgcccucaucaacgaccagcugaucaugaagaaccaccuccgcgacaucaugggcauccccuacugcaacuacagccgguacugcuaccugaaccacaccgucaccgggaagaccucccugccccgcugcugccuggugagcaacggcuccuaccucaacgagacgcacuucagcgacgacaucgagcagcaggcggacaacaugaucaccgagaugcugcagaaggaguacauggaccggcagggcaagaccccgcuggggcucguggaccuguucgucuucuccaccagcuucuaccugaucuccaucuuccugcaccucgugaagauccccacgcaccgccacaucgugggcaagcccugccccaagccgcaccggcugaaccacauggggaucugcagcugcggccuguacaagcaccccgggguccccgugaaguggaagcgcuga

SEQ ID NO: 24712 - RNA, 1473 nt, Artificial Sequence
  derived and/or modified CDS sequence (opt1) from LASV(GA391;Clade III)__CAA36645__GPCmut3
augggccagaucgugaccuucuuccaggaggucccccacgugaucgaggaggugaugaacaucguccugaucgcccucagcauccuggccauccugaaggggcucuacaacguggcgaccugcggccugaucgggcuggugacguuccuccugcuguccggccgcagcugcucccucaucuacaaggggaccuacgagcugcagacccuggagcucaacauggagacccugaacaugacgaugccgcugagcugcaccaagaacaacucccaccacuacauccgggucggcaacgagaccggccucgagcugacccugacgaacaccagcauccucaaccacaaguucugcaaccuguccgacgcccacaagcgcaaccuguacgaccacagccucauguccaucaucagcaccuuccaccuguccauccccaacuucaaccaguacgaggccaugagcugcgacuucaacgggggcaagaucaccgugcaguacaaccugucccacagcuucgccguggacgccgcggggcacugcggcacgcucgccaacgggguccugcagaccuucaugcggauggccuggggcggcuccuacaucgcccuggacagcgggcgcggcaacugggacugcaucaugaccuccuaccaguaccucaucauccagaacaccacgugggacgaccacugccaguucagccggcccucccccaucggguaccugggccugcucagccagcgcacccgggacaucuacaucagccgccggcgccggggcaccuucaccuggacgcuguccgacagcgaggggaacgagaccccgggcggguacugccugacccgcuggaugcucaucgaggcggagcugaagugcuucggcaacaccgccguggccaagugcaacgagaagcacgacgaggaguucugcgacaugcugcggcuguucgacuucaacaagcaggccauccgccggcugaagacgcccgcccagauguccauccagcugaucaacaaggcggugaacgcccucaucaacgaccagcugaucaugaagaaccaccuccgcgacaucauggggauccccuacugcaacuacagccgguacugcuaccucaaccacaccuccaccggcaagaccagccugccccgcugcugccugaucuccaacggcagcuaccucaacgagacgaaguucuccgacgacaucgagcagcaggccgacaacaugaucaccgagaugcugcagaaggaguacaucgaccggcaggggaagaccccgcugggccuggucgaccucuucguguucagcaccuccuucuaccugaucagcaucuuccugcaccucgugaagauccccacgcaccgccacaucgucgggaagcccugccccaagccgcaccggcugaaccacaugggcaucugcuccugcgggcuguacaagcagcccggcgugcccgugcgcuggaagcgcuga

SEQ ID NO: 24713 - RNA, 1476 nt, Artificial Sequence
  derived and/or modified CDS sequence (opt1) from LASV(AV;Clade V)__CCA30314__GPCmut3
augggccagaucgugaccuucuuccaggaggucccccacgugaucgaggaggugaugaacaucguccugaucgcccucagcauccuggccgugcugaaggggcucuacaacaucgcgaccugcggccugaucgggcugaucacguuccuccugcugugcggccgcuccugcagcuccaaccucuacaaggggguguacgagcugcagagccuggaccucaacauggagacccugaacaugaccaugccgcuguccugcaccaagaacaacagccaccacuacauccgggucggcaacgacacgggccucgagcugacccugaccaacaccuccauccucaaccacaaguucugcaaccugagcgacgcccacaagaaggaccuguacgaccacgcccucauguccaucaucagcacguuccaccuguccauccccaacuucaaccaguacgaggccaugagcugcgacuucaacgggggcaagaucuccgugcaguacaaccugagccacuccuacgccaucgacgcggccaaccacugcgggaccguggccaacggcauccuccagaccuucaugcgcauggccuggggcgggagcuacaucgcgcuggacuccggccgggggaacugggacugcaucaugaccagcuaccaguaccugaucauccagaacacgaccugggagaaccacugccaguucucccgccccagccccaucggcuaccucgggcugcugagccagcggacccgcgacaucuacaucucccggcgccggcgcggcaccuucacguggacccucagcgacuccgagggcaacgccacccccgggggcuacugccugacccgguggaugcugaucgaggccgagcucaagugcuucgggaacacggccgucgccaagugcaacgagaagcacgacgaggaguucugcgacaugcugcgccuguucgacuucaacaagcaggcgaucagccggcucaaguccccggcccagaugagcauccagcugaucaacaaggccgugaacgcccugaucaacgaccagcucaucaugaagaaccaccuccgcgacaucaugggcauccccuacugcaacuacuccaaguacugcuaccugaaccacaccaucaccgggaagaccagccugcccaagugcugccugguguccaacggcagcuaccugaacgagacgcacuucuccgacgacaucgagcagcaggccgacaacaugaucaccgagaugcuccagaaggaguacauggagcggcagggcaagaccccgcuggggcuggucgaccuguucguguucagcaccuccuucuaccucaucagcaucuuccugcgccuggugaagauccccacgcaccggcacaucgucggcaagcccugccccaagccgcaccgccucaaccacauggggaucugcuccugcggccuguacaagcagcccggggugcccgugcgguggaagcgcuga

SEQ ID NO: 24714 - RNA, 1473 nt, Artificial Sequence
  derived and/or modified CDS sequence (opt1) from LASV(Togo/2016/7082;Clade VI)__AMR44577__GPCmut3
augggccagaucaucaccuucuuccaggaggugccccacgucaucgaggaggugaugaacaucgugcugaucgcccucagccugcuggccauccucaagggggucuacaacguggcgaccugcggcaucaucgggcuggugacguuccuguuccucugcggccgcuccugcagccugaucuacaagggguccuacgagcugcagacccucgagcugaacauggagacccugaacaugaccaugccgcucagcugcacgaagaacuccagccaccacuacauccgggucggcaacgagaccggccuggagcugacccucaccaacacguccaucaucaaccacaaguucugcaaccugagcgacgcccacaagcgcaaccuguacgaccacgcccucauguccauccugagcaccuuccaccuguccauccccaacuucaaccaguacgaggccaugagcugcgacuucaacgggggcaagaucuccgugcaguacaaccucagccacgccuacgcgguggacgccgccgagcacugcgggaccgucgccaacggcgugcugcagaccuucaugcggauggcguggggcggguccuacaucgcccuggacagcggccgcgggaacugggacugcaucaugacguccuaccaguaccucaucauccagaacaccaccugggaggaccacugccaguucagccggcccucccccaucggcuaccuggggcugcucagccagcgcacccgggacaucuacaucagccgccggcgccggggcacguucaccuggacccuguccgacagcgagggcaacgagacccccgggggcuacugccugacgcgcuggaugcucaucgaggccgagcugaagugcuucgggaacaccgccguggccaagugcaacgagaagcacgacgaggaguucugcgacaugcugcggcuguucgacuucaacaagcaggcgauccagcgccugaaguccccggcccagaugagcauccagcugaucaacaaggccgucaacgcccucaucaacgaccagcugaucaugaagaaccaccuccgggacaugaugggcauccccuacugcaacuacuccaaguacugcuaccucaaccacaccagcuccgggcgcaccagccugcccaagugcugccugguguccaacggcagcuaccucaacgagacgcacuucuccgacgacaucgagcagcaggccgacaacaugaucaccgagaugcugcagaaggaguacaucgaccggcagggcaagaccccgcuggggcucguggaccuguucgucuucagcaccuccuucuaccugaucagcaucuuccugcaccucaucaagauccccacgcaccgccacaucgugggcaagcccugccccaagccgcaccggcugaaccacauggggaucugcuccugcggccuguacaagcagcccggggugcccacccgcuggaagcgguga

SEQ ID NO: 24715 - RNA, 1473 nt, Artificial Sequence
  derived and/or modified CDS sequence (opt1) from LASV(KAK-428;Clade n.d. (VII))__ANH09740__GPCmut3
augggccagaucgugaccuucuuccaggaggucccccacgugaucgaggaggugaugaacaucguccugaucgcccucagccugcuggccauccucaaggggcuguacaacuucgcgaccugcggcgugaucgggcugaucacguuccuccugcugugcggccgcuccugcagcgccaccuacaaggggcaguacgagcuccagacccuggagcugaacauggagucccucaacaugaccaugccgcugagcugcacgaagaacaacucccaccacuacauccgggccggcaacaacaccggccuggagcucacccugaccaacacgagcaucaucucccacaaguucugcaaccugagcgacgcccacaagaagaaccucuacgaccacacccugauguccaucaucaccaccuuccaccugagcauccccaacuucaaccaguacgaggccauguccugcgacuucaacgggggcaagaucagcauccaguacaaccucucccacagcuacgcgggggacgccgcccagcacugcggcacgguggccaacgggguccugcagaccuucaugcgcauggcguggggcggcuccuaccuggcccucgacagcgggcggcgcggcugggacugcaucaucuccagcuaccaguaccugaucauccagaacaccaccugggacgaccacugccaguucucccggcccagccccaucggguaccugggcuucgugagccagaagacgcgcgacaucuacaucucccggcgccggcgcggcaccuucaccuggacccucagcgacuccgaggggcacgacaugccgggcggguacugccugacgcgguggaugcugaucgaggccgaccucaagugcuucggcaacaccgccguggccaagugcaacgagaagcacgacgaggaguucugcgacauguggcgccuguucgacuucaacaagcaggcgauccagcggcugaaggcccccgcccagaugaacauccagcucaucaacaaggccgucaacgcccugaucaacgaccagcugaugaugaagaaccaccuccgcgacaucauggggauccccuacugcaacuacagcaaguucugcuaccugaacaacaccaccacgggccggaccucccugccccgcugcugccucaucagcaacggcuccuaccugaacgagacccacuucagcgacgacaucgagcagcaggcggacaacaugaucaccgagaugcugcagaaggaguacauggaccggcaggggaagacgccgcucggccugguggaccuguucguguucuccaccagcuucuaccucaucaccaucuuccugcaccuggucaagauccccacccaccgccacaucguggggaagcccugccccaagccgcaccggcugaaccacaugggcaucugcuccugcgggcucuacaagcagcccggcgugcccguccgcuggaagcgguga

SEQ ID NO: 24716 - RNA, 1473 nt, Artificial Sequence; identical to SEQ ID NO: 24710
  derived and/or modified CDS sequence (opt1) from LASV(Pinneo-NIG-1969;Clade I)__AIT17836__GPCmut3

SEQ ID NO: 24717 - RNA, 1473 nt, Artificial Sequence
  derived and/or modified CDS sequence (opt1) from LASV(ISTH0009-NIG-2011;Clade II)__AIT17404__GPCmut3
augggccagaucaucaccuucuuccaggaggugccccacgucaucgaggaggugaugaacaucgugcugaucgcccucagccugcuggccauccucaaggggaucuacaacgucgcgaccugcggccuguucgggcugguguccuuccuccugcugugcggccgcagcugcuccacgaccuacaaggggguguacgagcuccagacccuggagcuggacauggccagccucaacaugaccaugccgcuguccugcacgaagaacaacagccaccacuacaucauggucggcaacgagaccggccuggagcucacccugaccaacacguccaucaucaaccacaaguucugcaaccugagcgacgcccacaagaagaaccucuacgaccacgcccugauguccaucaucagcaccuuccaccuguccauccccaacuucaaccaguacgaggccaugagcugcgacuucaacgggggcaagaucuccgugcaguacaaccucagccacgcguacgccguggacgccgccaaccacugcgggaccaucgcgaacggcguccugcagaccuucaugcggauggccuggggcggguccuacaucgcccuggacagcggcaagggguccugggacugcaucaugacgagcuaccaguaccucaucauccagaacaccaccugggaggaccacugccaguucucccgccccagccccaucggcuaccuggggcugcucagccagcggacccgcgacaucuacaucucccggcgccggcgcggcacguucaccuggacccugagcgacuccgagggcaacgagacccccgggggcuacugccugacgcgguggaugcucaucgaggccgagcugaagugcuucgggaacaccgccguggcgaagugcaacgagaagcacgacgaggaguucugcgacaugcugcgccucuucgacuucaacaagcaggccauccggcgccugaagaccccggcccagaugagcauccagcugaucaacaaggccgugaacgcccucaucaacgaccagcugaucaugaagaaccaccuccgggacaucaugggcauccccuacugcaacuacuccaaguacugcuaccugaaccacaccgucacggggaagaccagccugccccgcugcugccugguguccaacggcagcuaccucaacgagacccacuucuccgacgacaucgagcagcaggcggacaacaugaucaccgagcugcugcagaaggaguacauggaccggcagggcaagacgccgcucgggcugguggaccuguucgucuucagcaccuccuucuaccugaucagcaucuuccuccaccugaucaagauccccacccaccgccacaucaccggcaagcccugccccaagccgcaccggcugaaccacauggggaucugcuccugcggccucuacaagcaccccggggugcccgugaaguggaagcgcuga

SEQ ID NO: 24718 - RNA, 1473 nt, Artificial Sequence
  derived and/or modified CDS sequence (opt1) from LASV(ISTH2010-NIG-2012;Clade II)__AIT17482__GPCmut3
augggccagaucaucaccuucuuccaggaggugccccacgucaucgaggaggugaugaacaucgugcugaucgcccucagccugcuggccauccucaaggggaucuacaacgucgcgaccugcggccuguucgggcugguguccuuccuccugcugugcggccgcagcugcuccacgaccuacaaggggguguacgagcuccagacccuggagcuggacauggccagccucaacaugaccaugccgcuguccugcacgaagaacaacagccaccacuacaucauggucggcaacgagaccggccuggagcucacccugaccaacacguccaucaucaaccacaaguucugcaaccugagcgacgcccacaagaagaaccucuacgaccacgcccugauguccaucaucagcaccuuccaccuguccauccccaacuucaaccaguacgaggccaugagcugcgacuucaacgggggcaagaucuccgugcaguacaaccucagccacgcguacgccguggacgccgccaaccacugcgggaccaucgcgaacggcguccugcagaccuucaugcggauggccuggggcggguccuacaucgcccuggacagcggcaagggguccugggacugcaucaugacgagcuaccaguaccucaucauccagaacaucaccugggaggaccacugccaguucucccgccccagccccaucggcuaccuggggcugcucagccagcggacccgcgacaucuacaucucccggcgccggcgcggcaccuucacguggacccugagcgacuccgagggcaacgagacccccgggggcuacugccugacccgguggaugcucaucgaggccgagcugaagugcuucgggaacacggccguggcgaagugcaacgagaagcacgacgaggaguucugcgacaugcugcgccucuucgacuucaacaagcaggccauccggcgccugaagaccccggcccagaugagcauccagcugaucaacaaggccgugaacgcccucaucaacgaccagcugaucaugaagaaccaccuccgggacaucaugggcauccccuacugcaacuacuccaaguacugcuaccugaaccacaccgucaccgggaagacgagccugccccgcugcugccugguguccaacggcagcuaccucaacgagacccacuucuccgacgacaucgagcagcaggcggacaacaugaucaccgagcugcugcagaaggaguacaucgaccggcagggcaagaccccgcucgggcugguggaccuguucgucuucagcacguccuucuaccugaucagcaucuuccuccaccuggugaagauccccacccaccgccacguggucggcaagcccugccccaagccgcaccggcugaaccacauggggaucugcuccugcggccucuacaagcaccccggggugcccgugaaguggaagcgcuga

SEQ ID NO: 24719 - RNA, 1473 nt, Artificial Sequence
  derived and/or modified CDS sequence (opt1) from LASV(Lassa virus/H.sapiens-wt/NGA/2015/ISTH_0543;Clade II)__AVO03639__GPCmut3
augggccagaucaucaccuucuuccaggaggugccccacgucaucgaggaggugaugaacaucgugcugaucgcccucagccugcuggccauccucaaggggaucuacaacgucgcgaccugcggccuguucgggcugguguccuuccuccugcugugcggccgcagcugcuccacgaccuacaaggggguguacgagcuccagacccuggagcuggacauggccaaccucaacaugaccaugccgcugagcugcacgaagaacaacucccaccacuacaucauggucggcaacgagaccggccuggagcucacccugaccaacacgagcaucaucaaccacaaguucugcaaccuguccgacgcccacaagaagaaccucuacgaccacgcccugaugagcaucaucuccaccuuccaccugagcauccccaacuucaaccaguacgaggccauguccugcgacuucaacgggggcaagaucagcgugcaguacaaccucucccacaccuacgcgguggacgccgccaaccacugcgggaccaucgccaacggcguccugcagacguucaugcggauggcguggggcgggagcuacaucgcccuggacuccggcaaggggagcugggacugcaucaugaccuccuaccaguaccucgugauccagaacaccaccugggaggaccacugccaguucagccgccccucccccaucggcuaccuggggcugcucagccagcggacgcgcgacaucuacaucagccggcgccggcgcggcaccuucaccuggacccuguccgacagcgagggcaacgagacgcccgggggcuacugccugacccgguggaugcucaucgaggccgagcugaagugcuucgggaacaccgccguggccaagugcaacgagaagcacgacgaggaguucugcgacaugcugcgccucuucgacuucaacaagcaggcgauccggcgccugaagaccccggcccagauguccauccagcugaucaacaaggccgucaacgcccucaucaacgaccagcugaucaugaagaaccaccuccgggacaucaugggcauccccuacugcaacuacagcaaguacugcuaccugaaccacacggugaccgggaagaccucccugccccgcugcugccuggugagcaacggcuccuaccucaacgagacccacuucagcgacgacaucgagcagcaggccgacaacaugaucacggagcugcugcagaaggaguacaucgaccggcagggcaagaccccgcucgggcuggucgaccuguucguguucuccaccagcuucuaccugaucuccaucuuccuccaccuggugaagauccccacccaccgccacaucacgggcaagcccugccccaagccgcaccggcugaaccacauggggaucugcagcugcggccucuacaagcaccccgggguccccgugaaguggaagcgcuga

SEQ ID NO: 24720 - RNA, 1473 nt, Artificial Sequence
  derived and/or modified CDS sequence (opt1) from LASV(Lassa virus/H.sapiens-wt/NGA/2016/ISTH_0009;Clade II)__AVO03571__GPCmut3
augggccagaucaucaccuucuuccaggaggugccccacgucaucgaggaggugaugaacaucgugcugaucgcccucagccugcuggccauccucaaggggaucuacaacgucgcgaccugcggccugcuggggcucguguccuuccugcugcucugcggccgcagcugcuccacgaccuacaaggggguguacgagcugcagacccuggagcucgacauggccagccugaacaugaccaugccgcuguccugcacgaagaacaacagccaccacuacaucauggucggcaacgagaccggccucgagcugacccugaccaacacguccaucaucaaccacaaguucugcaaccucagcgacgcccacaagaagaaccuguacgaccacgcccugauguccaucaucagcaccuuccaccucuccauccccaacuucaaccaguacgaggccaugagcugcgacuucaacgggggccggaucuccgugcaguacaaccugagccacuccuacgcgguggacgccgccaaccacugcgggaccaucgccaacggcguccugcagaccuucaugcgcauggcguggggcgggagcuacaucgcccucgacuccggcaaggggagcugggacugcaucaugacguccuaccaguaccugaucauccagaacaccaccugggaggaccacugccaguucagccggcccagccccaucggcuaccuggggcuccugucccagcgcacccgggacaucuacaucagccgccggcgccggggcacguucaccuggacccuguccgacagcgagggcaacgagacccccgggggcuacugccucacgcgcuggaugcugaucgaggccgagcugaagugcuucgggaacaccgccguggccaagugcaacgagaagcacgacgaggaguucugcgacaugcuccggcuguucgacuucaacaagcaggcgauccgccggcugaagaccccggcccagauguccauccagcucaucaacaaggccgugaacgcccugaucaacgaccagcugaucaugaagaaccaccuccgcgacaucaugggcauccccuacugcaacuacagcaaguacugcuaccugaaccacaccgucacggggaagaccucccugccccggugcugccucgugagcaacggcuccuaccugaacgagacccacuucagcgacgacaucgagcagcaggccgacaacaugaucaccgagcugcuccagaaggaguacaucgaccgccagggcaagacgccgcuggggcugguggaccuguucgucuucuccaccagcuucuaccucaucuccaucuuccugcaccuggugaagauccccacccaccggcacaucaccggcaagcccugccccaagccgcaccgccucaaccacauggggaucugcagcugcggccuguacaaccaccccggggugcccgucaaguggaagcgguga

SEQ ID NO: 24721 - RNA, 1473 nt, Artificial Sequence
  derived and/or modified CDS sequence (opt1) from LASV(Lassa virus/H.sapiens-wt/NGA/2016/ISTH_0017;Clade II)__AVO03567__GPCmut3
augggccagaucaucaccuucuuccaggaggugccccacgucaucgaggaggugaugaacaucgugcugaucgcccucagccugcuggccauccucaaggggaucuacaacgucgcgaccugcggccuguucgggcugguguccuuccuccugcugugcggccgcagcugcuccacgaccuacaaggggguguacgagcuccagacccuggagcuggacauggccagccucaacaugaccaugccgcuguccugcacgaagaacaacagccaccacuacaucauggucggcaacgagaccggccuggagcucacccugaccaacacguccaucaucaaccacaaguucugcaaccugagcgacgcccacaagaagaaccucuacgaccacgcccugauguccaucaucagcaccuuccaccuguccauccccaacuucaaccaguacgaggccaugagcugcgacuucaacgggggcaagaucuccgugcaguacaaccucagccacaccuacgcgaucgacgccgccaaccacugcgggaccaucgccaacggcgugcugcagacguucaugcggauggcguggggcggguccuacaucgcccuggacagcggcaagggguccugggacugcaucaugaccagcuaccaguaccucaucauccagaacaccaccugggaggaccacugccaguucucccgccccagccccaucggcuaccuggggcugcucagccagcggacgcgcgacaucuacaucucccggcgccggcgcggcaccuucaccuggacccugagcgacuccgagggcaacgagacgcccgggggcuacugccugacccgguggaugcucaucgaggccgagcugaagugcuucgggaacaccgccgucgccaagugcaacgagaagcacgacgaggaguucugcgacaugcugcgccucuucgacuucaacaagcaggcgauccggcgccugaagaccccggcccagaugagcauccagcugaucaacaaggccgugaacgcccucaucaacgaccagcugaucaugaagaaccaccuccgggacaucaugggcauccccuacugcaacuacuccaaguacugcuaccugaaccacacggugaccgggaagaccagccugccccgcugcugccuggucuccaacggcagcuaccucaacgagacccacuucuccgacgacaucgagcagcaggccgacaacaugaucacggagcugcugcagaaggaguacauggaccggcagggcaagaccccgcucgggcugguggaccuguucguguucagcaccuccuucuaccugaucagcaucuuccuccaccugguccgcauccccacccaccggcacgugaucggcaagcccugccccaagccgcaccgccugaaccacauggggaucugcuccugcggccucuacaagcaccccggggugcccgucaaguggaagcgguga

SEQ ID NO: 24722 - RNA, 1473 nt, Artificial Sequence
  derived and/or modified CDS sequence (opt1) from LASV(Lassa virus/H.sapiens-wt/NGA/2018/ISTH_0959;Clade II)__AVV65099__GPCmut3
augggccagaucaucaccuucuuccaggaggugccccacgucaucgaggaggugaugaacaucgugcugaucgcccucagccugcuggccauccucaaggggaucuacaacgucgugaccugcggccuguucgggcugguguccuuccuccugcugugcggccgcagcugcuccacgaccuacaagggggucuacgagcuccagacccuggagcuggacauggcgagccucaacaugaccaugccgcuguccugcacgaagaacaacagccaccacuacaucauggugggcaacgagaccggccuggagcucacccugaccaacacguccaucaucaaccacaaguucugcaaccugagcgacgcccacaagaagaaccucuacgaccacgcccugauguccaucaucagcaccuuccaccuguccauccccaacuucaaccaguacgaggccaugagcugcgacuucaacgggggcaagaucuccgugcaguacaaccucagccacgccuacgcgaucgacgccgccaaccacugcgggaccaucgccaacggcguccugcagaccuucaugcggauggcguggggcggguccuacaucgcccuggacagcggcaagggguccugggacugcaucaugacgagcuaccaguaccucaucauccagaacaccaccugggaggaccacugccaguucucccgccccagccccaucggcuaccuggggcugcucagccagcggacccgcgacaucuacaucucccggcgccggcgcggcacguucaccuggacccugagcgacuccgagggcaacgagacccccgggggcuacugccugacgcgguggaugcucaucgaggccgagcugaagugcuucgggaacaccgccguggccaagugcaacgagaagcacgacgaggaguucugcgacaugcugcgccucuucgacuucaacaagcaggcgauccggcgccugaagaccccggcccagaugagcauccagcugaucaacaaggccgugaacgcccucaucaacgaccagcugaucaugaagaaccaccuccgggacaucaugggcauccccuacugcaacuacuccaaguacugcuaccugaaccacaccgucacggggaagaccagccugccccgcugcugccugguguccaacggcagcuaccucaacgagacccacuucuccgacgacaucgagcagcaggccgacaacaugaucaccgagcugcugcagaaggaguacaucgaccggcagggcaagacgccgcucgggcugguggaccuguucgucuucagcaccuccuucuaccugaucagcaucuuccuccaccuggugaagauccccacccaccgccacgugaucggcaagcccugccccaagccgcaccggcugaaccacauggggaucugcuccugcggccucuacaagcaccccgggguccccgugaaguggaagcgcuga

SEQ ID NO: 24723 - RNA, 1473 nt, Artificial Sequence
  derived and/or modified CDS sequence (opt1) from LASV(LASV003-NIG-2008;Clade II)__AIT17580__GPCmut3
augggccagaucaucaccuucuuccaggaggugccccacgucaucgaggaggugaugaacaucgugcugaucgcccucagccugcuggccauccucaaggggaucuacaacgucgcgaccugcggccuguucgggcugguguccuuccuccugcugugcggccgcagcugcuccacgaccuacaaggggguguacgagcuccagacccuggagcuggacauggccagccucaacaugaccaugccgcuguccugcacgaagaacaacagccaccacuacaucauggucggcaacgagaccggccuggagcucacccugaccaacacguccaucaucaaccacaaguucugcaaccugagcgacgcccacaagaagaaccucuacgaccacgcccugauguccaucaucagcaccuuccaccuguccauccccaacuucaaccaguacgaggccaugagcugcgacuucaacgggggcaagaucuccgugcaguacaaccucagccacaccuacgcgguggacgccgccaaccacugcgggaccaucgccaacggcguccugcagacguucaugcggauggcguggggcggguccuacaucgcccuggacagcggcaagggguccugggacugcaucaugaccagcuaccaguaccucaucauccagaacaccaccugggaggaccacugccaguucucccgccccagccccaucggcuaccuggggcugcucagccagcggacgcgcgacaucuacaucucccggcgccggcgcggcaccuucaccuggacccugagcgacuccgagagcaacgagacgccgggcggguacugccugacccgguggaugcucaucgaggccgagcugaagugcuucggcaacaccgccguggccaagugcaacgagaagcacgacgaggaguucugcgacaugcugcgccucuucgacuucaacaagcaggcgauccggcgccugaaggcccccgcccagauguccauccagcugaucaacaaggccgugaacgcccucaucaacgaccagcugaucaugaagaaccaccuccgggacaucauggggauccccuacugcaacuacagcaaguacugcuaccugaaccacaccgucacgggccgcaccucccugccccggugcugccuggugagcaacggguccuaccucaacgagacccacuucagcgacgacaucgagcagcaggcggacaacaugaucaccgagcugcugcagaaggaguacauggaccgccagggcaagacgccgcucggccugguggaccuguucgucuucuccaccagcuucuaccugaucuccaucuuccuccaccuggugaagauccccacccaccggcacgugaucgggaagcccugccccaagccgcaccgccugaaccacaugggcaucugcagcugcgggcucuacaagcaccccggcguccccgugaaguggaagcgguga

SEQ ID NO: 24724 - RNA, 1473 nt, Artificial Sequence
  derived and/or modified CDS sequence (opt1) from LASV(LASV035-NIG-2009;Clade II)__AIT17588__GPCmut3
augggccagaucaucaccuucuuccaggaggugccccacgucaucgaggaggugaugaacaucgugcugaucgcccucagccugcuggccauccucaaggggaucuacaacgucgcgaccugcggccuguucgggcugguguccuuccuccugcugugcggccgcagcugcuccacgaccuacaaggggguguacgagcuccagacccuggagcuggacauggccagccucaacaugaccaugccgcuguccugcacgaagaacaacagccaccacuacaucauggucggcaacgagaccggccuggagcucacccugaccaacacguccaucaucaaccacaaguucugcaaccugagcgacgcccacaagaagaaccucuacgaccacgcccugauguccaucaucagcaccuuccaccuguccauccccaacuucaaccaguacgaggccaugagcugcgacuucaacgggggcaagaucuccgugcaguacaaccucagccacgcguacgccguggacgccgccaaccacugcgggaccaucgcgaacggcguccugcagaccuucaugcggauggccuggggcggguccuacaucgcccuggacagcggcaagggguccugggacugcaucaugacgagcuaccaguaccucaucauccagaacaccaccugggaggaccacugccaguucucccgccccagccccaucggcuaccuggggcugcucagccagcggacccgcgacaucuacaucucccggcgccggcgcggcacguucaccuggacccugagcgacuccgagggcaacgagacccccgggggcuacugccugacgcgguggaugcucaucgaggccgagcugaagugcuucgggaacaccgccguggcgaagugcaacgagaagcacgacgaggaguucugcgacaugcugcgccucuucgacuucaacaagcaggccauccggcgccugaaggccccggcccagaugagcauccagcugaucaacaaggccgugaacgcgcucaucaacgaccagcugaucaugaagaaccaccuccgggacaucaugggcauccccuacugcaacuacuccaaguacugcuaccugaaccacaccgucaccgggaagacgagccugccccgcugcugccugguguccaacggcagcuaccucaacgagacccacuucuccgacgacaucgagcagcaggccgacaacaugaucaccgagcugcugcagaaggaguacaucgaccggcagggcaagaccccgcucgggcugguggaccuguucgucuucagcacguccuucuaccugaucagcaucuuccuccaccuggugaagauccccacccaccgccacgugaucggcaagcccugccccaagccgcaccggcugaaccacauggggaucugcuccugcggccucuacaagcaccccgggguccccgugaaguggaagcgcuga

SEQ ID NO: 24725 - RNA, 1473 nt, Artificial Sequence
  derived and/or modified CDS sequence (opt1) from LASV(LASV1000-NIG-2009;Clade II)__AIT17782__GPCmut3
augggccagaucaucaccuucuuccaggaggugccccacgucaucgaggaggugaugaacaucgugcugaucgcccucagccugcuggccauccucaaggggaucuacaacgucgcgaccugcggccuguucgggcugguguccuuccuccugcugugcggccgcagcugcuccacgaccuacaaggggguguacgagcuccagacccuggagcuggacauggccagccucaacaugaccaugccgcuguccugcacgaagaacaacagccaccacuacaucauggucggcaacgagaccggccuggagcucacccugaccaacacguccaucaucaaccacaaguucugcaaccugagcgacgcccacaagaagaaccucuacgaccacgcccugauguccaucaucagcaccuuccaccuguccauccccaacuucaaccaguacgaggccaugagcugcgacuucaacgggggcaagaucuccgugcaguacaaccucagccacaccuacgcgguggacgccgccaaccacugcgggaccaucgccaacggcguccugcagacguucaugcggauggcguggggcggguccuacaucgcccuggacagcggcaagggguccugggacugcaucaugaccagcuaccaguaccucaucauccagaacaccaccugggaggaccacugccaguucucccgccccagccccaucggcuaccuggggcugcucagccagcggacgcgcgacaucuacaucucccggcgccggcgcggcaccuucaccuggacccugagcgacuccgagggcaacgagacgcccgggggcuacugccugacccgguggaugcucaucgaggccgagcugaagugcuucgggaacaccgccguggccaagugcaacgagaagcacgacgaggaguucugcgacaugcugcgccucuucgacuucaacaagcaggcgaucaagcggcugaagaccccggcccagaugagcauccagcugaucaacaaggccgugaacgcccucaucaacgaccagcugaucaugaagaaccaccuccgcgacaucaugggcauccccuacugcaacuacuccaaguacugcuaccugaaccacacggucaccgggaagaccagccugccccggugcugccugguguccaacggcagcuaccucaacgagacccacuucuccgacgacaucgagcagcaggccgacaacaugaucacggagcugcugcagaaggaguacaucgaccgccagggcaagaccccgcucgggcugguggaccuguucgucuucagcaccuccuucuaccugaucagcaucuuccuccaccuggugaagauccccacccaccggcacguggucggcaagcccugccccaagccgcaccgccugaaccacauggggaucugcuccugcggccucuacaagcaccccggggugcccgugaaguggaagcgguga

SEQ ID NO: 24726 - RNA, 1473 nt, Artificial Sequence
  derived and/or modified CDS sequence (opt1) from LASV(LASV221-NIG-2010;Clade II)__AIT17624__GPCmut3
augggccagaucaucaccuucuuccaggaggugccccacgucaucgaggaggugaugaacaucgugcugaucgcccucagccugcuggccauccucaaggggaucuacaacgucgcgaccugcggccuguucgggcugguguccuuccuccugcugugcggccgcagcugcuccacgaccuacaaggggguguacgagcuccagacccuggagcuggacauggccagccucaacaugaccaugccgcuguccugcacgaagaacaacagccaccacuacaucauggucggcaacgagaccggccuggagcucacccugaccaacacguccaucaucaaccacaaguucugcaaccugagcgacgcccacaagaagaaccucuacgaccacgcccugauguccaucaucagcaccuuccaccuguccauccccaacuucaaccaguacgaggccaugagcugcgacuucaacgggggcaagaucuccgugcaguacaaccucagccacaccuacgcgaucgacgccgccaaccacugcgggaccaucgccaacggcgugcugcagacguucaugcggauggcguggggcggguccuacaucgcccuggacagcggcaagggguccugggacugcaucaugaccagcuaccaguaccucaucauccagaacaccaccugggaggaccacugccaguucucccgccccagccccaucggcuaccuggggcugcucagccagcggacgcgcgacaucuacaucucccggcgccggcgcggcaccuucaccuggacccugagcgacuccgagggcaacgagacgcccgggggcuacugccugacccgguggaugcucaucgaggccgagcugaagugcuucgggaacaccgccgucgccaagugcaacgagaagcacgacgaggaguucugcgacaugcugcgccucuucgacuucaacaagcaggcgauccggcgccugaagaccccggcccagaugagcauccagcugaucaacaaggccgugaacgcccucaucaacgaccagcugaucaugaagaaccaccuccgggacaucaugggcauccccuacugcaacuacuccaaguacugcuaccugaaccacacggugaccgggaagaccagccugccccgcugcugccuggucuccaacggcagcuaccucaacgagacccacuucuccgacgacaucgagcagcaggccgacaacaugaucacggagaugcugcagaaggaguacauggaccggcagggcaagaccccgcuggggcucguggaccuguucguguucagcaccuccuucuaccugaucagcaucuuccugcaccucgucaagauccccacccaccgccacgugaucggcaagcccugccccaagccgcaccggcugaaccacauggggaucugcuccugcggccuguacaagcaccccggggugcccgucaaguggaagcgcuga

SEQ ID NO: 24727 - RNA, 1473 nt, Artificial Sequence
  derived and/or modified CDS sequence (opt1) from LASV(LASV237-NIG-2010;Clade II)__AIT17638__GPCmut3
augggccagaucaucaccuucuuccaggaggugccccacgucaucgaggaggugaugaacaucgugcugaucgcccucagccugcuggccauccucaaggggaucuacaacgucgcgaccugcggccuguucgggcugguguccuuccuccugcugugcggccgcagcugcuccacgaccuacaaggggguguacgagcuccagacccuggagcuggacauggccagccucaacaugaccaugccgcuguccugcacgaagaacaacagccaccacuacaucauggucggcaacgagaccggccuggagcucacccugaccaacacguccaucaucaaccacaaguucugcaaccugagcgacgcccacaagaaggaccucuacgaccacgcccugauguccaucaucagcaccuuccaccuguccauccccaacuucaaccaguacgaggccaugagcugcgacuucaacgggggcaagaucuccgugcaguacaaccucagccacaccuacgcgguggacgccgccaaccacugcgggaccaucgccaacggcguccugcagacguucaugcggauggcguggggcggguccuacaucgcccuggacagcggcaagggguccugggacugcaucaugaccagcuaccaguaccucaucauccagaacaccaccugggaggaccacugccaguucucccgccccagccccaucggcuaccuggggcugcucagccagcggacgcgcgacaucuacaucucccggcgccggcgcggcaccuucaccuggacccugagcgacuccgagggcaacgagacgcccgggggcuacugccugacccgguggaugcucaucgaggccgagcugaagugcuucgggaacaccgccguggccaagugcaacgagaagcacgacgaggaguucugcgacaugcugcgccucuucgacuucaacaagcaggcgauccggcgccugaagaccccggcccagaugagcauccagcugaucaacaaggccgugaacgcccucaucaacgaccagcugaucaugaagaaccaccuccgggacaucaugggcauccccuacugcaacuacuccaaguacugcuaccugaaccacacggucaccgggaagaccagccugccccgcugcugccugguguccaacggcagcuaccucaacgagacccacuucuccgacgacaucgagcagcaggccgacaacaugaucacggagcugcugcagaaggaguacauggaccggcagggcaagaccccgcucgggcugguggaccuguucgucuucagcaccuccuucuaccugaucagcaucuuccuccaccugaucaagauccccacccaccgccacaucacgggcaagcccugccccaagccgcaccggcugaaccacauggggaucugcuccugcggccucuacaagcaccccggggugcccgugaaguggaagcgcuga

SEQ ID NO: 24728 - RNA, 1473 nt, Artificial Sequence
  derived and/or modified CDS sequence (opt1) from LASV(LASV253-NIG-2011;Clade II)__AIT17670__GPCmut3
augggccagaucaucaccuucuuccaggaggugccccacgucaucgaggaggugaugaacaucgugcugaucgcccucagccugcuggccauccucaaggggaucuacaacgucgcgaccugcggccuguucgggcugguguccuuccuccugcugugcggccgcagcugcuccacgaccuacaaggggguguacgagcuccagacccuggagcuggacauggccagccucaacaugaccaugccgcuguccugcacgaagaacaacagccaccacuacaucauggucggcaacgagaccggccuggagcucacccugaccaacacguccaucaucaaccacaaguucugcaaccugagcgacgcccacaagaagaaccucuacgaccacgcccugauguccaucaucagcaccuuccaccuguccauccccaacuucaaccaguacgaggccaugagcugcgacuucaacgggggcaagaucuccgugcaguacaaccucagccacaccuacgcgguggacgccgccaaccacugcgggaccaucgccaacggcguccugcagacguucaugcggauggcguggggcggguccuacaucgcccuggacagcggcaagggguccugggacugcaucaugaccagcuaccaguaccucaucauccagaacaccaccugggaggaccacugccaguucucccgccccagccccaucggcuaccuggggcugcucagccagcggacgcgcgacaucuacaucucccggcgccggcgcggcaccuucaccuggacccugagcgacuccgagggcaacgagacgcccgggggcuacugccugacccgguggaugcucaucgaggccgagcugaagugcuucgggaacaccgccguggccaagugcaacgagaagcacgacgaggaguucugcgacaugcugcgccucuucgacuucaacaagcaggcgauccggcgccugaaggccccggcccagaugagcauccagcugaucaacaaggccgugaacgcccucaucaacgaccagcugaucaugaagaaccaccuccgggacaucaugggcauccccuacugcaacuacuccaaguacugcuaccugaaccacaccgucacggggcgcaccagccugccccggugcugccugguguccaacggcagcuaccucaacgagacccacuucuccgacgacaucgagcagcaggcggacaacaugaucaccgagcugcugcagaaggaguacaucgaccgccagggcaagacgccgcucgggcugguggaccuguucgucuucagcaccuccuucuaccugaucagcaucuuccuccaccuggugaagauccccacccaccggcacaucaucggcaagcccugccccaagccgcaccgccugaaccacauggggaucugcuccugcggccucuacaagcaccccggggugcccgucaaguggaagcgguga

SEQ ID NO: 24729 - RNA, 1473 nt, Artificial Sequence
  derived and/or modified CDS sequence (opt1) from LASV(LASV254-NIG-2011;Clade II)__AIT17674__GPCmut3
augggccagaucaucaccuucuuccaggaggugccccacgucaucgaggaggugaugaacaucgugcugaucgcccucagccugcuggccauccucaaggggaucuacaacgucgcgaccugcggccuguucgggcugguguccuuccuccugcugugcggccgcagcugcuccacgaccuacaaggggguguacgagcuccagacccuggagcuggacaugaccaaccucaacaugacgaugccgcugagcugcaccaagaacaacucccaccacuacaucauggucggcaacgagaccggccuggagcucacccugacgaacaccagcaucaucaaccacaaguucugcaaccuguccgacgcccacaagaagaaccucuacaaccacgcccugaugagcaucaucuccaccuuccaccugagcauccccaacuucaaccaguacgaggccauguccugcgacuucaacgggggcaagaucagcgugcaguacaaccucucccacagcuacgccguggacgcggccaaccacugcgggaccaucgccaacggcguccugcagacguucaugcggauggccuggggcggguccuacaucgcgcuggacagcggcaaggggaacugggacugcaucaugaccuccuaccaguaccucaucauccagaacaccaccugggaggaccacugccaguucagccgccccucccccaucggcuaccuggggcugcucagccagcggacgcgcgacaucuacaucagccggcgccggcgcggcaccuucaccuggacccuguccgacagcgagggcaacgagacgcccgggggcuacugccugacccgguggaugcucaucgaggccgagcugaagugcuucgggaacaccgccguggccaagugcaacgagaagcacgacgaggaguucugcgacaugcugcgccucuucgacuucaacaagcaggccauccggcgccugaagaccccggcgcaggccaacauccagcugaucaacaaggccgugaacgcccucaucaacgaccagcugaucaugaagaaccaccuccgggacaucaugggcauccccuacugcaacuacuccaaguacugcuaccugaaccacacggucaccgggaagaccagccugccccgcugcugccugguguccaacggcagcuaccucaacgagacccacuucuccgacgacaucgagcagcaggccgacaacaugaucacggagcugcugcagaaggaguacauggaccggcagggcaagaccccgcucgggcugguggaccuguucgucuucagcaccuccuucuaccugaucagcaucuuccuccaccuggugaagauccccacccaccgccacgugaucggcaagcccugccccaagccgcaccggcugaaccacauggggaucugcuccugcggccucuacaagcaccccgggguccccgugaaguggaagcgcuga

SEQ ID NO: 24730 - RNA, 1473 nt, Artificial Sequence
  derived and/or modified CDS sequence (opt1) from LASV(Nig08-A19;Clade III)__ADU56618__GPCmut3
augggccagaucgugaccuucuuccaggaggucccccacgugaucgaggaggugaugaacaucguccugaucgcccucagcauccuggccauccugaaggggcucuacaacaucgcgaccugcggccugaucgggcuggugacguuccuccugcuguccggccgcagcugcuccaugaccuacaaggggguguacgagcuccagacccuggagcugaacaugaacacccucaacaugacgaugccgcugagcugcaccaagaacaacucccaccacuacaucauggucggcaacgagaccggccuggagcucacccugacgaacaccagccugcuccaccacaaguucugcaaccuguccgacgcccacaagaagaaccuguacgaccacacccucaugagcaucaucuccaccuuccaccugagcauccccaacuucaaccaguacgaggccauguccugcgacuucaacgggggcaagaucacggugcaguacaaccugagccacuccuacgccaucgacgccgcgaaccacugcgggaccguggccaacggcguccuccagaccuucaugcggauggccuggggcgggagcuacaucgcccuggacuccggccgcgggaagugggacugcaucaugaccagcuaccaguaccugaucauccagaacacgaccugggaggaccacugccaguucucccggcccagccccaucggcuaccucgggcugcugucccagcgcacccgggacaucuacaucagccgccggcgccggggcaccuucacguggacccucagcgacuccgagggcaacgagacccccgggggcuacugccugacccgcuggaugcugaucgaggcggagcucaagugcuucgggaacacggccguggccaagugcaacgagaagcacgacgaggaguucugcgacaugcugcggcuguucgacuucaacaagcaggccauccgccggcucaaggccccggcgcagaugagcauccagcugaucaacaaggccgugaacgcccugaucaacgaccagcucaucaugaagaaccaccuccgcgacaucaugggcauccccuacugcaacuacuccaaguacugcuaccugaaccacaccagcaccgggcggaccucccugccccgcugcugccuggucagcaacggcuccuaccugaacgagacgcacuucagcgacgacaucgagcagcaggccgacaacaugaucaccgagaugcuccagaaggaguaccuggaccggcagggcaagaccccgcuggggcugguggaccucuucguguucuccaccagcuucuaccugaucuccaucuuccugcaccucgucaagauccccacgcaccgccacaucgugggcaagcccugccccaagccgcaccggcugaaccacauggggaucugcagcugcggccuguacaagcagcccggggugcccguccgcuggaagcgguga

SEQ ID NO: 24731 - RNA, 1476 nt, Artificial Sequence
  derived and/or modified CDS sequence (opt1) from LASV(G1180-SLE-2010;Clade IV)__AIT17168__GPCmut3
augggccagaucgugaccuucuuccaggaggucccccacgugaucgaggaggugaugaacaucguccugaucgcccucagcauccuggccgugcugaaggggcucuacaacuucgcgaccugcggccugguggggcugcucacguuccugcugcucugcggccgcuccugcaccgccagccgguacaagggggucuacgagcugcagacccuggagcucaacauggagacccugaacaugacgaugccgcuguccugcaccaagaacaacagccaccacuacaucauggugggcaacgagaccggccucgagcugacccugacgaacaccuccaucaucaaccacaaguucugcaaccucagcgacgcccacaagaagaaccuguacgaccacgcccugauguccaucaucagcaccuuccaccucuccauccccaacuucaaccaguacgaggccaugagcugcgacuucaacgggggcaagaucuccgugcaguacaaccugagccacuccuacgcgggggacgccgccaaccacugcggcaccgucgccaacggggugcugcagacguucaugcgcauggcguggggcggcagcuacaucgcccucgacuccgggcacggcagcugggacugcaucaugaccuccuaccaguaccugaucauccagaacaccaccugggaggaccacugccaguucagccggcccucccccaucggguaccugggccuccugagccagcgcacgcgggacaucuacaucagccgccggcgccggggcaccuucaccuggacccuguccgacagcgaggggaaggacacgccgggcggguacugccucacccgcuggaugcugaucgaggccgagcugaagugcuucggcaacaccgccguggccaagugcaacgagaagcacgacgaggaguucugcgacaugcuccggcuguucgacuucaacaagcaggcgauccagcgccugaaggcccccgcccagauguccauccagcucaucaacaaggccgucaacgcccugaucaacgaccagcugaucaugaagaaccaccuccgggacaucauggggauccccuacugcaacuacagcaaguacugcuaccugaaccacaccacgaccggcaagaccucccugcccaagugcugccucgugagcaacggcuccuaccugaacgagacccacuucagcgacgacaucgagcagcaggcggacaacaugaucacggagaugcugcagaaggaguacauggagcgccaggggaagaccccgcucggccugguggaccuguucgucuucuccaccagcuucuaccugaucuccaucuuccuccaccuggugaagauccccacccaccggcacaucgugggcaagagcugccccaagccccaccgccugaaccacauggggaucugcuccugcgggcucuacaagcagccgggcguccccgugaaguggaagcgguga

SEQ ID NO: 24732 - RNA, 1476 nt, Artificial Sequence
  derived and/or modified CDS sequence (opt1) from LASV(G1442-SLE-2011;Clade IV)__AIT17180__GPCmut3
augggccagaucgugaccuucuuccaggaggucccccacgugaucgaggaggugaugaacaucguccugaucgcccucagcauccuggccgugcugaaggggcucuacaacguggcgaccugcggccugaucgggcuggucacguuccuccugcugugcggccgcuccugcaccaccacccucuacaaggggguguacgagcugcagacgcuggagcucaacauggagacccugaacaugaccaugccgcugagcugcaccaagaacaacucccaccacuacauccgggugggcaacgagacgggccucgagcugacccugaccaacaccagcaucaucaaccacaaguucugcaaccucuccgacgcccacaagaagaaccuguacgaccacgcccugaugagcaucaucuccacguuccaccucagcauccccaacuucaaccaguacgaggccauguccugcgacuucaacgggggcaagaucagcguccaguacaaccugucccacagcuacgccggggacgcggccaaccacugcggcaccguggccaacggggugcugcagaccuucaugcgcauggccuggggcggcuccuacaucgcgcucgacagcgggcggggcaacugggacugcaucaugaccuccuaccaguaccugaucauccagaacacgaccugggacgaccacugccaguucagccgccccucccccaucggguaccugggccuccugagccagcggacccgcgacgucuacaucucccggcgccggcgcggcaccuucacguggacccugagcgacagcgaggggaaggacaccccgggcggguacugccucacccgguggaugcugaucgaggccgagcugaagugcuucggcaacacggccguggccaagugcaacgagaagcacgacgaggaguucugcgacaugcuccgccuguucgacuucaacaagcaggccauccagcggcugaaggcgcccgcccagauguccauccagcucaucaacaaggccgugaacgcccugaucaacgaccagcugaucaugaagaaccaccuccgcgacaucauggggauccccuacugcaacuacagcaaguacugcuaccugaacaacaccgccaccggcaagaccucccugcccaagugcugccucaucagcaacggcuccuaccugaacgagacgcacuucagcgacgacaucgagcaggaggcggacaacaugaucaccgagaugcugcagaaggaguacauggagcggcaggggaagaccccgcucggccuggucgaccuguucguguucuccaccagcuucuaccugaucuccaucuuccuccaccuggugaagauccccacgcaccgccacaucgucggcaagagcugccccaagccccaccggcugaaccacauggggaucugcuccugcgggcucuacaagcagccgggcgugcccgugcgcuggaagcgguga

SEQ ID NO: 24733 - RNA, 1476 nt, Artificial Sequence
  derived and/or modified CDS sequence (opt1) from LASV(G3010-SLE-2013;Clade IV)__AIT17344__GPCmut3
augggccagaucgugaccuucuuccaggaggucccccacgugaucgaggaggugaugaacaucguccugaucgcccucagcauccuggccgugcugaaggggcucuacaacuucgcgaccugcggccugguggggcuggucacguuccuccugcugugcggccgcuccugcaccaccagccucuacaaggggguguacgagcugcagacccuggagcucaacauggagacgcugaacaugaccaugccgcuguccugcaccaagaacaacagccaccacuacaucauggugggcaacgagaccggccucgagcugacgcugaccaacaccuccaucaucaaccacaaguucugcaaccucagcgacgcccacaagaagaaccuguacaaccacgcccugauguccaucaucagcaccuuccaccucuccauccccaacuucaaccaguacgaggccaugagcugcgacuucaacgggggcaagaucuccguccaguacaaccugagccacuccuacgccggggacgcggccagccacugcggcacgguggccaacggggugcugcagaccuucaugcggauggccuggggcggcuccuacaucgcgcucgacagcggguacggcaagugggacugcaucaugaccuccuaccaguaccugaucauccagaacaccacgugggaggaccacugccaguucagccgccccucccccaucggguaccugggccuccugagccagcggacccgcgacaucuacaucagccggcgccggcgcggcaccuucaccuggacgcuguccgacagcgaggggaaggacaccccgggcggguacugccucacccgguggaugcugaucgaggccgagcugaagugcuucggcaacaccgccgucgccaagugcaacgagaagcacgacgaggaguucugcgacaugcuccgccuguucgacuucaacaagcaggccauccagcggcugaagacgcccgcgcagauguccauccagcucaucaacaaggccgugaacgcccugaucaacgaccagcugaucaugaagaaccaccuccgcgacaucauggggauccccuacugcaacuacagcaaguacugcuaccugaaccacaccaccaccggcaagacgucccugcccaagugcugccucgugagcaacggcuccuaccugaacgagacccacuucagcgacgacaucgagcagcaggccgacaacaugaucaccgagaugcugcagaaggaguacauggagcggcaggggaagaccccgcucggccuggucgaccuguucguguucuccacgagcuucuaccugaucuccaucuuccuccaccuggugaagauccccacccaccgccacaucgucggcaagagcugccccaagccccaccggcugaaccacauggggaucugcuccugcgggcucuacaagcagccgggcgugcccgugcgcuggaagcgguga

SEQ ID NO: 24734 - RNA, 1476 nt, Artificial Sequence
  derived and/or modified CDS sequence (opt1) from LASV(G502-SLE-2009;Clade IV)__AIT17126__GPCmut3
augggccagaucgugaccuucuuccaggaggucccccacgugaucgaggaggugaugaacaucguccugaucgcccucagcauccuggccgugcugaaggggcucuacaacuucgcgaccugcggccugguggggcugcucacguuccugcugcucugcggccgcuccugcaccaccgggcuguacaagggcgucuacgagcugcagacccucgagcugaacauggagacgcugaacaugaccaugccgcucagcugcaccaagaacaacucccaccacuacaucauggugggcaacgagaccgggcuggagcugacgcucaccaacaccagcaucaucaaccacaaguucugcaaccuguccgacgcccacaagaagaaccuguacgaccacgcccucaugagcaucaucuccaccuuccaccugagcauccccaacuucaaccaguacgaggccauguccugcgacuucaacggcgggaagaucagcgugcaguacaaccugucccacagcuacgccggcgacgcggccgaccacugcgggacggucgccaacggcgugcuccagaccuucaugcggauggccuggggcggguccuacaucgcgcuggacagcggccgcgggcggugggacugcaucaugaccuccuaccaguaccugaucauccagaacaccacgugggaggaccacugccaguucagccgccccucccccaucggcuaccucggccugcugagccagcggacccgcgacaucuacaucucccggcgccggcgcgggaccuucaccuggacgcucagcgacagcgagggcaaggacacccccgggggcuacugccugacccgguggaugcugaucgaggccgagcucaagugcuucgggaacaccgccguggccaagugcaacgagaagcacgacgaggaguucugcgacaugcugcgccuguucgacuucaacaagcaggccauccagcggcucaaggcgccggcccagauguccauccagcugaucaacaaggccgucaacgcccugaucaacgaccagcucgugaugaagaaccaccuccgcgacaucaugggcauccccuacugcaacuacagccgguacugcuaccugaaccacacgaccaccggccgcaccucccugcccaagugcugccuggugagcaacggguccuaccugaacgagacgcacuucagcgacgacaucgagcagcaggccgacaacaugaucaccgagaugcuccagaaggaguacauggagcggcagggcaagaccccgcuggggcuggucgaccuguucguguucuccaccagcuucuaccucaucuccaucuuccugcaccuggugaagauccccacgcaccgccacaucgucggcaagagcugccccaagccccaccggcucaaccacauggggaucugcuccugcggccuguacaagcagccgggcgugcccgugaaguggaagcgcuga

SEQ ID NO: 24735 - RNA, 1476 nt, Artificial Sequence
  derived and/or modified CDS sequence (opt1) from LASV(G733-SLE-2010;Clade IV)__AIT17154__GPCmut3
augggccagaucgugaccuucuuccaggaggucccccacgugaucgaggaggugaugaacaucguccugaucgcccucagcauccuggccgugcugaaggggcucuacaacuucgcgaccugcggcaucguggggcuggucuccuuccugcuccugugcggccgcagcugcacgaccucccuguacaaggggguguacgagcuccagacccuggagcugaacauggagacccucaacaugacgaugccgcugagcugcaccaagaacaacucccaccacuacaucauggugggcaacgagaccggccuggagcucacccugacgaacaccagcaucaucaaccacaaguucugcaaccuguccgacgcccacaagaagaaccucuacgaccacgcccugaugagcaucaucuccaccuuccaccugagcauccccaacuucaaccaguacgaggccauguccugcgacuucaacgggggcaagaucagcguccaguacaaccucucccacagcuacgccggggacgcggccaaccacugcggcaccaucgccaacggggugcugcagacguucaugcggauggccuggggcggcuccuacaucgcgcuggacagcgggcgcgaccggugggacugcaucaugaccuccuaccaguaccucaucauccagaacaccaccugggaggaccacugccaguucagccgccccucccccaucggcuaccuggggcugcucagccagcggacgcgcgacaucuacaucagccggcgccggcgcggcaccuucaccuggacccuguccgacagcgagggcaaggacacgcccgggggcuacugccugacccgguggaugcucaucgaggccgagcugaagugcuucgggaacaccgccguggccaagugcaacgagaagcacgacgaggaguucugcgacaugcugcgccucuucgacuucaacaagcaggccauccagcggcugaaggcgccggcccagauguccauccagcugaucaacaaggccgucaacgcccucaucaacgaccagcugaucaugaagaaccaccuccgcgacaucaugggcauccccuacugcaacuacagcaaguacugcuaccugaaccacaccacgaccgggaagaccucccugcccaagugcugccuggugagcaacggcuccuaccucaacgagacccacuucagcgacgacaucgagcagcaggccgacaacaugaucacggagaugcugcagaaggaguacauggagcggcagggcaagaccccgcuggggcucguggaccuguucgucuucuccaccagcuucuaccugaucuccaucuuccugcaccucgugaagauccccacccaccgccacguggucggcaagagcugccccaagccccaccggcugaaccacauggggaucugcuccugcggccuguacgggcagccgggcgugcccgugaaguggaagcgcuga

SEQ ID NO: 24736 - RNA, 1476 nt, Artificial Sequence
  derived and/or modified CDS sequence (opt1) from MOPV/LASV reassortant(IGS-1;Clade IV)__AFY05576__GPCmut3
augggccagaucgugaccuucuuccaggaggucccccacgugaucgaggaggugaugaacaucguccugaucgcccucagcgugcuggccgugcugaaggggcucuacaacuucgcgaccugcggccuggucgggcuggugacguuccuccugcugugcggccgcuccugcaccaccagccucuacaaggggguguacgagcugcagacccuggagcucaacauggagacgcugaacaugaccaugccgcuguccugcaccaagaacaacagccaccacuacaucauggucggcaacgagaccggccucgagcugacgcugaccaacaccuccaucaucaaccacaaguucugcaaccucagcgacgcccacaagaagaaccuguacgaccacgcccugauguccaucaucagcaccuuccaccucuccauccccaacuucaaccaguacgaggccaugagcugcgacuucaacgggggcaagaucuccgugcaguacaaccugagccacuccuacgccggggacgcggccaaccacugcggcacgguggccaacgggguccugcagaccuucaugcggauggccuggggcggcagcuacaucgcgcucgacuccgggcgcggcaacugggacugcaucaugaccagcuaccaguaccugaucauccagaacaccacgugggaggaccacugccaguucucccggcccagccccaucggguaccugggccuccugucccagcgcacccgggacaucuacaucagccgccggcgccggggcaccuucaccuggacgcugagcgacuccgagggggaggacaccccgggcggguacugccucacccgcuggaugcugaucgaggccgagcugaagugcuucggcaacaccgccguggccaagugcaacgagaagcacgacgaggaguucugcgacaugcuccggcuguucgacuucaacaagcaggccauccagcgccugaaggcgcccgcccagaugagcauccagcucaucaacaaggccgugaacgcccugaucaacgaccagcugaucaugaagaaccaccuccgggacaucauggggauccccuacugcaacuacuccaaguacugcuaccugaaccacacgaccaccggccgcaccagccugcccaagugcugccucgucuccaacggcagcuaccugaacgagacgcacuucuccgacgacaucgagcagcaggccgacaacaugaucaccgagaugcugcagaaggaguacauggagcggcaggggaagaccccgcucggccugguggaccuguucguguucagcaccuccuucuaccugaucagcaucuuccuccaccuggucaagauccccacgcaccgccacaucguggggaaguccugccccaagccccaccggcugaaccacaugggcaucugcagcugcgggcucuacaagcagccgggcgugcccgucaaguggaagcgcuga

SEQ ID NO: 24737 - RNA, 1476 nt, Artificial Sequence
  derived and/or modified CDS sequence (opt1) from LASV(LM765-SLE-2012;Clade IV)__AIT17814__GPCmut3
augggccagaucgugaccuucuuccaggaggucccccacgugaucgaggaggugaugaacaucguccugaucgcccucagcauccuggccgugcugaaggggcucuacaacuucgcgaccugcggccugguggggcuggucacguuccuccugcugugcggccgcuccugcaccaccagccucuacaaggggguguacgagcugcagacccuggagcucaacauggagacgcugaacaugaccaugccgcuguccugcaccaagaacaacagccaccacuacaucauggugggcaacgagaccggccucgagcugacgcugaccaacaccuccaucaucgaccacaaguucugcaaccucagcgacgcccaccggaagaaccuguacgaccacgcccugauguccaucaucagcaccuuccaccucuccauccccaacuucaaccaguacgaggccaugagcugcgacuucaacgggggcaagaucuccguccaguacaaccugagccacuccuacgccaaggacgcggccgaccacugcgggacgguggccaacggcgugcugcagaccuucaugcgcauggccuggggcgggagcuacaucgcgcucgacuccggccgggggcgcugggacugcaucaugaccagcuaccaguaccugaucauccagaacaccacgugggaggaccacugccaguucucccggcccagccccaucggcuaccuggggcuccugucccagcgcacccgggacaucuacaucagccgccggcgccggggcaccuucaccuggacgcugagcgacuccgagggcaaggacacccccgggggcuacugccucacccgcuggaugcugaucgaggccgagcugaagugcuucgggaacaccgccgucgccaagugcaacgagaagcacgacgaggaguucugcgacaugcuccggcuguucgacuucaacaagcaggccauccagcgccugaaggcgccggcccagaugagcauccagcucaucaacaaggccgugaacgcccugaucaacgaccagcugaucaugaagaaccaccuccgggacaucaugggcauccccuacugcaacuacuccaaguacugcuaccugaaccacacgaccaccgggaagaccagccugcccaagugcugccucguguccaacggcagcuaccugaacgagacgcacuucuccgacgacaucgagcagcaggccgacaacaugaucaccgagaugcugcagaaggaguacauggagcgccagggcaagaccccgcucgggcuggucgaccuguucguguucagcaccuccuucuaccugaucagcaucuuccuccaccuggugaagauccccacgcaccggcacaucgucggcaagcccugccccaagccgcaccgccugaaccacauggggaucugcuccugcggccucuacaagcagcccggggugcccgugaaguggaagcgguga

SEQ ID NO: 24738 - RNA, 1476 nt, Artificial Sequence
  derived and/or modified CDS sequence (opt1) from LASV(LM776-SLE-2012;Clade IV)__AIT17824__GPCmut3
augggccagaucgugaccuucuuccaggaggucccccacgugaucgaggaggugaugaacaucguccugaucgcccucagcauccuggccgugcugaaggggcucuacaacuucgcgaccugcggccugguggggcuggucacguuccuccugcugugcggccgcuccugcaccaccagcguguacaaggggguguacgagcuccagacccuggagcugaacauggagacgcucaacaugaccaugccgcuguccugcaccaagaacaacagccaccacuacaucauggucggcaacgagaccggccuggagcucacgcugaccaacaccuccaucaucaaccacaaguucugcaaccugagcgacgcccacaagaagaaccucuacgaccacgcccugauguccaucaucagcaccuuccaccuguccauccccaacuucaaccaguacgaggccaugagcugcgacuucaacgggggcaagaucuccgugcaguacaaccucagccacuccuacgccggggacgcggccaaccacugcggcacgguggccaacgggguccugcagaccuucaugcggauggccuggggcggcagcuacaucgcgcuggacuccgggcacggcaagugggacugcaucaugaccagcuaccaguaccucaucauccagaacaccacgugggaggaccacugccaguucucccgccccagccccaucggguaccugggccugcucucccagcggacccgcgacaucuacaucagccggcgccggcgcggcaccuucaccuggacgcugagcgacuccgaggggaaggacaccccgggcggguacugccugacccgguggaugcucaucgaggccgagcugaagugcuucggcaacaccgccguggccaagugcaacgagaagcacgacgaggaguucugcgacaugcugcgccucuucgacuucaacaagcaggccauccagcggcugaaggcgcccgcccagaugagcauccagcugaucaacaaggccgugaacgcccucaucaacgaccagcugaucaugaagaaccaccuccgcgacaucauggggauccccuacugcaacuacuccaaguacugcuaccugaaccacacgaccaccggcaagaccagccugcccaagugcugccuggucuccaacggcagcuaccucaacgagacgcacuucuccgacgacaucgagcagcaggccgacaacaugaucaccgagaugcugcagaaggaguacauggagcggcaggggaagaccccgcugggccucguggaccuguucguguucagcaccuccuucuaccugaucagcaucuuccugcaccucgucaagauccccacgcaccgccacaucguggggaaguccugccccaagccccaccggcugaaccacaugggcaucugcagcugcgggcuguacaagcagccgggcgugcccguccgcuggaagcgguga

SEQ ID NO: 24739 - RNA, 1476 nt, Artificial Sequence
  derived and/or modified CDS sequence (opt1) from LASV(Mad39;Clade IV)__ANH09722__GPCmut3
augggccagaucgugaccuucuuccaggaggucccccacgugaucgaggaggugaugaacaucguccugaucgcccucagcauccuggccgugcugaaggggcucuacaacguggcgaccugcggccugaucgggcuggucacguuccuccugcugugcggccgcuccugcaccaccacccucuacaaggggguguacgagcugcaggcccuggagcucaacauggagacgcugaacaugaccaugccgcugagcugcaccaagaacaacucccaccacuacauccgggugggcaacgagaccggccucgagcugacgcugaccaacaccagccucaucaaccacaaguucugcaaccuguccgacgcccacaagaagaaccuguacgaccacgcccucaugagcaucaucuccaccuuccaccugagcauccccaacuucaaccaguacgaggccauguccugcgacuucaacgacgggaagaucagcguccaguacaaccugucccacacguacgcgggcgacaccgccaaccacugcgggaccguggccaacggcgugcuccagaccuucaugcgcauggccuggggcgggagcuacaucgcgcuggacuccggccgcgggggcugggacugcaucaugacgagcuaccaguaccugaucauccagaacaccaccugggaggaccacugccaguucucccggcccagccccaucggguaccucggccugcugucccagcggacccgcgacaucuacaucagccggcgccggcgcggcacguucaccuggacccucuccgacagcgaggggaaggacaccccgggcggguacugccugacgcgguggaugcugaucgaggccgagcucaagugcuucggcaacaccgccgucgccaagugcaacgagaagcacgacgaggaguucugcgacaugcugcgccuguucgacuucaacaagcaggccauccagcggcucaaggcgcccgcccagaugagcauccagcugaucaacaaggccgugaacgcccugaucaacgaccagcucaucaugaagaaccaccuccgcgacaucauggggauccccuacugcaacuacuccaaguacugcuaccugaaccacaccgugaccggcaagacgagccugcccaagugcugccuggucuccaacggcagcuaccugaacgagacccacuucuccgacgacaucgagcagcaggccgacaacaugaucaccgagaugcuccagaaggaguacauggagcggcaggggaagaccccgcugggccugguggaccuguucguguucagcacguccuucuaccucaucagcaucuuccugcaccuggucaagauccccacccaccgccacgugguggggaagcccugccccaagccgcaccggcucaaccacaugggcaucugcuccugcggguucuacaagcagcccggcguccccgugcgcuggaagcgguga

SEQ ID NO: 24740 - RNA, 1476 nt, Artificial Sequence
  derived and/or modified CDS sequence (opt1) from LASV(Z0947-SLE-2011;Clade IV)__AIT17840__GPCmut3
augggccagaucgugaccuucuuccaggaggucccccacgugaucgaggaggugaugaacaucguccugaucgcccucagcauccuggccgugcugaaggggcucuacaacuucgcgaccugcggccugguggggcuggucacguuccuccugcugugcggccgcuccugcaccaucagccucuacaaggggguguacgagcugcagacccuggagcucaacauggagacccugaacaugacgaugccgcuguccugcaccaagaacaacagccaccacuacaucauggugggcaacgagaccggccucgagcugacccugacgaacaccuccaucaucaaccacaaguucugcaaccucagcgacgcccacaagaagaaccuguacgaccacgcccugauguccaucaucagcaccuuccaccucuccauccccaacuucaaccaguacgaggccaugagcugcgacuucaacgggggcaagaucuccguccaguacaaccugagccacuccuacgccggggacgcggccaaccacugcggcaccguggccaacggggugcugcagacguucaugcggauggccuggggcggcagcuacaucgcgcucgacuccgggcgcgaccggugggacugcaucaugaccagcuaccaguaccugaucauccagaacaccaccugggaggaccacugccaguucucccgccccagccccaucggcuaccuggggcuccugucccagcggacgcgcgacaucuacaucagccggcgccggcgcggcaccuucaccuggacccugagcgacuccgagggcaaggacacgcccgggggcuacugccucacccgguggaugcugaucgaggccgagcugaagugcuucgggaacaccgccgucgccaagugcaacgagaagcacgacgaggaguucugcgacaugcuccgccuguucgacuucaacaagcaggccauccagcggcugaaggcgccggcccagaugagcauccagcucaucaacaaggccgugaacgcccugaucaacgaccagcugaucaugaagaaccaccuccgcgacaucaugggcauccccuacugcaacuacuccaaguacugcuaccugaaccacaccacgaccgggaagaccagccugcccaagugcugccucguguccaacggcagcuaccugaacgagacccacuucuccgacgacaucgagcagcaggccgacaacaugaucacggagaugcugcagaaggaguacauggagcggcagggcaagaccccgcucgggcuggucgaccuguucguguucagcaccuccuucuaccugaucagcaucuuccuccaccuggugaagauccccacccaccgccacaucgucggcaagcccugccccaagccgcaccggcugaaccacauggggaucugcuccugcggccucuacaagcagcccggggugcccgugaaguggaagcgcuga

SEQ ID NO: 24741 - RNA, 1476 nt, Artificial Sequence
  derived and/or modified CDS sequence (opt4) from LASV(Josiah;Clade IV)__NP_694870__GPCmut3
augggccagaucgugaccuucuuccaggaggugccccacgugaucgaggaggugaugaacaucgugcugaucgcccugagcgugcuggccgugcugaagggccuguacaacuucgccaccugcggccuggugggccuggugaccuuccugcugcugugcggcagaagcugcaccaccagccuguacaagggcguguacgagcugcagacccuggagcugaacauggagacccugaacaugaccaugccccugagcugcaccaagaacaacagccaccacuacaucauggugggcaacgagaccggccuggagcugacccugaccaacaccagcaucaucaaccacaaguucugcaaccugagcgacgcccacaagaagaaccuguacgaccacgcccugaugagcaucaucagcaccuuccaccugagcauccccaacuucaaccaguacgaggccaugagcugcgacuucaacggcggcaagaucagcgugcaguacaaccugagccacagcuacgccggcgacgccgccaaccacugcggcaccguggccaacggcgugcugcagaccuucaugagaauggccuggggcggcagcuacaucgcccuggacagcggcagaggcaacugggacugcaucaugaccagcuaccaguaccugaucauccagaacaccaccugggaggaccacugccaguucagcagacccagccccaucggcuaccugggccugcugagccagagaaccagagacaucuacaucagcagaagaagaagaggcaccuucaccuggacccugagcgacagcgagggcaaggacacccccggcggcuacugccugaccagauggaugcugaucgaggccgagcugaagugcuucggcaacaccgccguggccaagugcaacgagaagcacgacgaggaguucugcgacaugcugagacuguucgacuucaacaagcaggccauccagagacugaaggcccccgcccagaugagcauccagcugaucaacaaggccgugaacgcccugaucaacgaccagcugaucaugaagaaccaccugagagacaucaugggcauccccuacugcaacuacagcaaguacugcuaccugaaccacaccaccaccggcagaaccagccugcccaagugcugccuggugagcaacggcagcuaccugaacgagacccacuucagcgacgacaucgagcagcaggccgacaacaugaucaccgagaugcugcagaaggaguacauggagagacagggcaagaccccccugggccugguggaccuguucguguucagcaccagcuucuaccugaucagcaucuuccugcaccuggugaagauccccacccacagacacaucgugggcaagagcugccccaagccccacagacugaaccacaugggcaucugcagcugcggccuguacaagcagcccggcgugcccgugaaguggaagagauga

SEQ ID NO: 24742 - RNA, 1473 nt, Artificial Sequence
  derived and/or modified CDS sequence (opt4) from LASV(LP;Clade I)__AAF86701__GPCmut3
augggccagaucaucaccuucuuccaggaggugccccacgugaucgaggaggugaugaacaucgugcugaucgcccugagccugcuggccauccugaagggccuguacaacaucgccaccugcggcaucaucggccugguggccuuccuguuccugugcggcaagagcugcagccugacccugaagggcggcuacgagcugcagacccuggagcugaacauggagacccugaacaugaccaugccccugagcugcaccaagaacagcagccaccacuacaucagagugggcaacgagaccggccuggagcugacccugaccaacaccagcaucaucaaccacaaguucugcaaccugagcgacgcccacaagaagaaccuguacgaccacgcccugaugagcaucaucagcaccuuccaccugagcauccccaacuucaaccaguacgaggccaugagcugcgacuucaacggcggcaagaucagcgugcaguacaaccugagccacagcuacgccggcgacgccgccgagcacugcggcaccguggccaacggcgugcugcagaccuucaugagaauggccuggggcggcagauacaucgcccuggacagcggcaagggcaacugggacugcaucaugaccagcuaccaguaccugaucauccagaacaccaccugggaggaccacugccaguucagcagacccagccccaucggcuaccugggccugcugagccagagaaccagagacaucuacaucagcagaagaagaagaggcaccuucaccuggacccugagcgacagcgagggcaacgagacccccggcggcuacugccugaccagauggaugcugaucgaggccgagcugaagugcuucggcaacaccgccguggccaagugcaacgagaagcacgacgaggaguucugcgacaugcugagacuguucgacuucaacaagcaggccaucagaagacugaaggcccccgcccagaugagcauccagcugaucaacaaggccgugaacgcccugaucaacgaccagcugaucaugaagaaccaccugagagacaucaugggcauccccuacugcaacuacagcaaguacugcuaccugaaccacaccagcagcggcagaaccagccugcccaagugcugccugaucagcaacggcagcuaccugaacgagacccaguucagcgacgacaucgagcagcaggccgacaacaugaucaccgagaugcugcagaaggaguacaucgagagacagggcaagaccccccugggccugguggacaucuucaucuucagcaccagcuucuaccugaucagcaucuuccugcaccugaucaagauccccacccacagacacaucgugggcaagcccugccccaagccccacagacugaaccacaugggcgugugcagcugcggccuguacaagcaccccggcgugcccaccaaguggaagagauga

SEQ ID NO: 24743 - RNA, 1473 nt, Artificial Sequence
  derived and/or modified CDS sequence (opt4) from LASV(803213;Clade II)__AAF86703__GPCmut3
augggccagaucaucaccuucuuccaggaggugccccacgugaucgaggaggugaugaacaucgugcugaucgcccugagccugcuggccauccugaagggcaucuacaacguggccaccugcggccuguucggccugaucagcuuccugcugcugugcggcagaagcugcagcgugaccuacaagggcguguacgagcugcagacccuggagcugaacauggccaaccugaacaugaccaugccccugagcugcaccaagaacaacagccaccacuacaucauggugggcaacgagaccggccuggagcugacccugaccaacaccagcaucaucaaccacaaguucugcaaccugagcgacgcccacaagaagaaccuguacgaccacgcccugaugagcaucaucagcaccuuccaccugagcauccccaacuucaaccaguacgaggccaugagcugcgacuucaacggcggcaagaucagcgugcaguacaaccugagccacagcuucgccguggacgccgccaaccacugcggcaccaucgccaacggcgugcugcagaccuucaugagaauggccuggggcggcagcuacaucgcccuggacagcggcaagggcaacugggacugcaucaugaccagcuaccaguaccugaucauccagaacaccaccugggaggaccacugccaguucagcagacccagccccaucggcuaccugggccugcugagccagagaaccagagacaucuacaucagcagaagaagaagaggcaccuucaccuggacccugagcgacagcgagggcaacgaggcccccggcggcuacugccugaccagauggaugcugaucgaggccgagcugaagugcuucggcaacaccgccguggccaagugcaacgagaagcacgacgaggaguucugcgacaugcugagacuguucgacuucaacaagcaggccaucaagagacugaagacccccgcccagaugagcauccagcugaucaacaaggccgugaacgcccugaucaacgaccagcugaucaugaagaaccaccugagagacaucaugggcauccccuacugcaacuacagcagauacugcuaccugaaccacaccgugaccggcaagaccagccugcccagaugcugccuggugagcaacggcagcuaccugaacgagacccacuucagcgacgacaucgagcagcaggccgacaacaugaucaccgagaugcugcagaaggaguacauggacagacagggcaagaccccccugggccugguggaccuguucguguucagcaccagcuucuaccugaucagcaucuuccugcaccuggugaagauccccacccacagacacaucgugggcaagcccugccccaagccccacagacugaaccacaugggcaucugcagcugcggccuguacaagcaccccggcgugcccgugaaguggaagagauga

SEQ ID NO: 24744 - RNA, 1473 nt, Artificial Sequence
  derived and/or modified CDS sequence (opt4) from LASV(GA391;Clade III)__CAA36645__GPCmut3
augggccagaucgugaccuucuuccaggaggugccccacgugaucgaggaggugaugaacaucgugcugaucgcccugagcauccuggccauccugaagggccuguacaacguggccaccugcggccugaucggccuggugaccuuccugcugcugagcggcagaagcugcagccugaucuacaagggcaccuacgagcugcagacccuggagcugaacauggagacccugaacaugaccaugccccugagcugcaccaagaacaacagccaccacuacaucagagugggcaacgagaccggccuggagcugacccugaccaacaccagcauccugaaccacaaguucugcaaccugagcgacgcccacaagagaaaccuguacgaccacagccugaugagcaucaucagcaccuuccaccugagcauccccaacuucaaccaguacgaggccaugagcugcgacuucaacggcggcaagaucaccgugcaguacaaccugagccacagcuucgccguggacgccgccggccacugcggcacccuggccaacggcgugcugcagaccuucaugagaauggccuggggcggcagcuacaucgcccuggacagcggcagaggcaacugggacugcaucaugaccagcuaccaguaccugaucauccagaacaccaccugggacgaccacugccaguucagcagacccagccccaucggcuaccugggccugcugagccagagaaccagagacaucuacaucagcagaagaagaagaggcaccuucaccuggacccugagcgacagcgagggcaacgagacccccggcggcuacugccugaccagauggaugcugaucgaggccgagcugaagugcuucggcaacaccgccguggccaagugcaacgagaagcacgacgaggaguucugcgacaugcugagacuguucgacuucaacaagcaggccaucagaagacugaagacccccgcccagaugagcauccagcugaucaacaaggccgugaacgcccugaucaacgaccagcugaucaugaagaaccaccugagagacaucaugggcauccccuacugcaacuacagcagauacugcuaccugaaccacaccagcaccggcaagaccagccugcccagaugcugccugaucagcaacggcagcuaccugaacgagaccaaguucagcgacgacaucgagcagcaggccgacaacaugaucaccgagaugcugcagaaggaguacaucgacagacagggcaagaccccccugggccugguggaccuguucguguucagcaccagcuucuaccugaucagcaucuuccugcaccuggugaagauccccacccacagacacaucgugggcaagcccugccccaagccccacagacugaaccacaugggcaucugcagcugcggccuguacaagcagcccggcgugcccgugagauggaagagauga

SEQ ID NO: 24745 - RNA, 1476 nt, Artificial Sequence
  derived and/or modified CDS sequence (opt4) from LASV(AV;Clade V)__CCA30314__GPCmut3
augggccagaucgugaccuucuuccaggaggugccccacgugaucgaggaggugaugaacaucgugcugaucgcccugagcauccuggccgugcugaagggccuguacaacaucgccaccugcggccugaucggccugaucaccuuccugcugcugugcggcagaagcugcagcagcaaccuguacaagggcguguacgagcugcagagccuggaccugaacauggagacccugaacaugaccaugccccugagcugcaccaagaacaacagccaccacuacaucagagugggcaacgacaccggccuggagcugacccugaccaacaccagcauccugaaccacaaguucugcaaccugagcgacgcccacaagaaggaccuguacgaccacgcccugaugagcaucaucagcaccuuccaccugagcauccccaacuucaaccaguacgaggccaugagcugcgacuucaacggcggcaagaucagcgugcaguacaaccugagccacagcuacgccaucgacgccgccaaccacugcggcaccguggccaacggcauccugcagaccuucaugagaauggccuggggcggcagcuacaucgcccuggacagcggcagaggcaacugggacugcaucaugaccagcuaccaguaccugaucauccagaacaccaccugggagaaccacugccaguucagcagacccagccccaucggcuaccugggccugcugagccagagaaccagagacaucuacaucagcagaagaagaagaggcaccuucaccuggacccugagcgacagcgagggcaacgccacccccggcggcuacugccugaccagauggaugcugaucgaggccgagcugaagugcuucggcaacaccgccguggccaagugcaacgagaagcacgacgaggaguucugcgacaugcugagacuguucgacuucaacaagcaggccaucagcagacugaagagccccgcccagaugagcauccagcugaucaacaaggccgugaacgcccugaucaacgaccagcugaucaugaagaaccaccugagagacaucaugggcauccccuacugcaacuacagcaaguacugcuaccugaaccacaccaucaccggcaagaccagccugcccaagugcugccuggugagcaacggcagcuaccugaacgagacccacuucagcgacgacaucgagcagcaggccgacaacaugaucaccgagaugcugcagaaggaguacauggagagacagggcaagaccccccugggccugguggaccuguucguguucagcaccagcuucuaccugaucagcaucuuccugagacuggugaagauccccacccacagacacaucgugggcaagcccugccccaagccccacagacugaaccacaugggcaucugcagcugcggccuguacaagcagcccggcgugcccgugagauggaagagauga

SEQ ID NO: 24746 - RNA, 1473 nt, Artificial Sequence
  derived and/or modified CDS sequence (opt4) from LASV(Togo/2016/7082;Clade VI)__AMR44577__GPCmut3
augggccagaucaucaccuucuuccaggaggugccccacgugaucgaggaggugaugaacaucgugcugaucgcccugagccugcuggccauccugaagggcguguacaacguggccaccugcggcaucaucggccuggugaccuuccuguuccugugcggcagaagcugcagccugaucuacaagggcagcuacgagcugcagacccuggagcugaacauggagacccugaacaugaccaugccccugagcugcaccaagaacagcagccaccacuacaucagagugggcaacgagaccggccuggagcugacccugaccaacaccagcaucaucaaccacaaguucugcaaccugagcgacgcccacaagagaaaccuguacgaccacgcccugaugagcauccugagcaccuuccaccugagcauccccaacuucaaccaguacgaggccaugagcugcgacuucaacggcggcaagaucagcgugcaguacaaccugagccacgccuacgccguggacgccgccgagcacugcggcaccguggccaacggcgugcugcagaccuucaugagaauggccuggggcggcagcuacaucgcccuggacagcggcagaggcaacugggacugcaucaugaccagcuaccaguaccugaucauccagaacaccaccugggaggaccacugccaguucagcagacccagccccaucggcuaccugggccugcugagccagagaaccagagacaucuacaucagcagaagaagaagaggcaccuucaccuggacccugagcgacagcgagggcaacgagacccccggcggcuacugccugaccagauggaugcugaucgaggccgagcugaagugcuucggcaacaccgccguggccaagugcaacgagaagcacgacgaggaguucugcgacaugcugagacuguucgacuucaacaagcaggccauccagagacugaagagccccgcccagaugagcauccagcugaucaacaaggccgugaacgcccugaucaacgaccagcugaucaugaagaaccaccugagagacaugaugggcauccccuacugcaacuacagcaaguacugcuaccugaaccacaccagcagcggcagaaccagccugcccaagugcugccuggugagcaacggcagcuaccugaacgagacccacuucagcgacgacaucgagcagcaggccgacaacaugaucaccgagaugcugcagaaggaguacaucgacagacagggcaagaccccccugggccugguggaccuguucguguucagcaccagcuucuaccugaucagcaucuuccugcaccugaucaagauccccacccacagacacaucgugggcaagcccugccccaagccccacagacugaaccacaugggcaucugcagcugcggccuguacaagcagcccggcgugcccaccagauggaagagauga

SEQ ID NO: 24747 - RNA, 1473 nt, Artificial Sequence
  derived and/or modified CDS sequence (opt4) from LASV(KAK-428;Clade n.d. (VII))__ANH09740__GPCmut3
augggccagaucgugaccuucuuccaggaggugccccacgugaucgaggaggugaugaacaucgugcugaucgcccugagccugcuggccauccugaagggccuguacaacuucgccaccugcggcgugaucggccugaucaccuuccugcugcugugcggcagaagcugcagcgccaccuacaagggccaguacgagcugcagacccuggagcugaacauggagagccugaacaugaccaugccccugagcugcaccaagaacaacagccaccacuacaucagagccggcaacaacaccggccuggagcugacccugaccaacaccagcaucaucagccacaaguucugcaaccugagcgacgcccacaagaagaaccuguacgaccacacccugaugagcaucaucaccaccuuccaccugagcauccccaacuucaaccaguacgaggccaugagcugcgacuucaacggcggcaagaucagcauccaguacaaccugagccacagcuacgccggcgacgccgcccagcacugcggcaccguggccaacggcgugcugcagaccuucaugagaauggccuggggcggcagcuaccuggcccuggacagcggcagaagaggcugggacugcaucaucagcagcuaccaguaccugaucauccagaacaccaccugggacgaccacugccaguucagcagacccagccccaucggcuaccugggcuucgugagccagaagaccagagacaucuacaucagcagaagaagaagaggcaccuucaccuggacccugagcgacagcgagggccacgacaugcccggcggcuacugccugaccagauggaugcugaucgaggccgaccugaagugcuucggcaacaccgccguggccaagugcaacgagaagcacgacgaggaguucugcgacauguggagacuguucgacuucaacaagcaggccauccagagacugaaggcccccgcccagaugaacauccagcugaucaacaaggccgugaacgcccugaucaacgaccagcugaugaugaagaaccaccugagagacaucaugggcauccccuacugcaacuacagcaaguucugcuaccugaacaacaccaccaccggcagaaccagccugcccagaugcugccugaucagcaacggcagcuaccugaacgagacccacuucagcgacgacaucgagcagcaggccgacaacaugaucaccgagaugcugcagaaggaguacauggacagacagggcaagaccccccugggccugguggaccuguucguguucagcaccagcuucuaccugaucaccaucuuccugcaccuggugaagauccccacccacagacacaucgugggcaagcccugccccaagccccacagacugaaccacaugggcaucugcagcugcggccuguacaagcagcccggcgugcccgugagauggaagagauga

SEQ ID NO: 24748 - RNA, 1473 nt, Artificial Sequence; identical to SEQ ID NO: 24742
  derived and/or modified CDS sequence (opt4) from LASV(Pinneo-NIG-1969;Clade I)__AIT17836__GPCmut3

SEQ ID NO: 24749 - RNA, 1473 nt, Artificial Sequence
  derived and/or modified CDS sequence (opt4) from LASV(ISTH0009-NIG-2011;Clade II)__AIT17404__GPCmut3
augggccagaucaucaccuucuuccaggaggugccccacgugaucgaggaggugaugaacaucgugcugaucgcccugagccugcuggccauccugaagggcaucuacaacguggccaccugcggccuguucggccuggugagcuuccugcugcugugcggcagaagcugcagcaccaccuacaagggcguguacgagcugcagacccuggagcuggacauggccagccugaacaugaccaugccccugagcugcaccaagaacaacagccaccacuacaucauggugggcaacgagaccggccuggagcugacccugaccaacaccagcaucaucaaccacaaguucugcaaccugagcgacgcccacaagaagaaccuguacgaccacgcccugaugagcaucaucagcaccuuccaccugagcauccccaacuucaaccaguacgaggccaugagcugcgacuucaacggcggcaagaucagcgugcaguacaaccugagccacgccuacgccguggacgccgccaaccacugcggcaccaucgccaacggcgugcugcagaccuucaugagaauggccuggggcggcagcuacaucgcccuggacagcggcaagggcagcugggacugcaucaugaccagcuaccaguaccugaucauccagaacaccaccugggaggaccacugccaguucagcagacccagccccaucggcuaccugggccugcugagccagagaaccagagacaucuacaucagcagaagaagaagaggcaccuucaccuggacccugagcgacagcgagggcaacgagacccccggcggcuacugccugaccagauggaugcugaucgaggccgagcugaagugcuucggcaacaccgccguggccaagugcaacgagaagcacgacgaggaguucugcgacaugcugagacuguucgacuucaacaagcaggccaucagaagacugaagacccccgcccagaugagcauccagcugaucaacaaggccgugaacgcccugaucaacgaccagcugaucaugaagaaccaccugagagacaucaugggcauccccuacugcaacuacagcaaguacugcuaccugaaccacaccgugaccggcaagaccagccugcccagaugcugccuggugagcaacggcagcuaccugaacgagacccacuucagcgacgacaucgagcagcaggccgacaacaugaucaccgagcugcugcagaaggaguacauggacagacagggcaagaccccccugggccugguggaccuguucguguucagcaccagcuucuaccugaucagcaucuuccugcaccugaucaagauccccacccacagacacaucaccggcaagcccugccccaagccccacagacugaaccacaugggcaucugcagcugcggccuguacaagcaccccggcgugcccgugaaguggaagagauga

SEQ ID NO: 24750 - RNA, 1473 nt, Artificial Sequence
  derived and/or modified CDS sequence (opt4) from LASV(ISTH2010-NIG-2012;Clade II)__AIT17482__GPCmut3
augggccagaucaucaccuucuuccaggaggugccccacgugaucgaggaggugaugaacaucgugcugaucgcccugagccugcuggccauccugaagggcaucuacaacguggccaccugcggccuguucggccuggugagcuuccugcugcugugcggcagaagcugcagcaccaccuacaagggcguguacgagcugcagacccuggagcuggacauggccagccugaacaugaccaugccccugagcugcaccaagaacaacagccaccacuacaucauggugggcaacgagaccggccuggagcugacccugaccaacaccagcaucaucaaccacaaguucugcaaccugagcgacgcccacaagaagaaccuguacgaccacgcccugaugagcaucaucagcaccuuccaccugagcauccccaacuucaaccaguacgaggccaugagcugcgacuucaacggcggcaagaucagcgugcaguacaaccugagccacgccuacgccguggacgccgccaaccacugcggcaccaucgccaacggcgugcugcagaccuucaugagaauggccuggggcggcagcuacaucgcccuggacagcggcaagggcagcugggacugcaucaugaccagcuaccaguaccugaucauccagaacaucaccugggaggaccacugccaguucagcagacccagccccaucggcuaccugggccugcugagccagagaaccagagacaucuacaucagcagaagaagaagaggcaccuucaccuggacccugagcgacagcgagggcaacgagacccccggcggcuacugccugaccagauggaugcugaucgaggccgagcugaagugcuucggcaacaccgccguggccaagugcaacgagaagcacgacgaggaguucugcgacaugcugagacuguucgacuucaacaagcaggccaucagaagacugaagacccccgcccagaugagcauccagcugaucaacaaggccgugaacgcccugaucaacgaccagcugaucaugaagaaccaccugagagacaucaugggcauccccuacugcaacuacagcaaguacugcuaccugaaccacaccgugaccggcaagaccagccugcccagaugcugccuggugagcaacggcagcuaccugaacgagacccacuucagcgacgacaucgagcagcaggccgacaacaugaucaccgagcugcugcagaaggaguacaucgacagacagggcaagaccccccugggccugguggaccuguucguguucagcaccagcuucuaccugaucagcaucuuccugcaccuggugaagauccccacccacagacacguggugggcaagcccugccccaagccccacagacugaaccacaugggcaucugcagcugcggccuguacaagcaccccggcgugcccgugaaguggaagagauga

SEQ ID NO: 24751 - RNA, 1473 nt, Artificial Sequence
  derived and/or modified CDS sequence (opt4) from LASV(Lassa virus/H.sapiens-wt/NGA/2015/ISTH_0543;Clade II)__AVO03639__GPCmut3
augggccagaucaucaccuucuuccaggaggugccccacgugaucgaggaggugaugaacaucgugcugaucgcccugagccugcuggccauccugaagggcaucuacaacguggccaccugcggccuguucggccuggugagcuuccugcugcugugcggcagaagcugcagcaccaccuacaagggcguguacgagcugcagacccuggagcuggacauggccaaccugaacaugaccaugccccugagcugcaccaagaacaacagccaccacuacaucauggugggcaacgagaccggccuggagcugacccugaccaacaccagcaucaucaaccacaaguucugcaaccugagcgacgcccacaagaagaaccuguacgaccacgcccugaugagcaucaucagcaccuuccaccugagcauccccaacuucaaccaguacgaggccaugagcugcgacuucaacggcggcaagaucagcgugcaguacaaccugagccacaccuacgccguggacgccgccaaccacugcggcaccaucgccaacggcgugcugcagaccuucaugagaauggccuggggcggcagcuacaucgcccuggacagcggcaagggcagcugggacugcaucaugaccagcuaccaguaccuggugauccagaacaccaccugggaggaccacugccaguucagcagacccagccccaucggcuaccugggccugcugagccagagaaccagagacaucuacaucagcagaagaagaagaggcaccuucaccuggacccugagcgacagcgagggcaacgagacccccggcggcuacugccugaccagauggaugcugaucgaggccgagcugaagugcuucggcaacaccgccguggccaagugcaacgagaagcacgacgaggaguucugcgacaugcugagacuguucgacuucaacaagcaggccaucagaagacugaagacccccgcccagaugagcauccagcugaucaacaaggccgugaacgcccugaucaacgaccagcugaucaugaagaaccaccugagagacaucaugggcauccccuacugcaacuacagcaaguacugcuaccugaaccacaccgugaccggcaagaccagccugcccagaugcugccuggugagcaacggcagcuaccugaacgagacccacuucagcgacgacaucgagcagcaggccgacaacaugaucaccgagcugcugcagaaggaguacaucgacagacagggcaagaccccccugggccugguggaccuguucguguucagcaccagcuucuaccugaucagcaucuuccugcaccuggugaagauccccacccacagacacaucaccggcaagcccugccccaagccccacagacugaaccacaugggcaucugcagcugcggccuguacaagcaccccggcgugcccgugaaguggaagagauga

SEQ ID NO: 24752 - RNA, 1473 nt, Artificial Sequence
  derived and/or modified CDS sequence (opt4) from LASV(Lassa virus/H.sapiens-wt/NGA/2016/ISTH_0009;Clade II)__AVO03571__GPCmut3
augggccagaucaucaccuucuuccaggaggugccccacgugaucgaggaggugaugaacaucgugcugaucgcccugagccugcuggccauccugaagggcaucuacaacguggccaccugcggccugcugggccuggugagcuuccugcugcugugcggcagaagcugcagcaccaccuacaagggcguguacgagcugcagacccuggagcuggacauggccagccugaacaugaccaugccccugagcugcaccaagaacaacagccaccacuacaucauggugggcaacgagaccggccuggagcugacccugaccaacaccagcaucaucaaccacaaguucugcaaccugagcgacgcccacaagaagaaccuguacgaccacgcccugaugagcaucaucagcaccuuccaccugagcauccccaacuucaaccaguacgaggccaugagcugcgacuucaacggcggcagaaucagcgugcaguacaaccugagccacagcuacgccguggacgccgccaaccacugcggcaccaucgccaacggcgugcugcagaccuucaugagaauggccuggggcggcagcuacaucgcccuggacagcggcaagggcagcugggacugcaucaugaccagcuaccaguaccugaucauccagaacaccaccugggaggaccacugccaguucagcagacccagccccaucggcuaccugggccugcugagccagagaaccagagacaucuacaucagcagaagaagaagaggcaccuucaccuggacccugagcgacagcgagggcaacgagacccccggcggcuacugccugaccagauggaugcugaucgaggccgagcugaagugcuucggcaacaccgccguggccaagugcaacgagaagcacgacgaggaguucugcgacaugcugagacuguucgacuucaacaagcaggccaucagaagacugaagacccccgcccagaugagcauccagcugaucaacaaggccgugaacgcccugaucaacgaccagcugaucaugaagaaccaccugagagacaucaugggcauccccuacugcaacuacagcaaguacugcuaccugaaccacaccgugaccggcaagaccagccugcccagaugcugccuggugagcaacggcagcuaccugaacgagacccacuucagcgacgacaucgagcagcaggccgacaacaugaucaccgagcugcugcagaaggaguacaucgacagacagggcaagaccccccugggccugguggaccuguucguguucagcaccagcuucuaccugaucagcaucuuccugcaccuggugaagauccccacccacagacacaucaccggcaagcccugccccaagccccacagacugaaccacaugggcaucugcagcugcggccuguacaaccaccccggcgugcccgugaaguggaagagauga

SEQ ID NO: 24753 - RNA, 1473 nt, Artificial Sequence
  derived and/or modified CDS sequence (opt4) from LASV(Lassa virus/H.sapiens-wt/NGA/2016/ISTH_0017;Clade II)__AVO03567__GPCmut3
augggccagaucaucaccuucuuccaggaggugccccacgugaucgaggaggugaugaacaucgugcugaucgcccugagccugcuggccauccugaagggcaucuacaacguggccaccugcggccuguucggccuggugagcuuccugcugcugugcggcagaagcugcagcaccaccuacaagggcguguacgagcugcagacccuggagcuggacauggccagccugaacaugaccaugccccugagcugcaccaagaacaacagccaccacuacaucauggugggcaacgagaccggccuggagcugacccugaccaacaccagcaucaucaaccacaaguucugcaaccugagcgacgcccacaagaagaaccuguacgaccacgcccugaugagcaucaucagcaccuuccaccugagcauccccaacuucaaccaguacgaggccaugagcugcgacuucaacggcggcaagaucagcgugcaguacaaccugagccacaccuacgccaucgacgccgccaaccacugcggcaccaucgccaacggcgugcugcagaccuucaugagaauggccuggggcggcagcuacaucgcccuggacagcggcaagggcagcugggacugcaucaugaccagcuaccaguaccugaucauccagaacaccaccugggaggaccacugccaguucagcagacccagccccaucggcuaccugggccugcugagccagagaaccagagacaucuacaucagcagaagaagaagaggcaccuucaccuggacccugagcgacagcgagggcaacgagacccccggcggcuacugccugaccagauggaugcugaucgaggccgagcugaagugcuucggcaacaccgccguggccaagugcaacgagaagcacgacgaggaguucugcgacaugcugagacuguucgacuucaacaagcaggccaucagaagacugaagacccccgcccagaugagcauccagcugaucaacaaggccgugaacgcccugaucaacgaccagcugaucaugaagaaccaccugagagacaucaugggcauccccuacugcaacuacagcaaguacugcuaccugaaccacaccgugaccggcaagaccagccugcccagaugcugccuggugagcaacggcagcuaccugaacgagacccacuucagcgacgacaucgagcagcaggccgacaacaugaucaccgagcugcugcagaaggaguacauggacagacagggcaagaccccccugggccugguggaccuguucguguucagcaccagcuucuaccugaucagcaucuuccugcaccuggugagaauccccacccacagacacgugaucggcaagcccugccccaagccccacagacugaaccacaugggcaucugcagcugcggccuguacaagcaccccggcgugcccgugaaguggaagagauga

SEQ ID NO: 24754 - RNA, 1473 nt, Artificial Sequence
  derived and/or modified CDS sequence (opt4) from LASV(Lassa virus/H.sapiens-wt/NGA/2018/ISTH_0959;Clade II)__AVV65099__GPCmut3
augggccagaucaucaccuucuuccaggaggugccccacgugaucgaggaggugaugaacaucgugcugaucgcccugagccugcuggccauccugaagggcaucuacaacguggugaccugcggccuguucggccuggugagcuuccugcugcugugcggcagaagcugcagcaccaccuacaagggcguguacgagcugcagacccuggagcuggacauggccagccugaacaugaccaugccccugagcugcaccaagaacaacagccaccacuacaucauggugggcaacgagaccggccuggagcugacccugaccaacaccagcaucaucaaccacaaguucugcaaccugagcgacgcccacaagaagaaccuguacgaccacgcccugaugagcaucaucagcaccuuccaccugagcauccccaacuucaaccaguacgaggccaugagcugcgacuucaacggcggcaagaucagcgugcaguacaaccugagccacgccuacgccaucgacgccgccaaccacugcggcaccaucgccaacggcgugcugcagaccuucaugagaauggccuggggcggcagcuacaucgcccuggacagcggcaagggcagcugggacugcaucaugaccagcuaccaguaccugaucauccagaacaccaccugggaggaccacugccaguucagcagacccagccccaucggcuaccugggccugcugagccagagaaccagagacaucuacaucagcagaagaagaagaggcaccuucaccuggacccugagcgacagcgagggcaacgagacccccggcggcuacugccugaccagauggaugcugaucgaggccgagcugaagugcuucggcaacaccgccguggccaagugcaacgagaagcacgacgaggaguucugcgacaugcugagacuguucgacuucaacaagcaggccaucagaagacugaagacccccgcccagaugagcauccagcugaucaacaaggccgugaacgcccugaucaacgaccagcugaucaugaagaaccaccugagagacaucaugggcauccccuacugcaacuacagcaaguacugcuaccugaaccacaccgugaccggcaagaccagccugcccagaugcugccuggugagcaacggcagcuaccugaacgagacccacuucagcgacgacaucgagcagcaggccgacaacaugaucaccgagcugcugcagaaggaguacaucgacagacagggcaagaccccccugggccugguggaccuguucguguucagcaccagcuucuaccugaucagcaucuuccugcaccuggugaagauccccacccacagacacgugaucggcaagcccugccccaagccccacagacugaaccacaugggcaucugcagcugcggccuguacaagcaccccggcgugcccgugaaguggaagagauga

SEQ ID NO: 24755 - RNA, 1473 nt, Artificial Sequence
  derived and/or modified CDS sequence (opt4) from LASV(LASV003-NIG-2008;Clade II)__AIT17580__GPCmut3
augggccagaucaucaccuucuuccaggaggugccccacgugaucgaggaggugaugaacaucgugcugaucgcccugagccugcuggccauccugaagggcaucuacaacguggccaccugcggccuguucggccuggugagcuuccugcugcugugcggcagaagcugcagcaccaccuacaagggcguguacgagcugcagacccuggagcuggacauggccagccugaacaugaccaugccccugagcugcaccaagaacaacagccaccacuacaucauggugggcaacgagaccggccuggagcugacccugaccaacaccagcaucaucaaccacaaguucugcaaccugagcgacgcccacaagaagaaccuguacgaccacgcccugaugagcaucaucagcaccuuccaccugagcauccccaacuucaaccaguacgaggccaugagcugcgacuucaacggcggcaagaucagcgugcaguacaaccugagccacaccuacgccguggacgccgccaaccacugcggcaccaucgccaacggcgugcugcagaccuucaugagaauggccuggggcggcagcuacaucgcccuggacagcggcaagggcagcugggacugcaucaugaccagcuaccaguaccugaucauccagaacaccaccugggaggaccacugccaguucagcagacccagccccaucggcuaccugggccugcugagccagagaaccagagacaucuacaucagcagaagaagaagaggcaccuucaccuggacccugagcgacagcgagagcaacgagacccccggcggcuacugccugaccagauggaugcugaucgaggccgagcugaagugcuucggcaacaccgccguggccaagugcaacgagaagcacgacgaggaguucugcgacaugcugagacuguucgacuucaacaagcaggccaucagaagacugaaggcccccgcccagaugagcauccagcugaucaacaaggccgugaacgcccugaucaacgaccagcugaucaugaagaaccaccugagagacaucaugggcauccccuacugcaacuacagcaaguacugcuaccugaaccacaccgugaccggcagaaccagccugcccagaugcugccuggugagcaacggcagcuaccugaacgagacccacuucagcgacgacaucgagcagcaggccgacaacaugaucaccgagcugcugcagaaggaguacauggacagacagggcaagaccccccugggccugguggaccuguucguguucagcaccagcuucuaccugaucagcaucuuccugcaccuggugaagauccccacccacagacacgugaucggcaagcccugccccaagccccacagacugaaccacaugggcaucugcagcugcggccuguacaagcaccccggcgugcccgugaaguggaagagauga

SEQ ID NO: 24756 - RNA, 1473 nt, Artificial Sequence
  derived and/or modified CDS sequence (opt4) from LASV(LASV035-NIG-2009;Clade II)__AIT17588__GPCmut3
augggccagaucaucaccuucuuccaggaggugccccacgugaucgaggaggugaugaacaucgugcugaucgcccugagccugcuggccauccugaagggcaucuacaacguggccaccugcggccuguucggccuggugagcuuccugcugcugugcggcagaagcugcagcaccaccuacaagggcguguacgagcugcagacccuggagcuggacauggccagccugaacaugaccaugccccugagcugcaccaagaacaacagccaccacuacaucauggugggcaacgagaccggccuggagcugacccugaccaacaccagcaucaucaaccacaaguucugcaaccugagcgacgcccacaagaagaaccuguacgaccacgcccugaugagcaucaucagcaccuuccaccugagcauccccaacuucaaccaguacgaggccaugagcugcgacuucaacggcggcaagaucagcgugcaguacaaccugagccacgccuacgccguggacgccgccaaccacugcggcaccaucgccaacggcgugcugcagaccuucaugagaauggccuggggcggcagcuacaucgcccuggacagcggcaagggcagcugggacugcaucaugaccagcuaccaguaccugaucauccagaacaccaccugggaggaccacugccaguucagcagacccagccccaucggcuaccugggccugcugagccagagaaccagagacaucuacaucagcagaagaagaagaggcaccuucaccuggacccugagcgacagcgagggcaacgagacccccggcggcuacugccugaccagauggaugcugaucgaggccgagcugaagugcuucggcaacaccgccguggccaagugcaacgagaagcacgacgaggaguucugcgacaugcugagacuguucgacuucaacaagcaggccaucagaagacugaaggcccccgcccagaugagcauccagcugaucaacaaggccgugaacgcccugaucaacgaccagcugaucaugaagaaccaccugagagacaucaugggcauccccuacugcaacuacagcaaguacugcuaccugaaccacaccgugaccggcaagaccagccugcccagaugcugccuggugagcaacggcagcuaccugaacgagacccacuucagcgacgacaucgagcagcaggccgacaacaugaucaccgagcugcugcagaaggaguacaucgacagacagggcaagaccccccugggccugguggaccuguucguguucagcaccagcuucuaccugaucagcaucuuccugcaccuggugaagauccccacccacagacacgugaucggcaagcccugccccaagccccacagacugaaccacaugggcaucugcagcugcggccuguacaagcaccccggcgugcccgugaaguggaagagauga

SEQ ID NO: 24757 - RNA, 1473 nt, Artificial Sequence
  derived and/or modified CDS sequence (opt4) from LASV(LASV1000-NIG-2009;Clade II)__AIT17782__GPCmut3
augggccagaucaucaccuucuuccaggaggugccccacgugaucgaggaggugaugaacaucgugcugaucgcccugagccugcuggccauccugaagggcaucuacaacguggccaccugcggccuguucggccuggugagcuuccugcugcugugcggcagaagcugcagcaccaccuacaagggcguguacgagcugcagacccuggagcuggacauggccagccugaacaugaccaugccccugagcugcaccaagaacaacagccaccacuacaucauggugggcaacgagaccggccuggagcugacccugaccaacaccagcaucaucaaccacaaguucugcaaccugagcgacgcccacaagaagaaccuguacgaccacgcccugaugagcaucaucagcaccuuccaccugagcauccccaacuucaaccaguacgaggccaugagcugcgacuucaacggcggcaagaucagcgugcaguacaaccugagccacaccuacgccguggacgccgccaaccacugcggcaccaucgccaacggcgugcugcagaccuucaugagaauggccuggggcggcagcuacaucgcccuggacagcggcaagggcagcugggacugcaucaugaccagcuaccaguaccugaucauccagaacaccaccugggaggaccacugccaguucagcagacccagccccaucggcuaccugggccugcugagccagagaaccagagacaucuacaucagcagaagaagaagaggcaccuucaccuggacccugagcgacagcgagggcaacgagacccccggcggcuacugccugaccagauggaugcugaucgaggccgagcugaagugcuucggcaacaccgccguggccaagugcaacgagaagcacgacgaggaguucugcgacaugcugagacuguucgacuucaacaagcaggccaucaagagacugaagacccccgcccagaugagcauccagcugaucaacaaggccgugaacgcccugaucaacgaccagcugaucaugaagaaccaccugagagacaucaugggcauccccuacugcaacuacagcaaguacugcuaccugaaccacaccgugaccggcaagaccagccugcccagaugcugccuggugagcaacggcagcuaccugaacgagacccacuucagcgacgacaucgagcagcaggccgacaacaugaucaccgagcugcugcagaaggaguacaucgacagacagggcaagaccccccugggccugguggaccuguucguguucagcaccagcuucuaccugaucagcaucuuccugcaccuggugaagauccccacccacagacacguggugggcaagcccugccccaagccccacagacugaaccacaugggcaucugcagcugcggccuguacaagcaccccggcgugcccgugaaguggaagagauga

SEQ ID NO: 24758 - RNA, 1473 nt, Artificial Sequence
  derived and/or modified CDS sequence (opt4) from LASV(LASV221-NIG-2010;Clade II)__AIT17624__GPCmut3
augggccagaucaucaccuucuuccaggaggugccccacgugaucgaggaggugaugaacaucgugcugaucgcccugagccugcuggccauccugaagggcaucuacaacguggccaccugcggccuguucggccuggugagcuuccugcugcugugcggcagaagcugcagcaccaccuacaagggcguguacgagcugcagacccuggagcuggacauggccagccugaacaugaccaugccccugagcugcaccaagaacaacagccaccacuacaucauggugggcaacgagaccggccuggagcugacccugaccaacaccagcaucaucaaccacaaguucugcaaccugagcgacgcccacaagaagaaccuguacgaccacgcccugaugagcaucaucagcaccuuccaccugagcauccccaacuucaaccaguacgaggccaugagcugcgacuucaacggcggcaagaucagcgugcaguacaaccugagccacaccuacgccaucgacgccgccaaccacugcggcaccaucgccaacggcgugcugcagaccuucaugagaauggccuggggcggcagcuacaucgcccuggacagcggcaagggcagcugggacugcaucaugaccagcuaccaguaccugaucauccagaacaccaccugggaggaccacugccaguucagcagacccagccccaucggcuaccugggccugcugagccagagaaccagagacaucuacaucagcagaagaagaagaggcaccuucaccuggacccugagcgacagcgagggcaacgagacccccggcggcuacugccugaccagauggaugcugaucgaggccgagcugaagugcuucggcaacaccgccguggccaagugcaacgagaagcacgacgaggaguucugcgacaugcugagacuguucgacuucaacaagcaggccaucagaagacugaagacccccgcccagaugagcauccagcugaucaacaaggccgugaacgcccugaucaacgaccagcugaucaugaagaaccaccugagagacaucaugggcauccccuacugcaacuacagcaaguacugcuaccugaaccacaccgugaccggcaagaccagccugcccagaugcugccuggugagcaacggcagcuaccugaacgagacccacuucagcgacgacaucgagcagcaggccgacaacaugaucaccgagaugcugcagaaggaguacauggacagacagggcaagaccccccugggccugguggaccuguucguguucagcaccagcuucuaccugaucagcaucuuccugcaccuggugaagauccccacccacagacacgugaucggcaagcccugccccaagccccacagacugaaccacaugggcaucugcagcugcggccuguacaagcaccccggcgugcccgugaaguggaagagauga

SEQ ID NO: 24759 - RNA, 1473 nt, Artificial Sequence
  derived and/or modified CDS sequence (opt4) from LASV(LASV237-NIG-2010;Clade II)__AIT17638__GPCmut3
augggccagaucaucaccuucuuccaggaggugccccacgugaucgaggaggugaugaacaucgugcugaucgcccugagccugcuggccauccugaagggcaucuacaacguggccaccugcggccuguucggccuggugagcuuccugcugcugugcggcagaagcugcagcaccaccuacaagggcguguacgagcugcagacccuggagcuggacauggccagccugaacaugaccaugccccugagcugcaccaagaacaacagccaccacuacaucauggugggcaacgagaccggccuggagcugacccugaccaacaccagcaucaucaaccacaaguucugcaaccugagcgacgcccacaagaaggaccuguacgaccacgcccugaugagcaucaucagcaccuuccaccugagcauccccaacuucaaccaguacgaggccaugagcugcgacuucaacggcggcaagaucagcgugcaguacaaccugagccacaccuacgccguggacgccgccaaccacugcggcaccaucgccaacggcgugcugcagaccuucaugagaauggccuggggcggcagcuacaucgcccuggacagcggcaagggcagcugggacugcaucaugaccagcuaccaguaccugaucauccagaacaccaccugggaggaccacugccaguucagcagacccagccccaucggcuaccugggccugcugagccagagaaccagagacaucuacaucagcagaagaagaagaggcaccuucaccuggacccugagcgacagcgagggcaacgagacccccggcggcuacugccugaccagauggaugcugaucgaggccgagcugaagugcuucggcaacaccgccguggccaagugcaacgagaagcacgacgaggaguucugcgacaugcugagacuguucgacuucaacaagcaggccaucagaagacugaagacccccgcccagaugagcauccagcugaucaacaaggccgugaacgcccugaucaacgaccagcugaucaugaagaaccaccugagagacaucaugggcauccccuacugcaacuacagcaaguacugcuaccugaaccacaccgugaccggcaagaccagccugcccagaugcugccuggugagcaacggcagcuaccugaacgagacccacuucagcgacgacaucgagcagcaggccgacaacaugaucaccgagcugcugcagaaggaguacauggacagacagggcaagaccccccugggccugguggaccuguucguguucagcaccagcuucuaccugaucagcaucuuccugcaccugaucaagauccccacccacagacacaucaccggcaagcccugccccaagccccacagacugaaccacaugggcaucugcagcugcggccuguacaagcaccccggcgugcccgugaaguggaagagauga

SEQ ID NO: 24760 - RNA, 1473 nt, Artificial Sequence
  derived and/or modified CDS sequence (opt4) from LASV(LASV253-NIG-2011;Clade II)__AIT17670__GPCmut3
augggccagaucaucaccuucuuccaggaggugccccacgugaucgaggaggugaugaacaucgugcugaucgcccugagccugcuggccauccugaagggcaucuacaacguggccaccugcggccuguucggccuggugagcuuccugcugcugugcggcagaagcugcagcaccaccuacaagggcguguacgagcugcagacccuggagcuggacauggccagccugaacaugaccaugccccugagcugcaccaagaacaacagccaccacuacaucauggugggcaacgagaccggccuggagcugacccugaccaacaccagcaucaucaaccacaaguucugcaaccugagcgacgcccacaagaagaaccuguacgaccacgcccugaugagcaucaucagcaccuuccaccugagcauccccaacuucaaccaguacgaggccaugagcugcgacuucaacggcggcaagaucagcgugcaguacaaccugagccacaccuacgccguggacgccgccaaccacugcggcaccaucgccaacggcgugcugcagaccuucaugagaauggccuggggcggcagcuacaucgcccuggacagcggcaagggcagcugggacugcaucaugaccagcuaccaguaccugaucauccagaacaccaccugggaggaccacugccaguucagcagacccagccccaucggcuaccugggccugcugagccagagaaccagagacaucuacaucagcagaagaagaagaggcaccuucaccuggacccugagcgacagcgagggcaacgagacccccggcggcuacugccugaccagauggaugcugaucgaggccgagcugaagugcuucggcaacaccgccguggccaagugcaacgagaagcacgacgaggaguucugcgacaugcugagacuguucgacuucaacaagcaggccaucagaagacugaaggcccccgcccagaugagcauccagcugaucaacaaggccgugaacgcccugaucaacgaccagcugaucaugaagaaccaccugagagacaucaugggcauccccuacugcaacuacagcaaguacugcuaccugaaccacaccgugaccggcagaaccagccugcccagaugcugccuggugagcaacggcagcuaccugaacgagacccacuucagcgacgacaucgagcagcaggccgacaacaugaucaccgagcugcugcagaaggaguacaucgacagacagggcaagaccccccugggccugguggaccuguucguguucagcaccagcuucuaccugaucagcaucuuccugcaccuggugaagauccccacccacagacacaucaucggcaagcccugccccaagccccacagacugaaccacaugggcaucugcagcugcggccuguacaagcaccccggcgugcccgugaaguggaagagauga

SEQ ID NO: 24761 - RNA, 1473 nt, Artificial Sequence
  derived and/or modified CDS sequence (opt4) from LASV(LASV254-NIG-2011;Clade II)__AIT17674__GPCmut3
augggccagaucaucaccuucuuccaggaggugccccacgugaucgaggaggugaugaacaucgugcugaucgcccugagccugcuggccauccugaagggcaucuacaacguggccaccugcggccuguucggccuggugagcuuccugcugcugugcggcagaagcugcagcaccaccuacaagggcguguacgagcugcagacccuggagcuggacaugaccaaccugaacaugaccaugccccugagcugcaccaagaacaacagccaccacuacaucauggugggcaacgagaccggccuggagcugacccugaccaacaccagcaucaucaaccacaaguucugcaaccugagcgacgcccacaagaagaaccuguacaaccacgcccugaugagcaucaucagcaccuuccaccugagcauccccaacuucaaccaguacgaggccaugagcugcgacuucaacggcggcaagaucagcgugcaguacaaccugagccacagcuacgccguggacgccgccaaccacugcggcaccaucgccaacggcgugcugcagaccuucaugagaauggccuggggcggcagcuacaucgcccuggacagcggcaagggcaacugggacugcaucaugaccagcuaccaguaccugaucauccagaacaccaccugggaggaccacugccaguucagcagacccagccccaucggcuaccugggccugcugagccagagaaccagagacaucuacaucagcagaagaagaagaggcaccuucaccuggacccugagcgacagcgagggcaacgagacccccggcggcuacugccugaccagauggaugcugaucgaggccgagcugaagugcuucggcaacaccgccguggccaagugcaacgagaagcacgacgaggaguucugcgacaugcugagacuguucgacuucaacaagcaggccaucagaagacugaagacccccgcccaggccaacauccagcugaucaacaaggccgugaacgcccugaucaacgaccagcugaucaugaagaaccaccugagagacaucaugggcauccccuacugcaacuacagcaaguacugcuaccugaaccacaccgugaccggcaagaccagccugcccagaugcugccuggugagcaacggcagcuaccugaacgagacccacuucagcgacgacaucgagcagcaggccgacaacaugaucaccgagcugcugcagaaggaguacauggacagacagggcaagaccccccugggccugguggaccuguucguguucagcaccagcuucuaccugaucagcaucuuccugcaccuggugaagauccccacccacagacacgugaucggcaagcccugccccaagccccacagacugaaccacaugggcaucugcagcugcggccuguacaagcaccccggcgugcccgugaaguggaagagauga

SEQ ID NO: 24762 - RNA, 1473 nt, Artificial Sequence
  derived and/or modified CDS sequence (opt4) from LASV(Nig08-A19;Clade III)__ADU56618__GPCmut3
augggccagaucgugaccuucuuccaggaggugccccacgugaucgaggaggugaugaacaucgugcugaucgcccugagcauccuggccauccugaagggccuguacaacaucgccaccugcggccugaucggccuggugaccuuccugcugcugagcggcagaagcugcagcaugaccuacaagggcguguacgagcugcagacccuggagcugaacaugaacacccugaacaugaccaugccccugagcugcaccaagaacaacagccaccacuacaucauggugggcaacgagaccggccuggagcugacccugaccaacaccagccugcugcaccacaaguucugcaaccugagcgacgcccacaagaagaaccuguacgaccacacccugaugagcaucaucagcaccuuccaccugagcauccccaacuucaaccaguacgaggccaugagcugcgacuucaacggcggcaagaucaccgugcaguacaaccugagccacagcuacgccaucgacgccgccaaccacugcggcaccguggccaacggcgugcugcagaccuucaugagaauggccuggggcggcagcuacaucgcccuggacagcggcagaggcaagugggacugcaucaugaccagcuaccaguaccugaucauccagaacaccaccugggaggaccacugccaguucagcagacccagccccaucggcuaccugggccugcugagccagagaaccagagacaucuacaucagcagaagaagaagaggcaccuucaccuggacccugagcgacagcgagggcaacgagacccccggcggcuacugccugaccagauggaugcugaucgaggccgagcugaagugcuucggcaacaccgccguggccaagugcaacgagaagcacgacgaggaguucugcgacaugcugagacuguucgacuucaacaagcaggccaucagaagacugaaggcccccgcccagaugagcauccagcugaucaacaaggccgugaacgcccugaucaacgaccagcugaucaugaagaaccaccugagagacaucaugggcauccccuacugcaacuacagcaaguacugcuaccugaaccacaccagcaccggcagaaccagccugcccagaugcugccuggugagcaacggcagcuaccugaacgagacccacuucagcgacgacaucgagcagcaggccgacaacaugaucaccgagaugcugcagaaggaguaccuggacagacagggcaagaccccccugggccugguggaccuguucguguucagcaccagcuucuaccugaucagcaucuuccugcaccuggugaagauccccacccacagacacaucgugggcaagcccugccccaagccccacagacugaaccacaugggcaucugcagcugcggccuguacaagcagcccggcgugcccgugagauggaagagauga

SEQ ID NO: 24763 - RNA, 1476 nt, Artificial Sequence
  derived and/or modified CDS sequence (opt4) from LASV(G1180-SLE-2010;Clade IV)__AIT17168__GPCmut3
augggccagaucgugaccuucuuccaggaggugccccacgugaucgaggaggugaugaacaucgugcugaucgcccugagcauccuggccgugcugaagggccuguacaacuucgccaccugcggccuggugggccugcugaccuuccugcugcugugcggcagaagcugcaccgccagcagauacaagggcguguacgagcugcagacccuggagcugaacauggagacccugaacaugaccaugccccugagcugcaccaagaacaacagccaccacuacaucauggugggcaacgagaccggccuggagcugacccugaccaacaccagcaucaucaaccacaaguucugcaaccugagcgacgcccacaagaagaaccuguacgaccacgcccugaugagcaucaucagcaccuuccaccugagcauccccaacuucaaccaguacgaggccaugagcugcgacuucaacggcggcaagaucagcgugcaguacaaccugagccacagcuacgccggcgacgccgccaaccacugcggcaccguggccaacggcgugcugcagaccuucaugagaauggccuggggcggcagcuacaucgcccuggacagcggccacggcagcugggacugcaucaugaccagcuaccaguaccugaucauccagaacaccaccugggaggaccacugccaguucagcagacccagccccaucggcuaccugggccugcugagccagagaaccagagacaucuacaucagcagaagaagaagaggcaccuucaccuggacccugagcgacagcgagggcaaggacacccccggcggcuacugccugaccagauggaugcugaucgaggccgagcugaagugcuucggcaacaccgccguggccaagugcaacgagaagcacgacgaggaguucugcgacaugcugagacuguucgacuucaacaagcaggccauccagagacugaaggcccccgcccagaugagcauccagcugaucaacaaggccgugaacgcccugaucaacgaccagcugaucaugaagaaccaccugagagacaucaugggcauccccuacugcaacuacagcaaguacugcuaccugaaccacaccaccaccggcaagaccagccugcccaagugcugccuggugagcaacggcagcuaccugaacgagacccacuucagcgacgacaucgagcagcaggccgacaacaugaucaccgagaugcugcagaaggaguacauggagagacagggcaagaccccccugggccugguggaccuguucguguucagcaccagcuucuaccugaucagcaucuuccugcaccuggugaagauccccacccacagacacaucgugggcaagagcugccccaagccccacagacugaaccacaugggcaucugcagcugcggccuguacaagcagcccggcgugcccgugaaguggaagagauga

SEQ ID NO: 24764 - RNA, 1476 nt, Artificial Sequence
  derived and/or modified CDS sequence (opt4) from LASV(G1442-SLE-2011;Clade IV)__AIT17180__GPCmut3
augggccagaucgugaccuucuuccaggaggugccccacgugaucgaggaggugaugaacaucgugcugaucgcccugagcauccuggccgugcugaagggccuguacaacguggccaccugcggccugaucggccuggugaccuuccugcugcugugcggcagaagcugcaccaccacccuguacaagggcguguacgagcugcagacccuggagcugaacauggagacccugaacaugaccaugccccugagcugcaccaagaacaacagccaccacuacaucagagugggcaacgagaccggccuggagcugacccugaccaacaccagcaucaucaaccacaaguucugcaaccugagcgacgcccacaagaagaaccuguacgaccacgcccugaugagcaucaucagcaccuuccaccugagcauccccaacuucaaccaguacgaggccaugagcugcgacuucaacggcggcaagaucagcgugcaguacaaccugagccacagcuacgccggcgacgccgccaaccacugcggcaccguggccaacggcgugcugcagaccuucaugagaauggccuggggcggcagcuacaucgcccuggacagcggcagaggcaacugggacugcaucaugaccagcuaccaguaccugaucauccagaacaccaccugggacgaccacugccaguucagcagacccagccccaucggcuaccugggccugcugagccagagaaccagagacguguacaucagcagaagaagaagaggcaccuucaccuggacccugagcgacagcgagggcaaggacacccccggcggcuacugccugaccagauggaugcugaucgaggccgagcugaagugcuucggcaacaccgccguggccaagugcaacgagaagcacgacgaggaguucugcgacaugcugagacuguucgacuucaacaagcaggccauccagagacugaaggcccccgcccagaugagcauccagcugaucaacaaggccgugaacgcccugaucaacgaccagcugaucaugaagaaccaccugagagacaucaugggcauccccuacugcaacuacagcaaguacugcuaccugaacaacaccgccaccggcaagaccagccugcccaagugcugccugaucagcaacggcagcuaccugaacgagacccacuucagcgacgacaucgagcaggaggccgacaacaugaucaccgagaugcugcagaaggaguacauggagagacagggcaagaccccccugggccugguggaccuguucguguucagcaccagcuucuaccugaucagcaucuuccugcaccuggugaagauccccacccacagacacaucgugggcaagagcugccccaagccccacagacugaaccacaugggcaucugcagcugcggccuguacaagcagcccggcgugcccgugagauggaagagauga

SEQ ID NO: 24765 - RNA, 1476 nt, Artificial Sequence
  derived and/or modified CDS sequence (opt4) from LASV(G3010-SLE-2013;Clade IV)__AIT17344__GPCmut3
augggccagaucgugaccuucuuccaggaggugccccacgugaucgaggaggugaugaacaucgugcugaucgcccugagcauccuggccgugcugaagggccuguacaacuucgccaccugcggccuggugggccuggugaccuuccugcugcugugcggcagaagcugcaccaccagccuguacaagggcguguacgagcugcagacccuggagcugaacauggagacccugaacaugaccaugccccugagcugcaccaagaacaacagccaccacuacaucauggugggcaacgagaccggccuggagcugacccugaccaacaccagcaucaucaaccacaaguucugcaaccugagcgacgcccacaagaagaaccuguacaaccacgcccugaugagcaucaucagcaccuuccaccugagcauccccaacuucaaccaguacgaggccaugagcugcgacuucaacggcggcaagaucagcgugcaguacaaccugagccacagcuacgccggcgacgccgccagccacugcggcaccguggccaacggcgugcugcagaccuucaugagaauggccuggggcggcagcuacaucgcccuggacagcggcuacggcaagugggacugcaucaugaccagcuaccaguaccugaucauccagaacaccaccugggaggaccacugccaguucagcagacccagccccaucggcuaccugggccugcugagccagagaaccagagacaucuacaucagcagaagaagaagaggcaccuucaccuggacccugagcgacagcgagggcaaggacacccccggcggcuacugccugaccagauggaugcugaucgaggccgagcugaagugcuucggcaacaccgccguggccaagugcaacgagaagcacgacgaggaguucugcgacaugcugagacuguucgacuucaacaagcaggccauccagagacugaagacccccgcccagaugagcauccagcugaucaacaaggccgugaacgcccugaucaacgaccagcugaucaugaagaaccaccugagagacaucaugggcauccccuacugcaacuacagcaaguacugcuaccugaaccacaccaccaccggcaagaccagccugcccaagugcugccuggugagcaacggcagcuaccugaacgagacccacuucagcgacgacaucgagcagcaggccgacaacaugaucaccgagaugcugcagaaggaguacauggagagacagggcaagaccccccugggccugguggaccuguucguguucagcaccagcuucuaccugaucagcaucuuccugcaccuggugaagauccccacccacagacacaucgugggcaagagcugccccaagccccacagacugaaccacaugggcaucugcagcugcggccuguacaagcagcccggcgugcccgugagauggaagagauga

SEQ ID NO: 24766 - RNA, 1476 nt, Artificial Sequence
  derived and/or modified CDS sequence (opt4) from LASV(G502-SLE-2009;Clade IV)__AIT17126__GPCmut3
augggccagaucgugaccuucuuccaggaggugccccacgugaucgaggaggugaugaacaucgugcugaucgcccugagcauccuggccgugcugaagggccuguacaacuucgccaccugcggccuggugggccugcugaccuuccugcugcugugcggcagaagcugcaccaccggccuguacaagggcguguacgagcugcagacccuggagcugaacauggagacccugaacaugaccaugccccugagcugcaccaagaacaacagccaccacuacaucauggugggcaacgagaccggccuggagcugacccugaccaacaccagcaucaucaaccacaaguucugcaaccugagcgacgcccacaagaagaaccuguacgaccacgcccugaugagcaucaucagcaccuuccaccugagcauccccaacuucaaccaguacgaggccaugagcugcgacuucaacggcggcaagaucagcgugcaguacaaccugagccacagcuacgccggcgacgccgccgaccacugcggcaccguggccaacggcgugcugcagaccuucaugagaauggccuggggcggcagcuacaucgcccuggacagcggcagaggcagaugggacugcaucaugaccagcuaccaguaccugaucauccagaacaccaccugggaggaccacugccaguucagcagacccagccccaucggcuaccugggccugcugagccagagaaccagagacaucuacaucagcagaagaagaagaggcaccuucaccuggacccugagcgacagcgagggcaaggacacccccggcggcuacugccugaccagauggaugcugaucgaggccgagcugaagugcuucggcaacaccgccguggccaagugcaacgagaagcacgacgaggaguucugcgacaugcugagacuguucgacuucaacaagcaggccauccagagacugaaggcccccgcccagaugagcauccagcugaucaacaaggccgugaacgcccugaucaacgaccagcuggugaugaagaaccaccugagagacaucaugggcauccccuacugcaacuacagcagauacugcuaccugaaccacaccaccaccggcagaaccagccugcccaagugcugccuggugagcaacggcagcuaccugaacgagacccacuucagcgacgacaucgagcagcaggccgacaacaugaucaccgagaugcugcagaaggaguacauggagagacagggcaagaccccccugggccugguggaccuguucguguucagcaccagcuucuaccugaucagcaucuuccugcaccuggugaagauccccacccacagacacaucgugggcaagagcugccccaagccccacagacugaaccacaugggcaucugcagcugcggccuguacaagcagcccggcgugcccgugaaguggaagagauga

SEQ ID NO: 24767 - RNA, 1476 nt, Artificial Sequence
  derived and/or modified CDS sequence (opt4) from LASV(G733-SLE-2010;Clade IV)__AIT17154__GPCmut3
augggccagaucgugaccuucuuccaggaggugccccacgugaucgaggaggugaugaacaucgugcugaucgcccugagcauccuggccgugcugaagggccuguacaacuucgccaccugcggcaucgugggccuggugagcuuccugcugcugugcggcagaagcugcaccaccagccuguacaagggcguguacgagcugcagacccuggagcugaacauggagacccugaacaugaccaugccccugagcugcaccaagaacaacagccaccacuacaucauggugggcaacgagaccggccuggagcugacccugaccaacaccagcaucaucaaccacaaguucugcaaccugagcgacgcccacaagaagaaccuguacgaccacgcccugaugagcaucaucagcaccuuccaccugagcauccccaacuucaaccaguacgaggccaugagcugcgacuucaacggcggcaagaucagcgugcaguacaaccugagccacagcuacgccggcgacgccgccaaccacugcggcaccaucgccaacggcgugcugcagaccuucaugagaauggccuggggcggcagcuacaucgcccuggacagcggcagagacagaugggacugcaucaugaccagcuaccaguaccugaucauccagaacaccaccugggaggaccacugccaguucagcagacccagccccaucggcuaccugggccugcugagccagagaaccagagacaucuacaucagcagaagaagaagaggcaccuucaccuggacccugagcgacagcgagggcaaggacacccccggcggcuacugccugaccagauggaugcugaucgaggccgagcugaagugcuucggcaacaccgccguggccaagugcaacgagaagcacgacgaggaguucugcgacaugcugagacuguucgacuucaacaagcaggccauccagagacugaaggcccccgcccagaugagcauccagcugaucaacaaggccgugaacgcccugaucaacgaccagcugaucaugaagaaccaccugagagacaucaugggcauccccuacugcaacuacagcaaguacugcuaccugaaccacaccaccaccggcaagaccagccugcccaagugcugccuggugagcaacggcagcuaccugaacgagacccacuucagcgacgacaucgagcagcaggccgacaacaugaucaccgagaugcugcagaaggaguacauggagagacagggcaagaccccccugggccugguggaccuguucguguucagcaccagcuucuaccugaucagcaucuuccugcaccuggugaagauccccacccacagacacguggugggcaagagcugccccaagccccacagacugaaccacaugggcaucugcagcugcggccuguacggccagcccggcgugcccgugaaguggaagagauga

SEQ ID NO: 24768 - RNA, 1476 nt, Artificial Sequence
  derived and/or modified CDS sequence (opt4) from MOPV/LASV reassortant(IGS-1;Clade IV)__AFY05576__GPCmut3
augggccagaucgugaccuucuuccaggaggugccccacgugaucgaggaggugaugaacaucgugcugaucgcccugagcgugcuggccgugcugaagggccuguacaacuucgccaccugcggccuggugggccuggugaccuuccugcugcugugcggcagaagcugcaccaccagccuguacaagggcguguacgagcugcagacccuggagcugaacauggagacccugaacaugaccaugccccugagcugcaccaagaacaacagccaccacuacaucauggugggcaacgagaccggccuggagcugacccugaccaacaccagcaucaucaaccacaaguucugcaaccugagcgacgcccacaagaagaaccuguacgaccacgcccugaugagcaucaucagcaccuuccaccugagcauccccaacuucaaccaguacgaggccaugagcugcgacuucaacggcggcaagaucagcgugcaguacaaccugagccacagcuacgccggcgacgccgccaaccacugcggcaccguggccaacggcgugcugcagaccuucaugagaauggccuggggcggcagcuacaucgcccuggacagcggcagaggcaacugggacugcaucaugaccagcuaccaguaccugaucauccagaacaccaccugggaggaccacugccaguucagcagacccagccccaucggcuaccugggccugcugagccagagaaccagagacaucuacaucagcagaagaagaagaggcaccuucaccuggacccugagcgacagcgagggcgaggacacccccggcggcuacugccugaccagauggaugcugaucgaggccgagcugaagugcuucggcaacaccgccguggccaagugcaacgagaagcacgacgaggaguucugcgacaugcugagacuguucgacuucaacaagcaggccauccagagacugaaggcccccgcccagaugagcauccagcugaucaacaaggccgugaacgcccugaucaacgaccagcugaucaugaagaaccaccugagagacaucaugggcauccccuacugcaacuacagcaaguacugcuaccugaaccacaccaccaccggcagaaccagccugcccaagugcugccuggugagcaacggcagcuaccugaacgagacccacuucagcgacgacaucgagcagcaggccgacaacaugaucaccgagaugcugcagaaggaguacauggagagacagggcaagaccccccugggccugguggaccuguucguguucagcaccagcuucuaccugaucagcaucuuccugcaccuggugaagauccccacccacagacacaucgugggcaagagcugccccaagccccacagacugaaccacaugggcaucugcagcugcggccuguacaagcagcccggcgugcccgugaaguggaagagauga

SEQ ID NO: 24769 - RNA, 1476 nt, Artificial Sequence
  derived and/or modified CDS sequence (opt4) from LASV(LM765-SLE-2012;Clade IV)__AIT17814__GPCmut3
augggccagaucgugaccuucuuccaggaggugccccacgugaucgaggaggugaugaacaucgugcugaucgcccugagcauccuggccgugcugaagggccuguacaacuucgccaccugcggccuggugggccuggugaccuuccugcugcugugcggcagaagcugcaccaccagccuguacaagggcguguacgagcugcagacccuggagcugaacauggagacccugaacaugaccaugccccugagcugcaccaagaacaacagccaccacuacaucauggugggcaacgagaccggccuggagcugacccugaccaacaccagcaucaucgaccacaaguucugcaaccugagcgacgcccacagaaagaaccuguacgaccacgcccugaugagcaucaucagcaccuuccaccugagcauccccaacuucaaccaguacgaggccaugagcugcgacuucaacggcggcaagaucagcgugcaguacaaccugagccacagcuacgccaaggacgccgccgaccacugcggcaccguggccaacggcgugcugcagaccuucaugagaauggccuggggcggcagcuacaucgcccuggacagcggcagaggcagaugggacugcaucaugaccagcuaccaguaccugaucauccagaacaccaccugggaggaccacugccaguucagcagacccagccccaucggcuaccugggccugcugagccagagaaccagagacaucuacaucagcagaagaagaagaggcaccuucaccuggacccugagcgacagcgagggcaaggacacccccggcggcuacugccugaccagauggaugcugaucgaggccgagcugaagugcuucggcaacaccgccguggccaagugcaacgagaagcacgacgaggaguucugcgacaugcugagacuguucgacuucaacaagcaggccauccagagacugaaggcccccgcccagaugagcauccagcugaucaacaaggccgugaacgcccugaucaacgaccagcugaucaugaagaaccaccugagagacaucaugggcauccccuacugcaacuacagcaaguacugcuaccugaaccacaccaccaccggcaagaccagccugcccaagugcugccuggugagcaacggcagcuaccugaacgagacccacuucagcgacgacaucgagcagcaggccgacaacaugaucaccgagaugcugcagaaggaguacauggagagacagggcaagaccccccugggccugguggaccuguucguguucagcaccagcuucuaccugaucagcaucuuccugcaccuggugaagauccccacccacagacacaucgugggcaagcccugccccaagccccacagacugaaccacaugggcaucugcagcugcggccuguacaagcagcccggcgugcccgugaaguggaagagauga

SEQ ID NO: 24770 - RNA, 1476 nt, Artificial Sequence
  derived and/or modified CDS sequence (opt4) from LASV(LM776-SLE-2012;Clade IV)__AIT17824__GPCmut3
augggccagaucgugaccuucuuccaggaggugccccacgugaucgaggaggugaugaacaucgugcugaucgcccugagcauccuggccgugcugaagggccuguacaacuucgccaccugcggccuggugggccuggugaccuuccugcugcugugcggcagaagcugcaccaccagcguguacaagggcguguacgagcugcagacccuggagcugaacauggagacccugaacaugaccaugccccugagcugcaccaagaacaacagccaccacuacaucauggugggcaacgagaccggccuggagcugacccugaccaacaccagcaucaucaaccacaaguucugcaaccugagcgacgcccacaagaagaaccuguacgaccacgcccugaugagcaucaucagcaccuuccaccugagcauccccaacuucaaccaguacgaggccaugagcugcgacuucaacggcggcaagaucagcgugcaguacaaccugagccacagcuacgccggcgacgccgccaaccacugcggcaccguggccaacggcgugcugcagaccuucaugagaauggccuggggcggcagcuacaucgcccuggacagcggccacggcaagugggacugcaucaugaccagcuaccaguaccugaucauccagaacaccaccugggaggaccacugccaguucagcagacccagccccaucggcuaccugggccugcugagccagagaaccagagacaucuacaucagcagaagaagaagaggcaccuucaccuggacccugagcgacagcgagggcaaggacacccccggcggcuacugccugaccagauggaugcugaucgaggccgagcugaagugcuucggcaacaccgccguggccaagugcaacgagaagcacgacgaggaguucugcgacaugcugagacuguucgacuucaacaagcaggccauccagagacugaaggcccccgcccagaugagcauccagcugaucaacaaggccgugaacgcccugaucaacgaccagcugaucaugaagaaccaccugagagacaucaugggcauccccuacugcaacuacagcaaguacugcuaccugaaccacaccaccaccggcaagaccagccugcccaagugcugccuggugagcaacggcagcuaccugaacgagacccacuucagcgacgacaucgagcagcaggccgacaacaugaucaccgagaugcugcagaaggaguacauggagagacagggcaagaccccccugggccugguggaccuguucguguucagcaccagcuucuaccugaucagcaucuuccugcaccuggugaagauccccacccacagacacaucgugggcaagagcugccccaagccccacagacugaaccacaugggcaucugcagcugcggccuguacaagcagcccggcgugcccgugagauggaagagauga

SEQ ID NO: 24771 - RNA, 1476 nt, Artificial Sequence
  derived and/or modified CDS sequence (opt4) from LASV(Mad39;Clade IV)__ANH09722__GPCmut3
augggccagaucgugaccuucuuccaggaggugccccacgugaucgaggaggugaugaacaucgugcugaucgcccugagcauccuggccgugcugaagggccuguacaacguggccaccugcggccugaucggccuggugaccuuccugcugcugugcggcagaagcugcaccaccacccuguacaagggcguguacgagcugcaggcccuggagcugaacauggagacccugaacaugaccaugccccugagcugcaccaagaacaacagccaccacuacaucagagugggcaacgagaccggccuggagcugacccugaccaacaccagccugaucaaccacaaguucugcaaccugagcgacgcccacaagaagaaccuguacgaccacgcccugaugagcaucaucagcaccuuccaccugagcauccccaacuucaaccaguacgaggccaugagcugcgacuucaacgacggcaagaucagcgugcaguacaaccugagccacaccuacgccggcgacaccgccaaccacugcggcaccguggccaacggcgugcugcagaccuucaugagaauggccuggggcggcagcuacaucgcccuggacagcggcagaggcggcugggacugcaucaugaccagcuaccaguaccugaucauccagaacaccaccugggaggaccacugccaguucagcagacccagccccaucggcuaccugggccugcugagccagagaaccagagacaucuacaucagcagaagaagaagaggcaccuucaccuggacccugagcgacagcgagggcaaggacacccccggcggcuacugccugaccagauggaugcugaucgaggccgagcugaagugcuucggcaacaccgccguggccaagugcaacgagaagcacgacgaggaguucugcgacaugcugagacuguucgacuucaacaagcaggccauccagagacugaaggcccccgcccagaugagcauccagcugaucaacaaggccgugaacgcccugaucaacgaccagcugaucaugaagaaccaccugagagacaucaugggcauccccuacugcaacuacagcaaguacugcuaccugaaccacaccgugaccggcaagaccagccugcccaagugcugccuggugagcaacggcagcuaccugaacgagacccacuucagcgacgacaucgagcagcaggccgacaacaugaucaccgagaugcugcagaaggaguacauggagagacagggcaagaccccccugggccugguggaccuguucguguucagcaccagcuucuaccugaucagcaucuuccugcaccuggugaagauccccacccacagacacguggugggcaagcccugccccaagccccacagacugaaccacaugggcaucugcagcugcggcuucuacaagcagcccggcgugcccgugagauggaagagauga

SEQ ID NO: 24772 - RNA, 1476 nt, Artificial Sequence
  derived and/or modified CDS sequence (opt4) from LASV(Z0947-SLE-2011;Clade IV)__AIT17840__GPCmut3
augggccagaucgugaccuucuuccaggaggugccccacgugaucgaggaggugaugaacaucgugcugaucgcccugagcauccuggccgugcugaagggccuguacaacuucgccaccugcggccuggugggccuggugaccuuccugcugcugugcggcagaagcugcaccaucagccuguacaagggcguguacgagcugcagacccuggagcugaacauggagacccugaacaugaccaugccccugagcugcaccaagaacaacagccaccacuacaucauggugggcaacgagaccggccuggagcugacccugaccaacaccagcaucaucaaccacaaguucugcaaccugagcgacgcccacaagaagaaccuguacgaccacgcccugaugagcaucaucagcaccuuccaccugagcauccccaacuucaaccaguacgaggccaugagcugcgacuucaacggcggcaagaucagcgugcaguacaaccugagccacagcuacgccggcgacgccgccaaccacugcggcaccguggccaacggcgugcugcagaccuucaugagaauggccuggggcggcagcuacaucgcccuggacagcggcagagacagaugggacugcaucaugaccagcuaccaguaccugaucauccagaacaccaccugggaggaccacugccaguucagcagacccagccccaucggcuaccugggccugcugagccagagaaccagagacaucuacaucagcagaagaagaagaggcaccuucaccuggacccugagcgacagcgagggcaaggacacccccggcggcuacugccugaccagauggaugcugaucgaggccgagcugaagugcuucggcaacaccgccguggccaagugcaacgagaagcacgacgaggaguucugcgacaugcugagacuguucgacuucaacaagcaggccauccagagacugaaggcccccgcccagaugagcauccagcugaucaacaaggccgugaacgcccugaucaacgaccagcugaucaugaagaaccaccugagagacaucaugggcauccccuacugcaacuacagcaaguacugcuaccugaaccacaccaccaccggcaagaccagccugcccaagugcugccuggugagcaacggcagcuaccugaacgagacccacuucagcgacgacaucgagcagcaggccgacaacaugaucaccgagaugcugcagaaggaguacauggagagacagggcaagaccccccugggccugguggaccuguucguguucagcaccagcuucuaccugaucagcaucuuccugcaccuggugaagauccccacccacagacacaucgugggcaagcccugccccaagccccacagacugaaccacaugggcaucugcagcugcggccuguacaagcagcccggcgugcccgugaaguggaagagauga

SEQ ID NO: 24773 - RNA, 1476 nt, Artificial Sequence
  derived and/or modified CDS sequence (opt5) from LASV(Josiah;Clade IV)__NP_694870__GPCmut3
augggccagaucgugaccuucuuucaagaggucccccacguuauugaagaggugaugaacaucgugcugauugcccucagcguccuggcugugcuuaaggggcuguacaauuucgccacaugcggacucguuggccuggugacguuucuucugcucugugggagauccugcaccacaucucuguauaaaggagucuacgaacugcagacccucgagcugaacauggaaacacuuaauaugaccaugccucugagcuguacaaagaacaauucccaucacuauaucauggugggcaacgagaccgggcucgagcugacgcuuaccaauacaucuauuaucaaccauaaauucugcaaucugagcgacgcgcacaagaaaaaccucuacgaucaugcucugauguccaucauuucuaccuuucaccugagcaucccgaauuucaaccaguaugaagccauguccugugacuuuaauggaggcaagauuagcguucaguacaaccucucucacuccuaugccggcgaugcugccaaucauugcgggacaguggcuaacggaguccugcaaaccuucaugcggauggccuggggcgggagcuacaucgcgcuugacucuggacgcggcaacugggauuguauuaugacguccuaccaguaucugaucauucagaauacaaccugggaggaccacugccaguuuagcagacccucuccuaucggguaccucggacugcuuucccaacggacacgcgauaucuauauuagcagacggcgcagaggcaccuucaccuggacacuguccgacucugaaggcaaggauacgcccgggggauacugucucacccgguggaugcugaucgaggccgagcugaaaugcuuuggcaacacagcuguggccaaguguaaugaaaaacaugacgaggaguucugcgauaugcuccgccuguuugacuucaacaagcaggcuauucagagacuuaaagccccugcgcagaugagcauccaacugauuaauaaggccgugaacgcucucaucaaugaucagcugaucaugaagaaccaccuucgggacauuauggggauccccuauugcaauuacuccaaauauuguuaccugaaccacaccacaaccggacgcacgagccucccuaagugcugucuggucucuaauggcuccuaccugaacgaaacacauuucagcgacgauauugaacagcaagccgacaauaugaucaccgagaugcuccagaaagaguauauggaaagacaggggaagaccccgcugggacuuguugaucuguuuguguucucuaccagcuuuuaccucauuuccaucuuccugcaccuggugaaaauccccacacaucggcacauugucggcaagucuugcccuaaaccccaucgccuuaaccacaugggcaucuguagcugcgggcucuauaagcagccuggagugcccguuaaguggaaaagauga

SEQ ID NO: 24774 - RNA, 1473 nt, Artificial Sequence
  derived and/or modified CDS sequence (opt5) from LASV(LP;Clade I)__AAF86701__GPCmut3
augggccagaucauuaccuucuuucaagaggugccccacgucaucgaagagguuaugaacauugugcugaucgcccucagccugcuugcuauucugaaggggcucuacaauaucgccacaugcggaaucauuggccugguggcguuccuuuuucugugugggaaauccugcucucucacgcugaagggaggcuaugaacugcagacccucgagcugaacauggaaacacuuaauaugaccaugccucugagcuguaccaaaaacuccucucaucacuacaucagagucgggaaugagacaggacucgagcugacacuuaccaacacgagcauuaucaaucauaaguucugcaaccuguccgacgcucacaaaaagaaucucuaugaucaugcccugaugucuauuaucagcaccuuucaccuguccauuccgaacuucaaucaguacgaagccaugagcugugacuuuaacggcggcaagaucucugugcaguauaaucucucccacagcuacgcuggggaugccgcugagcauugcggaacaguugccaacggcgugcugcaaaccuucaugcggauggcguggggagggcgcuauaucgcccuugacucuggcaaagggaauugggauuguauuaugacauccuaccaguaccugaucauucagaacaccacgugggaagaccacugccaguuuagcagacccucuccuaucggauaucucggccugcuuucccaacggacacgcgauauuuacaucagcagacggcgcagaggcaccuucacauggacccuguccgacucugaggggaacgagacccccggaggcuauugucucacacgguggaugcugaucgaagcugagcugaagugcuuugggaauacggccgucgcuaaauguaacgaaaagcaugaugaggaguucugcgacaugcuccgccuguuugauuucaauaaacaggccauuagacggcuuaaggcgccugcccagaugagcauccagcugauuaacaaggcugugaaugcccucaucaacgaccaacugauuaugaaaaaucaccuucgcgauaucaugggaauccccuacugcaacuauuccaaguacuguuaucugaaucacaccagcucuggcagaacaucccucccuaaaugcugucugauuagcaacgggucuuaccugaaugaaacccaguucagcgacgacaucgagcagcaagcugauaacaugauuacagaaaugcuccagaaggaguacaucgaacggcagggaaaaaccccgcugggccuuguugacauuuuuaucuucuccacgucuuuuuaucugauuagcaucuuccuccaucugaucaagauucccacacaccgccauaucgugggcaaaccuugccccaagccucacagacugaaucauaugggggucuguuccugcggacuuuacaagcaccccggcgugccgaccaaauggaagcgguga

SEQ ID NO: 24775 - RNA, 1473 nt, Artificial Sequence
  derived and/or modified CDS sequence (opt5) from LASV(803213;Clade II)__AAF86703__GPCmut3
augggccagaucauuaccuucuuucaagaggugccccacgucaucgaagagguuaugaacauugugcugaucgcccucagccugcuugcuauucugaaggggaucuacaauguggccacaugcggacucuucggccugaucuccuuucuucugcucugugggagaucuugcagcgucacguauaaaggaguguacgaacugcagacccuggagcucaacauggcgaaucugaacaugacaaugccucuuuccuguaccaagaauaacucucaucacuauauuaugguuggcaaugaaacagggcuggagcucacccugacaaacaccagcaucauuaaucauaaauucugcaaccuuuccgacgcucacaagaaaaaucuguacgaucaugcccucaugucuaucauuagcacguuucaccuguccaucccgaacuucaaucaguaugaggccaugagcugugacuuuaacggaggcaagauuucugugcaguacaaucugucccacagcuucgcugucgaugccgcuaaccauugcggcaccaucgccaacggggugcuccaaacauuuaugcggauggcguggggaggcucuuauaucgcccuggacuccgggaagggaaauugggauuguauuaugaccagcuaccaguaccuuaucauucagaacacaaccugggaagaccacugccaguucucucgccccuccccuaucggcuaucuggggcuccugagccaaagaacgcgggauauuuacaucucccgcagacggcgcggaacauuuaccuggacacuuucugacagcgagggcaaugaagcucccggcggguauugucugaccagauggaugcucaucgaggccgagcugaaaugcuucggaaacaccgcuguugccaaguguaaugaaaaacaugaugaggaauuuugcgacaugcugcgccucuucgauuucaacaagcaggcgauuaaacggcugaagacgccugcccagauguccauccagcuuauuaauaaggcugugaacgcccugaucaaugaccaacucauuaugaaaaaccaccugagagauaucaugggcauccccuacugcaauuauagccgguacuguuaucuuaaccacacagucaccgggaagacaucucugccucgcugcugucucguguccaauggaagcuaccugaacgagacccauuuuucugacgacauugaacagcaggcugauaauaugaucacagagaugcugcaaaaagaguacauggacagacagggcaagaccccgcucgggcugguggaucuuuucgucuuuagcacguccuucuaucugauuucuaucuuucuccaccugguuaaaauucccacacaucggcacaucgugggaaagccuugccccaaaccucaucgccugaaccacaugggcauuuguagcugcggccuuuacaagcaccccggggugccggucaaguggaaaagauga

SEQ ID NO: 24776 - RNA, 1473 nt, Artificial Sequence
  derived and/or modified CDS sequence (opt5) from LASV(GA391;Clade III)__CAA36645__GPCmut3
augggccagaucgugaccuucuuucaagaggucccccacguuauugaagaggugaugaacaucgugcugauugcccucagcauccuggcuauucuuaaggggcuguacaaugucgccacaugcggacucaucggccuggugacguuccuucugcucuccgggagaucuuguagccugaucuauaaaggaaccuacgaacugcagacacucgagcugaacauggaaacccuuaauaugacaaugccucuguccugcaccaagaacaauucucaucacuauauucggguuggcaacgagacagggcucgagcugacccuuacgaauaccagcauccugaaccauaaauuuuguaaucucuccgacgcgcacaagcgcaaccuguacgaucauucucugaugagcauuaucuccacauuccaccucagcauuccgaauuuuaaccaguaugaagcuaugucuugcgacuucaauggaggcaaaaucaccgugcaguacaaccugucccacagcuuugccgucgaugccgcuggccauugugggacacuugccaauggagugcugcaaaccuucaugagaauggcuuggggcgggucuuauauugcccucgacuccggacggggcaacugggauugcaucaugacgagcuaccaguaccugaucauucagaacacaaccugggacgaucacugucaguuuucucgccccuccccuaucggguaucuuggacugcucagccaaagaacacgggacauuuacaucucccgcagacggcgcggcaccuucaccuggacacugucugauagcgagggcaaugaaacgcccgggggauauugccugaccagauggaugcucauugaggcggagcugaaguguuuuggcaacacagccguugcuaagugcaaugaaaaacaugacgaggaguucugugauaugcuucggcuguuugacuucaacaagcaggccauccgcagacucaaaaccccugcucagauguccauccagcugauuaauaaggccgugaacgcgcuuaucaaugaucaacugauuaugaaaaaccaccuccgggacaucauggggauucccuacugcaauuauagccgcuacugcuaucugaaccacacaucuaccggaaagacgucccugccuagauguugccucaucagcaauggcucuuaccugaacgaaacaaaguucagcgacgauaucgaacagcaggccgacaauaugauuaccgagaugcuucaaaaagaguacaucgaucggcaggggaagaccccgcugggacucgucgaccuguuuguguucuccacaucuuuuuaucugauuagcaucuuccuucaucucgugaaaauucccacccacagacauaucgucggcaagccuugucccaaaccucaccgccugaaccauaugggcauuugcuccugugggcuguacaagcagcccggaguuccggugcgguggaaaagauga

SEQ ID NO: 24777 - RNA, 1476 nt, Artificial Sequence
  derived and/or modified CDS sequence (opt5) from LASV(AV;Clade V)__CCA30314__GPCmut3
augggccagaucgugaccuucuuucaagaggucccccacguuauugaagaggugaugaacaucgugcugauugcccucagcauccuggcuguccuuaaggggcuguacaauauugccacaugcggacucaucggccugaucacguuccuucugcucugugggagauccugcucuagcaaccuguauaaaggaguguacgaacugcagucccucgaccugaauauggagacccuuaacaugacaaugccucugucuuguaccaagaauaacagccaucacuauauucggguuggcaaugauacagggcucgaacugacccuuacaaacaccuccauccugaaucauaaauuuugcaaccucucugacgcgcacaagaaagaucuguacgaccaugcucugaugagcauuaucuccacguuccaccucagcauuccgaauuuuaaccaguaugaggccaugucuugugauuucaauggaggcaagaucuccgugcaguacaaccugagccacucuuaugccauugacgcugccaaucauugcggcaccgucgcuaacgggauccuucaaacauuuaugcgcauggccuggggaggcuccuacaucgcgcuggauagcgggagaggaaacugggacuguauuaugaccucuuaccaguaucucaucauucagaauacaaccugggagaaccacugccaguucucccggcccagcccuaucggcuaccuggggcuucugucccaacgcacgagagauauuuauaucucucggcgcagacggggaacauuuaccuggacacucagcgacuccgaaggcaaugccacccccggcggguacugucugacccgcuggaugcugaucgaggcugaacucaagugcuucggaaacacagccguggcuaaauguaaugagaagcaugaugaggaauuuugcgacaugcugagacuuuucgauuuuaacaaacaggccauuagccggcugaagucuccugcgcagauguccauccagcucauuaauaaagccguuaacgcucugaucaaugaccaacuuauuaugaagaaccaucugcgcgacaucaugggcauccccuauugcaauuacagcaaguauuguuaccucaaccacacgauuaccgggaaaacaucucugccuaagugcugucuggugagcaauggauccuaccucaacgagacccacuucucugaugacaucgaacagcaggccgauaauaugauuacagagaugcugcaaaaagaauauauggagagacagggcaagaccccgcuugggcuggucgaccucuucguguuuagcacguccuucuaccugaucagcauuuuucugcggcuugugaaaauccccacacaccgccauauugucggaaagccuugccccaaaccucacagacucaaccauaugggcaucuguucuugcggccuguauaagcagcccgggguuccggugcgguggaagagauga

SEQ ID NO: 24778 - RNA, 1473 nt, Artificial Sequence
  derived and/or modified CDS sequence (opt5) from LASV(Togo/2016/7082;Clade VI)__AMR44577__GPCmut3
augggccagaucauuaccuucuuucaagaggugccccacgucaucgaagagguuaugaacauugugcugaucgcccucagccugcuugcuauucugaaggggguguacaaugucgccacaugcggaaucaucggccucgugacguuccuguuucuuugugggagauccugcucucugauuuauaaaggaagcuacgaacuccagacccuggagcugaacauggaaacacucaauaugaccaugccucuguccuguacaaagaacucuagccaucacuauauccggguuggcaaugagaccgggcuugagcugacacucaccaacacguccauuaucaaucauaaauucugcaaccugucugacgcgcacaagcgcaaucuuuacgaucaugcucugaugagcauucucuccaccuuucaccugagcaucccgaacuucaaucaguaugaagccaugucuugugacuuuaacggaggcaaaauuuccgugcaguacaaucugagccacgccuaugcugucgaugccgcugagcauugcggcacaguggccaacgggguucuccaaaccuucaugagaauggcguggggaggcucuuacaucgcccuggacuccgggcggggaaauugggauuguaucaugacaagcuaccaguaucuuauuauccagaacaccacgugggaagaccacugccaguuuucucgccccuccccuauuggcuaccuggggcuccugagccaaagaacacgggauaucuauauuucccgcagacggcgcggaaccuucacauggacccuuucugacagcgagggcaacgagacccccggcggguacugucugacaagauggaugcucaucgaagcugagcugaagugcuuuggaaauacggccguggcuaaguguaacgaaaaacaugaugaggaguucugcgacaugcugcggcucuuugauuucaauaagcaggccauccagcgccugaaauccccugcgcagaugagcauucaacuuaucaacaaggccgucaaugcucugauuaacgaccagcucaucaugaaaaaucaccugagagauaugaugggcauucccuauugcaacuacucuaaguauuguuaccuuaaucacaccuccagcgggcggacaucucugccuaagugcugucucgugagcaacggauccuaccugaaugaaacccauuucucugacgacaucgagcagcaagccgauaacaugaucacagaaaugcugcagaaagaguauauugaccgccagggcaagaccccgcucgggcugguggaucuuuuugucuucagcacguccuuuuaccugaucagcauuuuccuccaccugaucaaaauucccacacauagacacaucguuggaaagccuugccccaaaccucaucggcugaaucacaugggcauuuguucuugcggccuuuauaagcagcccggggugccgaccagauggaaacgcuga

SEQ ID NO: 24779 - RNA, 1473 nt, Artificial Sequence
  derived and/or modified CDS sequence (opt5) from LASV(KAK-428;Clade n.d. (VII))__ANH09740__GPCmut3
augggccagaucgugaccuucuuucaagaggucccccacguuauugaagaggugaugaacaucgugcugauugcccucagccugcuugcuauccugaaggggcucuacaauuucgccacaugcggagucauuggccugaucacguuucuucugcucugugggagauccugcucugcgaccuauaaaggacaguacgaacugcagacacuggagcucaacauggaaagccugaauaugaccaugccucuuuccuguacaaagaacaauucucaucacuauauccgggcuggcaacaauaccgggcuggagcucacacugaccaacacgagcauuaucucccauaaauucugcaaucuuucugacgcccacaagaaaaaccuguacgaucauacccucaugagcauuaucacaaccuuucaccuguccauuccgaauuucaaccaguaugaggccaugagcugugacuuuaauggaggcaagaucucuauucaauacaaccugucccacagcuaugcuggcgaugccgcucagcauugcgggacaguggccaauggaguucuccagaccuucaugcgcauggcguggggcgggucuuaccuggcccuugacuccggaagacggggcugggauuguaucaucagcucuuaccaguaucugauuauccaaaacacgacaugggacgaucacugccaguuuucccgccccagcccuauuggguaccucggauucgugucccagaagaccagagacaucuauauuucucggcgcagacggggcacauuuaccuggacccugagcgauuccgaaggccaugacaugcccgggggauacugucuuacacgcuggaugcugaucgaggcugaucucaaaugcuucggcaacacggccgucgcuaaguguaaugaaaaacacgacgaggaguuuugcgauauguggagacuguucgacuucaacaagcaggccauccaacggcugaaagcgccugcccagaugaauauucagcucaucaacaaggcugugaaugcccugauuaacgaccaacuuaugaugaagaaucaucugcgcgauaucauggggauucccuauugcaacuacagcaaauuuuguuaucucaauaacaccacaaccggaagaacaucucugccucggugcugucuuaucuccaauggcagcuaccugaacgaaacccacuucucugacgauaucgagcagcaggcugacaauaugauuacggaaaugcuccagaaggaguacauggaucgccaagggaaaacaccgcugggacugguugaccucuuuguguucagcaccuccuuuuaucugaucaccauuuuccuucaccuggucaagauccccacacauagacacauugugggcaaaccuugccccaagccucaucggcucaaccacaugggcaucuguucuugcgggcuguacaaacagcccggagugccggucagauggaagcgcuga

SEQ ID NO: 24780 - RNA, 1473 nt, Artificial Sequence; identical to SEQ ID NO: 24774
  derived and/or modified CDS sequence (opt5) from LASV(Pinneo-NIG-1969;Clade I)__AIT17836__GPCmut3

SEQ ID NO: 24781 - RNA, 1473 nt, Artificial Sequence
  derived and/or modified CDS sequence (opt5) from LASV(ISTH0009-NIG-2011;Clade II)__AIT17404__GPCmut3
augggccagaucauuaccuucuuucaagaggugccccacgucaucgaagagguuaugaacauugugcugaucgcccucagccugcuugcuauucugaaggggaucuacaauguggccacaugcggacucuucggccuggucuccuuucuucugcucugugggagaucuugcagcacgaccuauaaaggaguguacgaacugcagacacuggagcucgacauggcgucccugaacaugaccaugccucuuucuuguacaaagaauaacagccaucacuauaucaugguuggcaaugaaaccgggcuggagcucacacugaccaacacguccauuaucaaucauaaauucugcaaccuuucugaugcucacaagaaaaaucuguacgaccaugcccucaugagcauuaucuccaccuuucaccugagcauuccgaacuucaaucaguaugaggccaugucuugugauuuuaacggaggcaagaucuccgugcaguacaaucugagccacgcuuaugccgucgacgcugccaaccauugcggcacaauugcgaauggggugcuccaaaccuucaugcggauggccuggggaggcucuuacaucgcucuggauuccgggaagggaagcugggacuguaucaugacaucuuaccaguaucuuauuauccagaacaccacgugggaagaucacugccaguuuucccgccccagcccuauuggcuaccuggggcuccugucccaaagaacacgggacaucuauauuucucgcagacggcgcggaaccuucacauggacccuuagcgauuccgagggcaacgaaacccccggcggguacugucugacaagauggaugcucaucgaggccgagcugaaaugcuuuggaaauacggcuguugccaaguguaacgaaaaacaugacgaggaguucugcgauaugcugcggcucuuugacuucaauaagcaggcgauccgcagacugaaaaccccugcccagaugagcauucagcuuaucaacaaggcugugaaugcccugauuaacgaucaacucaucaugaagaaucaucugcgggacauuaugggcauccccuauugcaacuacucuaaauauuguuaccuuaaucacacagucaccgggaagacaucccugccucgcugcugucucgugagcaacggaucuuaccugaaugaaacccacuucagcgacgauaucgaacagcaggcugacaacaugauuacggagcugcuccaaaaagaguauauggauagacagggcaagacaccgcuggggcuuguggaccuguuugucuucuccaccucuuuuuaccucaucagcauuuuccugcaccugaucaaaauucccacccaucggcacaucacaggaaagccuugccccaaaccucaucgccuuaaucacaugggcauuuguuccugcggccucuauaagcaccccgggguuccggugaaguggaaaagauga

SEQ ID NO: 24782 - RNA, 1473 nt, Artificial Sequence
  derived and/or modified CDS sequence (opt5) from LASV(ISTH2010-NIG-2012;Clade II)__AIT17482__GPCmut3
augggccagaucauuaccuucuuucaagaggugccccacgucaucgaagagguuaugaacauugugcugaucgcccucagccugcuugcuauucugaaggggaucuacaauguggccacaugcggacucuucggccuggucuccuuucuucugcucugugggagaucuugcagcacgaccuauaaaggaguguacgaacugcagacacuggagcucgacauggcgucccugaacaugaccaugccucuuucuuguacaaagaauaacagccaucacuauaucaugguuggcaaugaaaccgggcuggagcucacacugaccaacacguccauuaucaaucauaaauucugcaaccuuucugaugcucacaagaaaaaucuguacgaccaugcccucaugagcauuaucuccaccuuucaccugagcauuccgaacuucaaucaguaugaggccaugucuugugauuuuaacggaggcaagaucuccgugcaguacaaucugagccacgcuuaugccgucgacgcugccaaccauugcggcacaauugcgaauggggugcuccaaaccuucaugcggauggccuggggaggcucuuacaucgcucuggauuccgggaagggaagcugggacuguaucaugacaucuuaccaguaucuuauuauccagaacauuaccugggaagaucacugccaguuuucccgccccagcccuaucggcuaccuggggcuccugucccaaagaacgcgggacauuuauaucucucgcagacggcgcggaacauucaccuggacacuuagcgauuccgagggcaacgaaacccccggcggguacugucugaccagauggaugcucaucgaggccgagcugaaaugcuuuggaaauacagcuguugccaaguguaacgaaaaacaugacgaggaguucugcgauaugcugcggcucuuugacuucaauaagcaggcgauucgcagacugaaaacgccugcccagaugagcauccagcuuauuaacaaggcugugaaugcccugaucaacgaucaacucauuaugaagaaucaucugcgggacaucaugggcauccccuauugcaacuacucuaaauauuguuaccuuaaucacaccgucacagggaagaccucccugccucgcugcugucucgugagcaacggaucuuaccugaaugaaacacacuucagcgacgauauugaacagcaggcugacaacaugaucaccgagcugcuccaaaaagaguauauugauagacagggcaagacgccgcuggggcuuguggaccuguuugucuucuccacaucuuuuuaccucaucagcauuuuccugcaccugguuaaaauccccacccaucggcacguggugggaaagccuugccccaaaccucaucgccuuaaucacaugggcauuuguuccugcggccucuauaagcaccccggggucccggugaaguggaaaagauga

SEQ ID NO: 24783 - RNA, 1473 nt, Artificial Sequence
  derived and/or modified CDS sequence (opt5) from LASV(Lassa virus/H.sapiens-wt/NGA/2015/ISTH_0543;Clade II)__AVO03639__GPCmut3
augggccagaucauuaccuucuuucaagaggugccccacgucaucgaagagguuaugaacauugugcugaucgcccucagccugcuugcuauucugaaggggaucuacaauguggccacaugcggacucuucggccuggucuccuuucuucugcucugugggagaucuugcagcacgaccuauaaaggaguguacgaacugcagacacuggagcucgacauggcgaaccugaauaugaccaugccucuuuccuguacaaagaacaauucucaucacuauaucaugguuggcaacgaaaccgggcuggagcucacacugaccaauacgagcauuaucaaccauaaauucugcaaucuuuccgaugcucacaagaaaaaccuguacgaccaugcccucaugucuauuaucagcaccuuucaccuguccauuccgaauuucaaccaguaugaggccaugagcugugauuuuaauggaggcaagaucucugugcaguacaaccugucccacacauaugcugucgacgccgcuaaucauugcggcaccauugccaacggggugcuccaaacauucaugcggauggcguggggaggcagcuacaucgcccuggauucugggaagggauccugggacuguaucaugaccagcuaccaguaucuuguuauucagaacacgacaugggaagaucacugccaguuuucucgccccuccccuaucggcuaccuggggcuccugagccaaagaacccgggacauuuauaucucccgcagacggcgcggaacauucaccuggacccuuucugauagcgagggcaaugaaacacccggcggguacugucugacgagauggaugcucauugaggcugagcugaaaugcuuuggaaacaccgccguggcuaaguguaaugaaaaacaugacgaggaguucugcgauaugcugcggcucuuugacuucaacaagcaggccauccgcagacugaaaaccccugcgcagauguccauccagcuuauuaauaaggccgucaacgcucugaucaaugaucaacucauuaugaagaaccaucugcgggacaucaugggcauucccuauugcaauuacagcaaauauuguuaccuuaaccacacagugacagggaagaccucucugccucgcugcugucucguguccaauggaagcuaccugaacgaaacgcacuucucugacgauaucgaacagcaggccgacaauaugaucacagagcugcuccaaaaagaguauauugauagacagggcaagaccccgcuggggcuugucgaccuguuuguuuucagcaccuccuuuuaccucaucucuauuuuccugcaccuggugaaaauccccacacaucggcacauuaccggaaagccuugccccaaaccucaucgccuuaaccacaugggcaucuguagcugcggccucuauaagcaccccggggugccggucaaguggaaaagauga

SEQ ID NO: 24784 - RNA, 1473 nt, Artificial Sequence
  derived and/or modified CDS sequence (opt5) from LASV(Lassa virus/H.sapiens-wt/NGA/2016/ISTH_0009;Clade II)__AVO03571__GPCmut3
augggccagaucauuaccuucuuucaagaggugccccacgucaucgaagagguuaugaacauugugcugaucgcccucagccugcuugcuauucugaaggggaucuacaauguggccacaugcggacuccugggccuugucuccuuccugcuccugugugggagaucuugcagcacgaccuauaaaggaguguacgaacugcagacacucgagcuggacauggcgucccuuaacaugaccaugccucugucuuguacaaagaauaacagccaucacuauaucaugguuggcaaugaaaccgggcucgagcugacacuuaccaacacguccauuaucaaucauaaauuuugcaaccugucugaugcucacaagaaaaaucucuacgaccaugcccugaugagcauuaucuccaccuuccaccugagcauuccgaacuuuaaucaguaugaggccaugucuugugauuucaacggaggccggaucuccgugcaguacaaucucagccacucuuaugcugucgacgccgcuaaccauugcggcacaauugccaauggggugcugcaaaccuuuaugcgcauggcguggggaggcuccuacaucgcccuugauagcgggaagggaucuugggacuguaucaugacauccuaccaguaucugauuauccagaacaccacgugggaagaucacugccaguucagcagacccuccccuauuggcuaccucgggcugcuuucucaacggacacgcgacaucuauauuagcagacggcgcagaggaaccuuuacauggacccuguccgauagcgagggcaacgaaacccccggcggguacugucucacacgguggaugcugaucgaggcugagcugaagugcuucggaaauacggccguugcuaaauguaacgaaaagcaugacgaggaauuuugcgauaugcuccgccuguucgacuuuaauaaacaggccaucagacggcuuaagaccccugcgcagaugucuauucagcugaucaacaaagccgugaaugcucucauuaacgaucaacugaucaugaagaaucaccuucgcgacauuaugggcauccccuauugcaacuacuccaaguauuguuaccugaaucacacagucaccgggaaaacaagccucccuagaugcugucuggugucuaacggaagcuaccugaaugagacccauuucuccgacgauaucgaacagcaggccgacaacaugauuacggagcuccugcaaaaggaguauaucgaucggcagggcaaaacaccgcuugggcugguggaccucuucgucuuuucuaccagcuucuaccugauuuccaucuuucugcaccuuguuaagauucccacccaucgccacaucacaggaaaaccuugccccaagccucauagacucaaucacaugggcauuuguagcugcggccuguauaaccaccccggggugccggugaaauggaagcgguga

SEQ ID NO: 24785 - RNA, 1473 nt, Artificial Sequence
  derived and/or modified CDS sequence (opt5) from LASV(Lassa virus/H.sapiens-wt/NGA/2016/ISTH_0017;Clade II)__AVO03567__GPCmut3
augggccagaucauuaccuucuuucaagaggugccccacgucaucgaagagguuaugaacauugugcugaucgcccucagccugcuugcuauucugaaggggaucuacaauguggccacaugcggacucuucggccuggucuccuuucuucugcucugugggagaucuugcagcacgaccuauaaaggaguguacgaacugcagacacuggagcucgacauggcgucccugaacaugaccaugccucuuucuuguacaaagaauaacagccaucacuauaucaugguuggcaaugaaaccgggcuggagcucacacugaccaacacguccauuaucaaucauaaauucugcaaccuuucugaugcucacaagaaaaaucuguacgaccaugcccucaugagcauuaucuccaccuuucaccugagcauuccgaacuucaaucaguaugaggccaugucuugugauuuuaacggaggcaagaucuccgugcaguacaaucugagccacacauaugcuauugacgccgcuaaccauugcggcaccaucgccaaugggguccuccaaacauucaugcggauggcguggggaggcucuuacaucgcccuggauuccgggaagggaagcugggacuguauuaugaccucuuaccaguaucuuaucauucagaacacgacaugggaagaucacugccaguuuucccgccccagcccuaucggcuaccuggggcuccugucccaaagaacccgggacauuuauaucucucgcagacggcgcggaacauucaccuggacccuuagcgauuccgagggcaacgaaacacccggcggguacugucugacgagauggaugcucaucgaggcugagcugaaaugcuuuggaaauaccgccguggcuaaguguaacgaaaaacaugacgaggaguucugcgauaugcugcggcucuuugacuucaauaagcaggccauucgcagacugaaaaccccugcgcagaugagcauccagcuuauuaacaaggccguuaaugcucugaucaacgaucaacucauuaugaagaaucaucugcgggacaucaugggcauccccuauugcaacuacucuaaauauuguuaccuuaaucacacagugacagggaagaccucccugccucgcugcugucucgucagcaacggaucuuaccugaaugaaacgcacuucagcgacgauauugaacagcaggccgacaacaugaucacagagcugcuccaaaaagaguauauggauagacagggcaagaccccgcuggggcuuguggaccuguuuguguucuccaccucuuuuuaccucauuagcaucuuccugcaccugguccggauucccacacaucgccacguuaucggaaaaccuugccccaagccucauagacuuaaucacaugggcauuuguuccugcggccucuauaaacaccccggggugccggugaaguggaagcgguga

SEQ ID NO: 24786 - RNA, 1473 nt, Artificial Sequence
  derived and/or modified CDS sequence (opt5) from LASV(Lassa virus/H.sapiens-wt/NGA/2018/ISTH_0959;Clade II)__AVV65099__GPCmut3
augggccagaucauuaccuucuuucaagaggugccccacgucaucgaagagguuaugaacauugugcugaucgcccucagccugcuugcuauucugaaggggaucuacaauguggucacaugcggacucuucggccugguguccuuucuucugcucugugggagaucuugcagcacgaccuauaaaggaguuuacgaacugcagacacuggagcucgacauggccucccugaacaugaccaugccucuuucuuguacaaagaauaacagccaucacuauaucauggugggcaaugaaaccgggcuggagcucacacugaccaacacguccauuaucaaucauaaauucugcaaccuuucugaugcgcacaagaaaaaucuguacgaccaugcucucaugagcauuaucuccaccuuucaccugagcauuccgaacuucaaucaguaugaggccaugucuugugauuuuaacggaggcaagaucuccguccaguacaaucugagccacgccuaugcuauugacgccgcuaaccauugcggcacaaucgccaauggggugcuccaaaccuucaugcggauggcguggggaggcucuuacaucgcccuggauuccgggaagggaagcugggacuguauuaugacaucuuaccaguaucuuaucauucagaacaccacgugggaagaucacugccaguuuucccgccccagcccuaucggcuaccuggggcuccugucccaaagaacacgggacauuuauaucucucgcagacggcgcggaaccuucacauggacccuuagcgauuccgagggcaacgaaacccccggcggguacugucugacaagauggaugcucaucgaggcugagcugaaaugcuuuggaaauacggccguugcuaaguguaacgaaaaacaugacgaggaguucugcgauaugcugcggcucuuugacuucaauaagcaggccauucgcagacugaaaaccccugcgcagaugagcauccagcuuauuaacaaggccgugaaugcucugaucaacgaucaacucauuaugaagaaucaucugcgggacaucaugggcauccccuauugcaacuacucuaaauauuguuaccuuaaucacacagucaccgggaagacaucccugccucgcugcugucucgugagcaacggaucuuaccugaaugaaacccacuucagcgacgauauugaacagcaggccgacaacaugaucacggagcugcuccaaaaagaguauauugauagacagggcaagacaccgcuggggcuuguggaccuguuugucuucuccaccucuuuuuaccucaucagcauuuuccugcaccugguuaaaauccccacccaucggcacgugauuggaaagccuugccccaaaccucaucgccuuaaucacaugggcaucuguuccugcggccucuauaagcaccccggggugccggucaaguggaaaagauga

SEQ ID NO: 24787 - RNA, 1473 nt, Artificial Sequence
  derived and/or modified CDS sequence (opt5) from LASV(LASV003-NIG-2008;Clade II)__AIT17580__GPCmut3
augggccagaucauuaccuucuuucaagaggugccccacgucaucgaagagguuaugaacauugugcugaucgcccucagccugcuugcuauucugaaggggaucuacaauguggccacaugcggacucuucggccuggucuccuuucuucugcucugugggagaucuugcagcacgaccuauaaaggaguguacgaacugcagacacuggagcucgacauggcgucccugaacaugaccaugccucuuucuuguacaaagaauaacagccaucacuauaucaugguuggcaaugaaaccgggcuggagcucacacugaccaacacguccauuaucaaucauaaauucugcaaccuuucugaugcucacaagaaaaaucuguacgaccaugcccucaugagcauuaucuccaccuuucaccugagcauuccgaacuucaaucaguaugaggccaugucuugugauuuuaacggaggcaagaucuccgugcaguacaaucugagccacacauaugcugucgacgccgcuaaccauugcggcaccauugccaauggggugcuccaaacauucaugcggauggcguggggaggcucuuacaucgcccuggauuccgggaagggaagcugggacuguaucaugaccucuuaccaguaucuuauuauccagaacacgacaugggaagaucacugccaguuuucccgccccagcccuauuggcuaccuggggcuccugucccaaagaacccgggacaucuauauuucucgcagacggcgcggaacauucaccuggacccuuagcgauuccgagagcaacgaaacacccggcggcuacugucugacgagauggaugcucaucgaggcugagcugaaaugcuuugggaauaccgccguugcuaaguguaacgaaaaacaugacgaggaguucugcgauaugcugcggcucuuugacuucaauaagcaggccauccgcagacugaaagcgccugcccagaugucuauucagcuuaucaacaaggcugugaaugcccugauuaacgaucaacucaucaugaagaaucaucugcgggacauuaugggaauccccuauugcaacuacuccaaauauuguuaccuuaaucacacagucaccggccgcacaagccugccuagaugcugucucgugucuaacgggagcuaccugaaugaaacccacuucuccgacgauaucgaacagcaggcugacaacaugauuacggagcugcuccaaaaggaguauauggaucggcagggaaaaacaccgcugggccuuguggaccuguuugucuucucuaccagcuuuuaccucaucuccauuuuccugcaccugguuaagauccccacccaucgccacgugauugggaaaccuugccccaagccucauagacuuaaucacaugggaaucuguagcugcggccucuauaaacaccccggcgugccggucaaguggaagcgguga

SEQ ID NO: 24788 - RNA, 1473 nt, Artificial Sequence
  derived and/or modified CDS sequence (opt5) from LASV(LASV035-NIG-2009;Clade II)__AIT17588__GPCmut3
augggccagaucauuaccuucuuucaagaggugccccacgucaucgaagagguuaugaacauugugcugaucgcccucagccugcuugcuauucugaaggggaucuacaauguggccacaugcggacucuucggccuggucuccuuucuucugcucugugggagaucuugcagcacgaccuauaaaggaguguacgaacugcagacacuggagcucgacauggcgucccugaacaugaccaugccucuuucuuguacaaagaauaacagccaucacuauaucaugguuggcaaugaaaccgggcuggagcucacacugaccaacacguccauuaucaaucauaaauucugcaaccuuucugaugcucacaagaaaaaucuguacgaccaugcccucaugagcauuaucuccaccuuucaccugagcauuccgaacuucaaucaguaugaggccaugucuugugauuuuaacggaggcaagaucuccgugcaguacaaucugagccacgcuuaugccgucgacgcugccaaccauugcggcacaauugcgaauggggugcuccaaaccuucaugcggauggccuggggaggcucuuacaucgcucuggauuccgggaagggaagcugggacuguaucaugacaucuuaccaguaucuuauuauccagaacaccacgugggaagaucacugccaguuuucccgccccagcccuauuggcuaccuggggcuccugucccaaagaacacgggacaucuauauuucucgcagacggcgcggaaccuucacauggacccuuagcgauuccgagggcaacgaaacccccggcggguacugucugacaagauggaugcucaucgaggccgagcugaaaugcuuuggaaauacggcuguugccaaguguaacgaaaaacaugacgaggaguucugcgauaugcugcggcucuuugacuucaauaagcaggcgauccgcagacugaaagccccugcucagaugagcauucagcuuaucaacaaggccgugaaugcucugauuaacgaucaacucaucaugaagaaucaucugcgggacauuaugggcauccccuauugcaacuacucuaaauauuguuaccuuaaucacaccgucacagggaagaccucccugccucgcugcugucucgugagcaacggaucuuaccugaaugaaacacacuucagcgacgauaucgaacagcaggccgacaacaugauuaccgagcugcuccaaaaagaguauaucgauagacagggcaagacgccgcuggggcuuguggaccuguuugucuucuccacaucuuuuuaccucauuagcaucuuccugcaccugguuaaaauucccacccaucggcacgugaucggaaagccuugccccaaaccucaucgccuuaaucacaugggcauuuguuccugcggccucuauaagcaccccggggugccggucaaguggaaaagauga

SEQ ID NO: 24789 - RNA, 1473 nt, Artificial Sequence
  derived and/or modified CDS sequence (opt5) from LASV(LASV1000-NIG-2009;Clade II)__AIT17782__GPCmut3
augggccagaucauuaccuucuuucaagaggugccccacgucaucgaagagguuaugaacauugugcugaucgcccucagccugcuugcuauucugaaggggaucuacaauguggccacaugcggacucuucggccuggucuccuuucuucugcucugugggagaucuugcagcacgaccuauaaaggaguguacgaacugcagacacuggagcucgacauggcgucccugaacaugaccaugccucuuucuuguacaaagaauaacagccaucacuauaucaugguuggcaaugaaaccgggcuggagcucacacugaccaacacguccauuaucaaucauaaauucugcaaccuuucugaugcucacaagaaaaaucuguacgaccaugcccucaugagcauuaucuccaccuuucaccugagcauuccgaacuucaaucaguaugaggccaugucuugugauuuuaacggaggcaagaucuccgugcaguacaaucugagccacacauaugcugucgacgccgcuaaccauugcggcaccauugccaauggggugcuccaaacauucaugcggauggcguggggaggcucuuacaucgcccuggauuccgggaagggaagcugggacuguaucaugaccucuuaccaguaucuuauuauccagaacacgacaugggaagaucacugccaguuuucccgccccagcccuauuggcuaccuggggcuccugucccaaagaacccgggacaucuauauuucucgcagacggcgcggaacauucaccuggacccuuagcgauuccgagggcaacgaaacacccggcggguacugucugacgagauggaugcucaucgaggcugagcugaaaugcuuuggaaauaccgccguugcuaaguguaacgaaaaacaugacgaggaguucugcgauaugcugcggcucuuugacuucaauaagcaggccaucaaacgccugaagaccccugcgcagaugagcauucagcuuaucaacaaggccgugaaugcucugauuaacgaucaacucaucaugaaaaaucaccugagagacauuaugggcauccccuauugcaacuacucuaaguauuguuaccuuaaucacacagucacagggaaaaccucccugccucggugcugucucgugagcaacggaucuuaccugaaugaaacgcauuucagcgacgauaucgaacagcaggccgacaacaugauuacagagcugcuccaaaaggaguauaucgaucgccagggcaaaaccccgcuggggcuuguggaccuguuugucuucuccaccucuuuuuaccucauuagcaucuuccugcaccugguuaagauucccacacauagacacguggugggaaaaccuugccccaagccucaucggcuuaaucacaugggcaucuguuccugcggccucuauaagcaccccggggucccggugaaauggaagcgcuga

SEQ ID NO: 24790 - RNA, 1473 nt, Artificial Sequence
  derived and/or modified CDS sequence (opt5) from LASV(LASV221-NIG-2010;Clade II)__AIT17624__GPCmut3
augggccagaucauuaccuucuuucaagaggugccccacgucaucgaagagguuaugaacauugugcugaucgcccucagccugcuugcuauucugaaggggaucuacaauguggccacaugcggacucuucggccuggucuccuuucuucugcucugugggagaucuugcagcacgaccuauaaaggaguguacgaacugcagacacuggagcucgacauggcgucccugaacaugaccaugccucuuucuuguacaaagaauaacagccaucacuauaucaugguuggcaaugaaaccgggcuggagcucacacugaccaacacguccauuaucaaucauaaauucugcaaccuuucugaugcucacaagaaaaaucuguacgaccaugcccucaugagcauuaucuccaccuuucaccugagcauuccgaacuucaaucaguaugaggccaugucuugugauuuuaacggaggcaagaucuccgugcaguacaaucugagccacacauaugcuauugacgccgcuaaccauugcggcaccaucgccaaugggguccuccaaacauucaugcggauggcguggggaggcucuuacaucgcccuggauuccgggaagggaagcugggacuguauuaugaccucuuaccaguaucuuaucauucagaacacgacaugggaagaucacugccaguuuucccgccccagcccuaucggcuaccuggggcuccugucccaaagaacccgggacauuuauaucucucgcagacggcgcggaacauucaccuggacccuuagcgauuccgagggcaacgaaacacccggcggguacugucugacgagauggaugcucaucgaggcugagcugaaaugcuuuggaaauaccgccguggcuaaguguaacgaaaaacaugacgaggaguucugcgauaugcugcggcucuuugacuucaauaagcaggccauucgcagacugaaaaccccugcgcagaugagcauccagcuuauuaacaaggccguuaaugcucugaucaacgaucaacucauuaugaagaaucaucugcgggacaucaugggcauccccuauugcaacuacucuaaauauuguuaccuuaaucacacagugacagggaagaccucccugccucgcugcugucucgucagcaacggaucuuaccugaaugaaacgcacuucagcgacgauauugaacagcaggccgacaacaugaucacagagaugcugcaaaaagaguauauggauagacagggcaagaccccgcucgggcugguggaccuuuuuguguucuccaccucuuuuuaccugauuagcaucuuccuccaccuggucaaaauucccacacaucggcacguuaucggaaagccuugccccaaaccucaucgccugaaucacaugggcauuuguuccugcggccuuuauaagcaccccggggugccggugaaguggaaaagauga

SEQ ID NO: 24791 - RNA, 1473 nt, Artificial Sequence
  derived and/or modified CDS sequence (opt5) from LASV(LASV237-NIG-2010;Clade II)__AIT17638__GPCmut3
augggccagaucauuaccuucuuucaagaggugccccacgucaucgaagagguuaugaacauugugcugaucgcccucagccugcuugcuauucugaaggggaucuacaauguggccacaugcggacucuucggccuggucuccuuucuucugcucugugggagaucuugcagcacgaccuauaaaggaguguacgaacugcagacacuggagcucgacauggcgucccugaacaugaccaugccucuuucuuguacaaagaauaacagccaucacuauaucaugguuggcaaugaaaccgggcuggagcucacacugaccaacacguccauuaucaaucauaaauucugcaaccuuucugaugcucacaagaaagaccuguacgaucaugcccucaugagcauuaucuccaccuuucaccugagcauuccgaauuucaaccaguaugaggccaugucuugugacuuuaauggaggcaagaucuccgugcaguacaaccugagccacacauaugcugucgaugccgcuaaucauugcggcaccauugccaacggggugcuccaaacauucaugcggauggcguggggaggcucuuacaucgcccuggacuccgggaagggaagcugggauuguaucaugaccucuuaccaguaucuuauuauccagaauacgacaugggaagaccacugccaguuuucccgccccagcccuauuggcuaccuggggcuccugucccaaagaacccgggauaucuauauuucucgcagacggcgcggaacauucaccuggacccuuagcgacuccgagggcaacgaaacacccggcggguacugucugacgagauggaugcucaucgaggcugagcugaaaugcuuuggaaacaccgccguugcuaaguguaaugaaaaacaugaugaggaguucugcgacaugcugcggcucuuugauuucaacaagcaggccauccgcagacugaaaaccccugcgcagaugagcauucagcuuaucaauaaggccgugaacgcucugauuaaugaccaacucaucaugaagaaccaucugcgggacauuaugggcauccccuauugcaauuacucuaaauauuguuaccuuaaccacacagucacagggaagaccucccugccucgcugcugucucgugagcaauggaucuuaccugaacgaaacgcacuucagcgaugacaucgaacagcaggccgauaauaugauuacagagcugcuccaaaaagaguauauggacagacagggcaagaccccgcuggggcuuguggaucuguuugucuucuccaccucuuuuuaccucaucagcauuuuccugcaccugaucaaaauucccacacaucggcacaucaccggaaagccuugccccaaaccucaucgccuuaaccacaugggcauuuguuccugcggccucuauaagcaccccgggguuccggugaaguggaaaagauga

SEQ ID NO: 24792 - RNA, 1473 nt, Artificial Sequence
  derived and/or modified CDS sequence (opt5) from LASV(LASV253-NIG-2011;Clade II)__AIT17670__GPCmut3
augggccagaucauuaccuucuuucaagaggugccccacgucaucgaagagguuaugaacauugugcugaucgcccucagccugcuugcuauucugaaggggaucuacaauguggccacaugcggacucuucggccuggucuccuuucuucugcucugugggagaucuugcagcacgaccuauaaaggaguguacgaacugcagacacuggagcucgacauggcgucccugaacaugaccaugccucuuucuuguacaaagaauaacagccaucacuauaucaugguuggcaaugaaaccgggcuggagcucacacugaccaacacguccauuaucaaucauaaauucugcaaccuuucugaugcucacaagaaaaaucuguacgaccaugcccucaugagcauuaucuccaccuuucaccugagcauuccgaacuucaaucaguaugaggccaugucuugugauuuuaacggaggcaagaucuccgugcaguacaaucugagccacacauaugcugucgacgccgcuaaccauugcggcaccauugccaauggggugcuccaaacauucaugcggauggcguggggaggcucuuacaucgcccuggauuccgggaagggaagcugggacuguaucaugaccucuuaccaguaucuuauuauccagaacacgacaugggaagaucacugccaguuuucccgccccagcccuauuggcuaccuggggcuccugucccaaagaacccgggacaucuauauuucucgcagacggcgcggaacauucaccuggacccuuagcgauuccgagggcaacgaaacacccggcggguacugucugacgagauggaugcucaucgaggcugagcugaaaugcuuuggaaauaccgccguugcuaaguguaacgaaaaacaugacgaggaguucugcgauaugcugcggcucuuugacuucaauaagcaggccauccgcagacugaaagcgccugcccagaugagcauucagcuuaucaacaaggcugugaaugcccugauuaacgaucaacucaucaugaagaaucaucugcgggacauuaugggcauccccuauugcaacuacucuaaauauuguuaccuuaaucacacagucaccgggcgcacaucccugccuagaugcugucucgugagcaacggaucuuaccugaaugaaacccacuucagcgacgauaucgaacagcaggcugacaacaugauuacggagcugcuccaaaaggaguauaucgaucggcagggcaaaacaccgcuggggcuuguggaccuguuugucuucuccaccucuuuuuaccucauuagcaucuuccugcaccugguuaagauucccacccaucgccacaucauuggaaaaccuugccccaagccucauagacuuaaucacaugggcaucuguuccugcggccucuauaaacaccccggggugccggugaaguggaagcgguga

SEQ ID NO: 24793 - RNA, 1473 nt, Artificial Sequence
  derived and/or modified CDS sequence (opt5) from LASV(LASV254-NIG-2011;Clade II)__AIT17674__GPCmut3
augggccagaucauuaccuucuuucaagaggugccccacgucaucgaagagguuaugaacauugugcugaucgcccucagccugcuugcuauucugaaggggaucuacaauguggccacaugcggacucuucggccuggucuccuuucuucugcucugugggagaucuugcagcacgaccuauaaaggaguguacgaacugcagacacuggagcucgacaugaccaaccugaauaugacaaugccucuuuccuguaccaagaacaauucucaucacuauaucaugguuggcaacgaaacagggcuggagcucacccugacgaauaccagcauuaucaaccauaaauucugcaaucuuuccgaugcgcacaagaaaaaccuguacaaucaugcucucaugucuauuaucagcacauuucaccuguccauuccgaacuucaaucaguaugaggccaugagcugugacuuuaacggaggcaagaucucugugcaguacaaucugucccacagcuaugccgucgaugcugccaaccauugcggcaccauugcuaacggggugcuccaaacauucaugcggauggccuggggaggcucuuacaucgcgcuggacuccgggaagggaaauugggauuguaucaugaccagcuaccaguaucuuauuauccagaacacgacaugggaagaccacugccaguuuucucgccccuccccuauuggcuaccuggggcuccugagccaaagaacccgggauaucuauauuucccgcagacggcgcggaacauucaccuggacccuuucugacagcgagggcaaugaaacacccggcggguacugucugacgagauggaugcucaucgaggccgagcugaaaugcuuuggaaacaccgcuguugccaaguguaaugaaaaacaugaugaggaguucugcgacaugcugcggcucuuugauuucaacaagcaggcuauccgcagacugaaaaccccugcccaggcgaauauucagcuuaucaacaaggccgugaaugcucugauuaacgaccaacucaucaugaagaaucaucugcgggauauuaugggcauccccuauugcaacuacuccaaauauuguuaccuuaaucacacagucacagggaagaccagccugccucgcugcugucucgugucuaacggauccuaccugaaugaaacgcacuucagcgacgacaucgaacagcaggccgauaacaugauuacagagcugcuccaaaaagaguauauggacagacagggcaagaccccgcuggggcuuguggaucuguuugucuucucuaccagcuuuuaccucaucuccauuuuccugcaccugguuaaaauccccacacaucggcacgugauuggaaagccuugccccaaaccucaucgccuuaaccacaugggcaucuguucuugcggccucuauaagcaccccggggugccggucaaguggaaaagauga

SEQ ID NO: 24794 - RNA, 1473 nt, Artificial Sequence
  derived and/or modified CDS sequence (opt5) from LASV(Nig08-A19;Clade III)__ADU56618__GPCmut3
augggccagaucgugaccuucuuucaagaggucccccacguuauugaagaggugaugaacaucgugcugauugcccucagcauccuggcuauucuuaaggggcuguacaauaucgccacaugcggacucaucggccuggucacguuccuucugcucuccgggagaucuuguagcaugaccuauaaaggaguguacgaacugcagacacuggagcucaacaugaauacccugaacaugacaaugccucuuuccugcaccaagaauaacucucaucacuauauuaugguuggcaaugaaacagggcuggagcucacccugacgaacaccagccuucugcaucacaaauuuuguaaucucuccgacgcgcauaagaaaaaccuguacgaucacacacugaugucuaucauuagcaccuuccaccucuccaucccgaauuuuaaccaguaugaggcuaugagcugcgacuucaauggaggcaagauuacagugcaguacaaccugucucauuccuaugccaucgaugccgcuaaucacuguggcaccgucgccaacggggugcuucaaacguuuaugcggauggcuuggggaggcagcuacauugcccuggacucugggcgcggaaagugggauugcaucaugacauccuaccaguaucucaucauucagaacaccacaugggaagaccauugucaguucagcagacccucuccuaucggcuaccuggggcuucugucccaacggacccgcgauauuuauaucagcagacggcgcagaggaaccuuuacauggacgcucuccgacucugagggcaaugaaacccccggcggguacugccugacacgguggaugcugauugaggcggagcucaaauguuucggaaacaccgccguugcuaagugcaaugaaaaacacgaugaggaauuuugugacaugcugcgccuuuucgauuuuaacaagcaggccaucagacggcugaaagcuccugcccagaugagcauccagcucauuaauaaggcggugaacgcccugaucaaugaccaacuuauuaugaagaaccaucugcgcgauaucaugggcauucccuauugcaauuacuccaaauauugcuaccucaaccacacaagcaccgggagaacgucucugccucgguguugccuggucuccaauggaagcuaccucaacgagacacacuucucugacgacaucgaacagcaggcugauaauaugaucaccgagaugcugcaaaaggaguaucuugaccgccagggcaaaaccccgcuggggcucguggaucuguucguguuuagcacauccuucuaccugauuucuaucuuucuucaucucgucaagauucccacccacagacauaucguuggaaaaccuugucccaagccucaccggcugaaccacaugggcauuugcagcuguggccuguauaaacagcccggggugccggugagauggaagcgcuga

SEQ ID NO: 24795 - RNA, 1476 nt, Artificial Sequence
  derived and/or modified CDS sequence (opt5) from LASV(G1180-SLE-2010;Clade IV)__AIT17168__GPCmut3
augggccagaucgugaccuucuuucaagaggucccccacguuauugaagaggugaugaacaucgugcugauugcccucagcauccuggcuguccuuaaggggcuguacaauuucgccacaugcggacucgugggccugcuuacguuucugcuccugugugggagauccugcaccgcgucucgguauaaaggaguuuacgaacugcagacacucgagcugaacauggaaacccuuaauaugacaaugccucugagcuguaccaagaacaauucccaucacuauauuauggugggcaacgagacagggcucgagcugacccuuacgaauaccucuaucaucaaccauaaauucugcaaucugagcgacgcucacaagaaaaaccucuacgaucaugcccugauguccauuaucucuacauuucaccugagcauuccgaauuucaaccaguaugaagccauguccugugacuuuaauggaggcaagaucagcguccaguacaaccucucucacuccuaugcuggcgaugccgcuaaucauugcgggaccguggccaacggaguucugcaaacauucaugcgcauggcguggggcgggagcuacauugcccuugacucuggacacggcuccugggauuguaucaugaccagcuaccaguaucugauuauccagaacacgacaugggaggaccauugccaguuuucuagacccuccccuaucggguaccucggacugcuuagccaacggacccgcgauauuuauaucuccagacggcgcagaggcacauucaccuggacccugucugacagcgaaggcaaggauacacccgggggauacugucucacgcgguggaugcugauugaggcugagcugaaaugcuuuggcaauaccgccguggcuaaguguaacgaaaaacacgacgaggaguucugcgauaugcuccgccuguuugacuucaauaagcaggccauccagagacuuaaagcgccugcccagauguccauucaacugaucaacaaggcugucaaugcccucaucaacgaucagcugauuaugaagaaucaccuucgggacaucauggggauucccuauugcaacuacagcaaauauuguuaccugaaucauacaaccacaggaaagaccucucucccuaaaugcugucugguguccaacggcagcuaccugaaugaaacgcacuucucugacgauaucgaacagcaagcugacaacaugauuacagagaugcuccagaaggaguauauggaacgccaggggaaaaccccgcugggacuuguggaucuguuugucuucagcaccuccuuuuaccucaucucuaucuuccugcaucugguuaagauucccacacacagacauaucgugggcaaaagcugcccuaagccccaccggcuuaaucacaugggcauuuguuccugcgggcucuauaagcagccuggagugcccgucaaauggaagcgcuga

SEQ ID NO: 24796 - RNA, 1476 nt, Artificial Sequence
  derived and/or modified CDS sequence (opt5) from LASV(G1442-SLE-2011;Clade IV)__AIT17180__GPCmut3
augggccagaucgugaccuucuuucaagaggucccccacguuauugaagaggugaugaacaucgugcugauugcccucagcauccuggcuguccuuaaggggcuguacaauguggccacaugcggacucauuggccugguuacguuccuucugcucugugggagauccugcaccacaacccuguauaaaggaguguacgaacugcagacacucgagcugaacauggaaacccuuaauaugacaaugccucugucuuguaccaagaacaauagccaucacuauauccgggucggcaacgagacggggcucgagcugacccuuacaaauaccuccaucauuaaccauaaauuuugcaaucugucugacgcgcacaagaaaaaccucuacgaucaugcucugaugagcaucauuuccacauuccaccugucuaucccgaauuuuaaccaguaugaagccaugagcugugacuucaauggaggcaagauuuccgugcaguacaaccucagccacucuuaugccggcgaugcugccaaucauugcgggaccguugcuaacggagugcugcaaacguuuaugcgcauggccuggggcggguccuacaucgcgcuugacagcggaagaggcaacugggauuguauuaugacaucuuaccaguaucugaucauccagaauaccacaugggacgaucacugccaguucucccggcccagcccuauuggguaccucggacugcuuucucaacgcaccagagacgucuauaucucccggcgcagacggggcaccuuuacauggacgcugagcgauuccgagggcaaggacacccccgggggauacugucucacacgcuggaugcugauugaagccgagcugaaaugcuucggcaacaccgcuguggccaaguguaaugagaaacaugaugaagaguuuugcgacaugcucagacuguucgauuuuaacaagcaggcuauccagcggcuuaaagccccugcgcagaugucuauucaacugaucaauaaggccgugaacgcucucaucaaugaccagcugauuaugaagaaccaccuucgcgacaucauggggauucccuauugcaauuacagcaaauauuguuaccugaacaauacagccaccggaaagacgucccucccuaaaugcugucugaucagcaacggcucuuaccugaaugaaacacacuucuccgaugacauugagcaggaagcugauaacaugaucaccgagaugcuccaaaaggaguauauggaaagacaggggaaaaccccgcugggacuugucgaccuguucguuuuuagcacaucuuucuaccucaucagcauuuuucugcaucuggugaagauccccacccaccggcauauugugggcaaauccugcccuaagccccaccgccuuaaucauaugggcaucuguucuugcgggcucuauaagcagccuggaguccccgugagauggaaacgguga

SEQ ID NO: 24797 - RNA, 1476 nt, Artificial Sequence
  derived and/or modified CDS sequence (opt5) from LASV(G3010-SLE-2013;Clade IV)__AIT17344__GPCmut3
augggccagaucgugaccuucuuucaagaggucccccacguuauugaagaggugaugaacaucgugcugauugcccucagcauccuggcuguccuuaaggggcuguacaauuucgccacaugcggacucgugggccugguuacguuucuucugcucugugggagauccugcaccacaucucuguauaaaggaguguacgaacugcagacccucgagcugaacauggaaacacuuaauaugaccaugccucugagcuguacaaagaacaauucccaucacuauauuauggucggcaacgagaccgggcucgagcugacgcuuaccaauacaucuaucaucaaccauaaauucugcaaucugagcgacgcgcacaagaaaaaccucuacaaucaugcucugauguccauuaucucuaccuuucaccugagcauuccgaacuucaaucaguaugaagccauguccugugauuuuaacggaggcaagaucagcgugcaguacaaucucucucacuccuaugccggcgacgcugccagccauugcgggacaguugcuaacggagugcugcaaaccuucaugcggauggccuggggcgggucuuacauugcgcuugauuccggauacggcaagugggacuguaucaugacgagcuaucaguaccugauuauccagaacacaaccugggaggaucacugccaguuuucucgccccuccccuaucggguaucucggacugcuuagccaaagaacacgggacauuuacaucucccgcagacggcgcggcaccuucaccuggacacugucugauagcgaaggcaaagacacgcccgggggauauugucucaccagauggaugcugauugaggccgagcugaagugcuuuggcaauacagcugucgccaaauguaacgaaaagcaugaugaggaguucugcgacaugcuccggcuguuugauuucaauaaacaggcuauccagcgccuuaagaccccugcccagauguccauucaacugaucaacaaggcggugaaugcccucaucaacgaccagcugauuaugaaaaaucaccuuagagauaucauggggauucccuacugcaacuauagcaaguacuguuaccugaaucacacaaccacgggaaaaacaucucucccuaagugcugucugguguccaacggcagcuaucugaaugaaacccauuucucugacgacaucgaacagcaagcugauaacaugauuaccgagaugcuccagaaagaguacauggaacggcaggggaagacaccgcugggacuugucgaccuguuuguuuucagcaccuccuuuuaucucaucucuaucuuccugcaccuggugaaaauucccacacaucgccacaucgugggcaagagcugcccuaagccccauagacuuaaucacaugggcauuuguuccugcgggcucuacaaacagccuggaguccccgugcgguggaagcgcuga

SEQ ID NO: 24798 - RNA, 1476 nt, Artificial Sequence
  derived and/or modified CDS sequence (opt5) from LASV(G502-SLE-2009;Clade IV)__AIT17126__GPCmut3
augggccagaucgugaccuucuuucaagaggucccccacguuauugaagaggugaugaacaucgugcugauugcccucagcauccuggcuguccuuaaggggcuguacaauuucgccacaugcggacucgugggccugcuuacguuucugcuccugugugggagauccugcaccacaggacuguauaaaggcguuuacgaacuccagacccuggagcuuaacauggaaacacugaauaugaccaugccucucucuuguacaaagaacaauagccaucacuauauuaugguggggaacgagaccggacuggagcuuacgcugaccaauacauccaucaucaaccauaaauucugcaaucucucugacgcgcacaagaaaaaccuguacgaucaugcucugaugagcauuaucuccaccuuucaccucucuauuccgaauuucaaccaguaugaagccaugagcugugacuuuaauggcggcaagaucuccguccaguacaaccugagccacucuuaugccggggaugcugccgaccauugcggaacaguggcuaauggcguucuucaaaccuucaugcggauggccuggggaggguccuacauugcgcuggauagcggccgcgggagaugggacuguaucaugacgucuuaccaguaucucauuauccagaacacaaccugggaggaucacugccaguuuucccggcccagcccuaucggauaccugggccuucugucucaacgcacaagagacauuuauaucucccggcgcagacggggcaccuucaccuggacacucagcgauuccgaagggaaggacacgcccggaggcuacugucugacccgcuggaugcugauugaggccgagcucaaaugcuuugggaacacagcuguggccaaguguaaugaaaaacaugaugaggaguucugcgacaugcugagacuuuuugauuucaacaagcaggcuauccagcggcugaaagccccugcgcagaugucuauucaacucaucaauaaggccgucaacgcucugaucaaugaccagcuugugaugaagaaccaucugcgcgacauuaugggaauccccuauugcaauuacagcagauauuguuaccucaaccacaccacaaccggccggacgucccugccuaaaugcugucuggugagcaaugggucuuaccucaacgaaacacacuucuccgaugacauugaacagcaagccgauaauaugaucaccgagaugcugcagaaggaguauauggaacgccagggaaaaaccccgcuuggccuggucgaccucuuuguuuucagcacaucuuuuuaccugauuagcaucuuccugcaccuugugaagauccccacccauagacacauugugggcaaauccugcccuaagccccaucggcucaaccacauggggaucuguucuugcggacuguauaaacagccuggcguccccgugaaguggaagagauga

SEQ ID NO: 24799 - RNA, 1476 nt, Artificial Sequence
  derived and/or modified CDS sequence (opt5) from LASV(G733-SLE-2010;Clade IV)__AIT17154__GPCmut3
augggccagaucgugaccuucuuucaagaggucccccacguuauugaagaggugaugaacaucgugcugauugcccucagcauccuggcuguccuuaaggggcuguacaauuucgccacaugcggaauugugggccucguuuccuuucugcuucugugugggagaucuugcacgaccagccucuauaaaggaguguacgaacugcagacacuggagcucaacauggaaacccugaauaugacaaugccucuuuccuguaccaagaacaauucucaucacuauaucauggucggcaacgagacagggcuggagcucacccugacgaauaccagcaucauuaaccauaaauucugcaaucuuuccgacgcgcacaagaaaaaccuguacgaucaugcucucaugucuaucauuagcacauuucaccuguccaucccgaauuucaaccaguaugaagccaugagcugugacuuuaauggaggcaagauuucugugcaguacaaccugucccacagcuaugccggcgaugcugccaaucauugcgggaccaucgcuaacggaguucuccaaacauucaugcggauggccuggggcgggucuuacauugcgcuggacuccggacgcgauagaugggacuguaucaugaccagcuaccaguaucuuaucauucagaacacgacaugggaggaucacugccaguuuucucggcccuccccuaucggcuaccuggggcuccugagccaacgcaccagagacauuuauaucucccggcgcagacggggaacauucaccuggacccuuucugauagcgaaggcaaggacacacccggcggguacugucugacgcgcuggaugcucauugaggccgagcugaaaugcuuuggaaauaccgcuguggccaaguguaacgaaaaacaugaugaggaguucugcgacaugcugagacucuuugauuucaauaagcaggcuauccagcggcugaaagccccugcgcagauguccauccaacuuauuaacaaggccgucaaugcucugaucaacgaccagcucauuaugaagaaucaucugcgcgacaucaugggcauucccuauugcaacuacagcaaauauuguuaccuuaaucacacaaccacagggaagaccucucugccuaaaugcugucucguguccaacggaagcuaccugaaugaaacgcacuucucugaugacaucgaacagcaagccgauaacaugaucacagagaugcugcagaaggaguauauggaaagacagggcaaaaccccgcucgggcugguggaccuuuuugucuucagcaccuccuuuuaccugauuucuaucuuccuccaccugguuaagauucccacacaucggcacguggugggaaaaagcugcccuaagccccaucgccugaaucacaugggcaucuguuccugcggccuuuaugggcagccuggaguccccgugaaguggaaaagauga

SEQ ID NO: 24800 - RNA, 1476 nt, Artificial Sequence
  derived and/or modified CDS sequence (opt5) from MOPV/LASV reassortant(IGS-1;Clade IV)__AFY05576__GPCmut3
augggccagaucgugaccuucuuucaagaggucccccacguuauugaagaggugaugaacaucgugcugauugcccucagcguccuggcugugcuuaaggggcuguacaauuucgccacaugcggacucguuggccuggugacguuucuucugcucugugggagauccugcaccacaucucuguauaaaggagucuacgaacugcagacccucgagcugaacauggaaacacuuaauaugaccaugccucugagcuguacaaagaacaauucccaucacuauaucauggugggcaacgagaccgggcucgagcugacgcuuaccaauacaucuauuaucaaccauaaauucugcaaucugagcgacgcgcacaagaaaaaccucuacgaucaugcucugauguccaucauuucuaccuuucaccugagcaucccgaauuucaaccaguaugaagccauguccugugacuuuaauggaggcaagauuagcguucaguacaaccucucucacuccuaugccggcgaugcugccaaucauugcgggacaguggcuaacggaguccugcaaaccuucaugcggauggccuggggcgggagcuacaucgcgcuugacucuggacgcggcaacugggauuguauuaugacguccuaccaguaucugaucauucagaauacaaccugggaggaccacugccaguuuagcagacccucuccuaucggguaccucggacugcuuucccaacggacacgcgauaucuauauuagcagacggcgcagaggcaccuucaccuggacacuguccgacucugaaggcgaggauacgcccgggggauacugucucacccgguggaugcugaucgaggccgaacugaagugcuuuggcaacacagcuguggccaaauguaaugagaagcaugacgaagaguucugcgauaugcuccgccuguuugacuucaacaaacaggcuauucagagacuuaaggccccugcgcagaugagcauccaacugauuaauaaagccgugaacgcucucaucaaugaucagcugaucaugaagaaccaccuucgggacauuauggggauccccuauugcaauuacuccaaguauuguuaccugaaccacaccacaaccggacgcacgagccucccuaaaugcugucuggucucuaauggcuccuaccugaacgaaacacauuucagcgacgauauugagcagcaagccgacaauaugaucaccgagaugcuccagaaggaauauauggagagacaggggaaaaccccgcugggacuuguugaucuguuuguguucucuaccagcuuuuaccucauuuccaucuuccugcaccuggugaagauccccacacaucggcacauugucggcaaaucuugcccuaagccccaucgccuuaaccacaugggcaucuguagcugcgggcucuauaaacagccuggagugcccguuaaguggaagagauga

SEQ ID NO: 24801 - RNA, 1476 nt, Artificial Sequence
  derived and/or modified CDS sequence (opt5) from LASV(LM765-SLE-2012;Clade IV)__AIT17814__GPCmut3
augggccagaucgugaccuucuuucaagaggucccccacguuauugaagaggugaugaacaucgugcugauugcccucagcauccuggcuguccuuaaggggcuguacaauuucgccacaugcggacucgugggccugguuacguuucuucugcucugugggagauccugcaccacaucucuguauaaaggaguguacgaacugcagacccucgagcugaacauggaaacacuuaauaugaccaugccucugagcuguacaaagaacaauucccaucacuauauuauggucggcaacgagaccgggcucgagcugacgcuuaccaauacaucuaucaucgaccauaaauucugcaaccugagcgaugcgcaccggaagaaucucuacgaccaugcucugauguccauuaucucuaccuuucaccugagcauuccgaacuucaaucaguaugaagccauguccugugauuuuaacggaggcaaaaucagcgugcaguacaaucucucucacuccuaugccaaggacgcugccgaucauugcggcacaguugcuaacggggugcugcaaaccuucaugcgcauggccuggggaggcagcuacauugcgcuugacucugggagaggacggugggauuguaucaugacguccuaccaguaucugauuauccagaauacaaccugggaggaccacugccaguuuagccgccccucuccuaucggcuaccucgggcugcuuucccaaagaacacgggauauuuauaucagccgcagacggcgcggaaccuucaccuggacacuguccgacucugaaggcaaggauacgcccggcggguacugucucaccagauggaugcugauugaggccgagcugaaaugcuuuggaaacacagcugucgccaaguguaacgaaaaacaugacgaggaguucugcgauaugcuccggcuguuugacuucaauaagcaggcuauccagcgccuuaaagccccugcgcagaugagcauucaacugaucaacaaggccgugaaugcucucaucaacgaccagcugauuaugaagaaucaccuuagagauaucaugggcauucccuauugcaacuacuccaaauauuguuaccugaaucacaccacaaccgggaagacgagccucccuaaaugcugucuggugucuaacggauccuaccugaaugaaacacauuucagcgacgauaucgaacagcaagccgacaacaugauuaccgagaugcuccagaaggaguauauggaacggcagggcaaaaccccgcuggggcuugucgaucuguuuguuuucucuaccagcuuuuaccucaucuccaucuuccugcaccuggugaagauucccacacaucgccacaucgugggaaaaccuugccccaagccucauagacuuaaucacaugggcauuuguucuugcggccucuauaagcagcccggggucccggugaaauggaagcgguga

SEQ ID NO: 24802 - RNA, 1476 nt, Artificial Sequence
  derived and/or modified CDS sequence (opt5) from LASV(LM776-SLE-2012;Clade IV)__AIT17824__GPCmut3
augggccagaucgugaccuucuuucaagaggucccccacguuauugaagaggugaugaacaucgugcugauugcccucagcauccuggcuguccuuaaggggcuguacaauuucgccacaugcggacucgugggccugguuacguuucuucugcucugugggagauccugcaccacaucuguguauaaaggagucuacgaacugcagacccuggagcucaacauggaaacacugaauaugaccaugccucuuagcuguacaaagaacaauucccaucacuauauuauggugggcaacgagaccgggcuggagcucacgcugaccaauacaucuaucaucaaccauaaauucugcaaucuuagcgacgcgcacaagaaaaaccuguacgaucaugcucucauguccauuaucucuaccuuucaccugagcauuccgaauuucaaccaguaugaagccauguccugugacuuuaauggaggcaagaucagcguucaguacaaccugucucacuccuaugccggcgaugcugccaaucauugcgggacaguggcuaacggaguccuccaaaccuucaugcggauggccuggggcgggagcuacauugcgcuggacucuggacacggcaagugggauuguaucaugacguccuaccaguaucuuauuauccagaacacaaccugggaggaccauugccaguuuagccgccccucuccuaucggguaccugggacuccugucccaaagaacacgggauauuuauaucagccgcagacggcgcggcaccuucaccuggacacuuuccgacucugaaggcaaagauacgcccgggggauacugucugaccagauggaugcucauugaggccgagcugaagugcuuuggcaauacagcuguggccaaauguaacgaaaagcacgacgaggaguucugcgauaugcugcggcucuuugacuucaauaaacaggcuauccagcgccugaaggccccugcgcagaugagcauucaacuuaucaacaaggccgugaaugcucugaucaacgaucagcucauuaugaaaaaucaccugagagacaucauggggauucccuauugcaacuacuccaaguauuguuaccuuaaucauaccacaaccggaaaaacgagccugccuaagugcugucucgucucuaacggcuccuaccugaaugaaacacacuucagcgacgauaucgaacagcaagccgacaacaugauuaccgagaugcugcagaaagaguauauggaacggcaggggaagaccccgcucggacugguugaucuuuuuguguucucuaccagcuuuuaccugaucuccaucuuccuccaucuggugaaaauucccacacaccgccauaucgucggcaagucuugcccuaagccccacagacugaaucacaugggcauuuguagcugcgggcuuuauaaacagccuggagugcccguucgguggaagcgcuga

SEQ ID NO: 24803 - RNA, 1476 nt, Artificial Sequence
  derived and/or modified CDS sequence (opt5) from LASV(Mad39;Clade IV)__ANH09722__GPCmut3
augggccagaucgugaccuucuuucaagaggucccccacguuauugaagaggugaugaacaucgugcugauugcccucagcauccuggcuguccuuaaggggcuguacaauguggccacaugcggacucauuggccugguuacguuccuucugcucugugggagauccugcaccacaacccuguauaaaggaguguacgaacugcaggcgcucgagcugaacauggaaacacuuaauaugaccaugccucugucuuguacaaagaacaauagccaucacuauauccgggucggcaacgagaccgggcucgagcugacgcuuaccaauacaucccugaucaaccauaaauuuugcaaucucucugacgcucacaagaaaaaccuguacgaucaugcccugaugagcauuaucuccaccuuccaccucucuauuccgaauuuuaaccaguaugaagccaugagcugugacuucaaugauggaaagaucuccgugcaguacaaccugagccacacauaugcuggcgacaccgccaaucauugcggcacgguugcuaacggggugcuucaaacauuuaugcgcauggccuggggaggcucuuacauugcgcuggauuccgggagaggaggcugggacuguaucaugaccagcuaccaguaucucauuauccagaacacaaccugggaggaucacugccaguucucucggcccuccccuaucggguaccugggacuucugagccaacgcaccagagacauuuauaucucucggcgcagacggggcacauuuacguggacccucuccgauagcgaaggcaaggacacacccgggggauacugucugacccgcuggaugcugauugaggccgagcucaaaugcuucggcaauacagcugucgccaaguguaacgaaaaacaugaugaggaauuuugcgacaugcugagacuuuucgauuuuaauaagcaggcuauccagcggcugaaagccccugcgcagauguccauucaacucaucaacaaggccgugaaugcucugaucaacgaccagcuuauuaugaagaaucaucugcgcgacaucauggggauucccuauugcaacuacucuaaauauuguuaccucaaucacaccgugacgggaaagacaagccugccuaaaugcugucuggucuccaacggcagcuaccucaaugagacccacuucucugaugacaucgaacagcaagccgauaacaugauuaccgagaugcugcagaaggaguauauggaaagacaggggaaaacaccgcuuggacugguugaccucuucguguuuuccaccagcuucuaccugaucucuaucuuucugcaccuugugaagauucccacacaucggcacgucgugggcaaaccuugccccaagccucaucgccucaaucacaugggcaucuguagcugcggguucuauaagcagcccggaguuccggugagauggaaacgguga

SEQ ID NO: 24804 - RNA, 1476 nt, Artificial Sequence
  derived and/or modified CDS sequence (opt5) from LASV(Z0947-SLE-2011;Clade IV)__AIT17840__GPCmut3
augggccagaucgugaccuucuuucaagaggucccccacguuauugaagaggugaugaacaucgugcugauugcccucagcauccuggcuguccuuaaggggcuguacaauuucgccacaugcggacucgugggccugguuacguuucuucugcucugugggagauccugcaccauuucucuguauaaaggaguguacgaacugcagacacucgagcugaacauggaaacccuuaauaugacaaugccucugagcuguaccaagaacaauucccaucacuauaucauggucggcaacgagacagggcucgagcugacccuuacgaauaccucuaucauuaaccauaaauucugcaaucugagcgacgcgcacaagaaaaaccucuacgaucaugcucugauguccaucauuucuacauuucaccugagcaucccgaauuucaaccaguaugaagccauguccugugacuuuaauggaggcaagauuagcgugcaguacaaccucucucacuccuaugccggcgaugcugccaaucauugcgggaccguugcuaacggagugcugcaaacauucaugcggauggccuggggcgggagcuacaucgcgcuugacucuggacgcgauagaugggacuguauuaugaccuccuaccaguaucugaucauccagaacacgacaugggaggaucacugccaguuuagccggcccucuccuauuggcuaccucgggcugcuuucccaacgcaccagagacaucuauauuagccggcgcagacggggaacauucaccuggacccuguccgauucugaaggcaaggacacacccggcggguacugucucacgcgcuggaugcugaucgaggccgagcugaaaugcuuuggaaauaccgcugucgccaaguguaacgaaaaacaugaugaggaguucugcgacaugcucagacuguuugauuucaauaagcaggcuauucagcggcuuaaagccccugcgcagaugagcauccaacugaucaacaaggccgugaaugcucucauuaacgaccagcugaucaugaagaaucaccuucgcgacauuaugggcauccccuauugcaacuacuccaaauauuguuaccugaaucacacaaccacagggaagaccagccucccuaaaugcugucuggugucuaacggauccuaccugaaugaaacgcauuucagcgaugacauugaacagcaagccgauaacaugaucacagagaugcuccagaaggaguauauggaaagacagggcaaaaccccgcuggggcuugucgaccuguuuguuuucucuaccagcuuuuaccucaucuccauuuuccugcaccuggugaagauccccacacaucggcacauugugggaaaaccuugccccaagccucaucgccuuaaucacaugggcaucuguucuugcggccucuauaagcagcccggggucccggugaaauggaagagauga

SEQ ID NO: 24805 - RNA, 1717 nt, Artificial Sequence
  mRNA product Design a-1 (hSL-A64-N5) comprising derived and/or modified sequence from LASV(Josiah;Clade IV)__NP_694870__GPCmut3 (opt1)
aggagagucccgcagucggcguccagcggcucugcuuguucgugugugugucguugcaggccuuauucaagcuuaccaugggccagaucgugaccuucuuccaggaggucccccacgugaucgaggaggugaugaacaucguccugaucgcccucagcgugcuggccgugcugaaggggcucuacaacuucgcgaccugcggccuggucgggcuggugacguuccuccugcugugcggccgcuccugcaccaccagccucuacaaggggguguacgagcugcagacccuggagcucaacauggagacgcugaacaugaccaugccgcuguccugcaccaagaacaacagccaccacuacaucauggucggcaacgagaccggccucgagcugacgcugaccaacaccuccaucaucaaccacaaguucugcaaccucagcgacgcccacaagaagaaccuguacgaccacgcccugauguccaucaucagcaccuuccaccucuccauccccaacuucaaccaguacgaggccaugagcugcgacuucaacgggggcaagaucuccgugcaguacaaccugagccacuccuacgccggggacgcggccaaccacugcggcacgguggccaacgggguccugcagaccuucaugcggauggccuggggcggcagcuacaucgcgcucgacuccgggcgcggcaacugggacugcaucaugaccagcuaccaguaccugaucauccagaacaccacgugggaggaccacugccaguucucccggcccagccccaucggguaccugggccuccugucccagcgcacccgggacaucuacaucagccgccggcgccggggcaccuucaccuggacgcugagcgacuccgaggggaaggacaccccgggcggguacugccugacccgcuggaugcucaucgaggccgagcugaagugcuucggcaacaccgccguggccaagugcaacgagaagcacgacgaggaguucugcgacaugcugcggcuguucgacuucaacaagcaggccauccagcgccugaaggcgcccgcccagaugagcauccagcugaucaacaaggccgugaacgcccucaucaacgaccagcugaucaugaagaaccaccuccgggacaucauggggauccccuacugcaacuacuccaaguacugcuaccucaaccacacgaccaccggccgcaccagccugcccaagugcugccuggucuccaacggcagcuaccucaacgagacgcacuucuccgacgacaucgagcagcaggccgacaacaugaucaccgagaugcugcagaaggaguacauggagcggcaggggaagacgccccugggccucguggaccuguucguguucagcaccuccuucuaccugaucagcaucuuccugcaccucgucaagaucccgacccaccgccacaucguggggaaguccugccccaagccccaccggcugaaccacaugggcaucugcagcugcgggcuguacaagcagcccggcgugccggucaaguggaagcgcugaggacuagucccuguucccagagcccacuuuuuuuucuuuuuuugaaauaaaauagccugucuuucagaucucaaaggcucuuuucagagccaccaaaaaaaaaaaaaaaaaaaaaaaaaaaaaaaaaaaaaaaaaaaaaaaaaaaaaaaaaaaaaaaaagaauu

SEQ ID NO: 24806 - RNA, 1714 nt, Artificial Sequence
  mRNA product Design a-1 (hSL-A64-N5) comprising derived and/or modified sequence from LASV(LP;Clade I)__AAF86701__GPCmut3 (opt1)
aggagagucccgcagucggcguccagcggcucugcuuguucgugugugugucguugcaggccuuauucaagcuuaccaugggccagaucaucaccuucuuccaggaggugccccacgucaucgaggaggugaugaacaucgugcugaucgcccucagccugcuggccauccucaaggggcuguacaacaucgcgaccugcggcaucaucgggcuggucgccuuccucuuccugugcggcaaguccugcagccugacgcucaagggcggguacgagcugcagacccuggagcucaacauggagacccugaacaugaccaugccgcuguccugcacgaagaacagcucccaccacuacauccgcgugggcaacgagaccgggcucgagcugacccugaccaacacgagcaucaucaaccacaaguucugcaaccucuccgacgcccacaagaagaaccuguacgaccacgcccugaugagcaucaucuccaccuuccaccucagcauccccaacuucaaccaguacgaggccauguccugcgacuucaacggcgggaagaucagcgugcaguacaaccugucccacagcuacgcgggcgacgccgccgagcacugcgggaccgucgccaacggcgugcugcagaccuucaugcggauggcguggggcgggcgcuacaucgcccucgacuccggcaaggggaacugggacugcaucaugacgagcuaccaguaccugaucauccagaacaccaccugggaggaccacugccaguucucccggcccagccccaucggcuaccugggccuccugucccagcgcacccgggacaucuacaucagccgccggcgccgggggacguucaccuggacccugagcgacuccgagggcaacgagacccccgggggcuacugccugacgcgcuggaugcucaucgaggccgagcugaagugcuucgggaacaccgccguggccaagugcaacgagaagcacgacgaggaguucugcgacaugcugcggcuguucgacuucaacaagcaggcgauccgccggcugaaggcccccgcccagaugagcauccagcugaucaacaaggccgucaacgcccucaucaacgaccagcugaucaugaagaaccaccuccgcgacaucaugggcauccccuacugcaacuacuccaaguacugcuaccucaaccacaccagcuccggccggaccagccugcccaagugcugccugaucuccaacgggagcuaccucaacgagacgcaguucuccgacgacaucgagcagcaggcggacaacaugaucaccgagaugcugcagaaggaguacaucgagcgccagggcaagaccccgcuggggcucguggacaucuucaucuucagcaccuccuucuaccugaucagcaucuuccugcaccugaucaagaucccgacgcaccggcacaucgugggcaagcccugccccaagccccaccgccucaaccacaugggggucugcuccugcggccuguacaagcacccgggcgugcccaccaaguggaagcggugaggacuagucccuguucccagagcccacuuuuuuuucuuuuuuugaaauaaaauagccugucuuucagaucucaaaggcucuuuucagagccaccaaaaaaaaaaaaaaaaaaaaaaaaaaaaaaaaaaaaaaaaaaaaaaaaaaaaaaaaaaaaaaaaagaauu

SEQ ID NO: 24807 - RNA, 1714 nt, Artificial Sequence
  mRNA product Design a-1 (hSL-A64-N5) comprising derived and/or modified sequence from LASV(803213;Clade II)__AAF86703__GPCmut3 (opt1)
aggagagucccgcagucggcguccagcggcucugcuuguucgugugugugucguugcaggccuuauucaagcuuaccaugggccagaucaucaccuucuuccaggaggugccccacgucaucgaggaggugaugaacaucgugcugaucgcccucagccugcuggccauccucaaggggaucuacaacgucgcgaccugcggccuguucgggcugaucuccuuccuccugcugugcggccgcagcugcuccgugacguacaaggggguguacgagcuccagacccuggagcugaacauggccaaccucaacaugaccaugccgcugagcugcaccaagaacaacucccaccacuacaucauggucggcaacgagacgggccuggagcucacccugaccaacaccagcaucaucaaccacaaguucugcaaccuguccgacgcccacaagaagaaccucuacgaccacgcccugaugagcaucaucuccacguuccaccugagcauccccaacuucaaccaguacgaggccauguccugcgacuucaacgggggcaagaucagcgugcaguacaaccucucccacagcuucgcgguggacgccgccaaccacugcgggaccaucgccaacggcguccugcagaccuucaugcggauggcguggggcggguccuacaucgcccuggacagcggcaaggggaacugggacugcaucaugaccuccuaccaguaccucaucauccagaacacgaccugggaggaccacugccaguucagccgccccucccccaucggcuaccuggggcugcucagccagcggacccgcgacaucuacaucagccggcgccgccggggcaccuucacguggacccucuccgacagcgagggcaacgaggcccccgggggcuacugccugacccgguggaugcugaucgaggccgagcucaagugcuucgggaacaccgccguggcgaagugcaacgagaagcacgacgaggaguucugcgacaugcugcgccuguucgacuucaacaagcaggccaucaagcggcucaagacgcccgcccagauguccauccagcugaucaacaaggccgugaacgcccugaucaacgaccagcucaucaugaagaaccaccuccgcgacaucaugggcauccccuacugcaacuacagccgguacugcuaccugaaccacaccgucaccgggaagaccucccugccccgcugcugccuggugagcaacggcuccuaccugaacgagacgcacuucagcgacgacaucgagcagcaggcggacaacaugaucaccgagaugcuccagaaggaguacauggaccggcagggcaagaccccgcuggggcugguggaccucuucgucuucuccaccagcuucuaccugaucuccaucuuccugcaccuggugaagaucccgacgcaccgccacaucgugggcaagcccugccccaagccccaccggcucaaccacauggggaucugcagcugcggccuguacaagcacccggggguccccgugaaguggaagcgcugaggacuagucccuguucccagagcccacuuuuuuuucuuuuuuugaaauaaaauagccugucuuucagaucucaaaggcucuuuucagagccaccaaaaaaaaaaaaaaaaaaaaaaaaaaaaaaaaaaaaaaaaaaaaaaaaaaaaaaaaaaaaaaaaagaauu

SEQ ID NO: 24808 - RNA, 1714 nt, Artificial Sequence
  mRNA product Design a-1 (hSL-A64-N5) comprising derived and/or modified sequence from LASV(GA391;Clade III)__CAA36645__GPCmut3 (opt1)
aggagagucccgcagucggcguccagcggcucugcuuguucgugugugugucguugcaggccuuauucaagcuuaccaugggccagaucgugaccuucuuccaggaggucccccacgugaucgaggaggugaugaacaucguccugaucgcccucagcauccuggccauccugaaggggcucuacaacguggcgaccugcggccugaucgggcuggugacguuccuccugcuguccggccgcagcugcucccucaucuacaaggggaccuacgagcugcagacccuggagcucaacauggagacccugaacaugacgaugccgcugagcugcaccaagaacaacucccaccacuacauccgggucggcaacgagaccggccucgagcugacccugacgaacaccagcauccucaaccacaaguucugcaaccuguccgacgcccacaagcgcaaccuguacgaccacagccucauguccaucaucagcaccuuccaccuguccauccccaacuucaaccaguacgaggccaugagcugcgacuucaacgggggcaagaucaccgugcaguacaaccugucccacagcuucgccguggacgccgcggggcacugcggcacgcucgccaacgggguccugcagaccuucaugcggauggccuggggcggcuccuacaucgcccuggacagcgggcgcggcaacugggacugcaucaugaccuccuaccaguaccucaucauccagaacaccacgugggacgaccacugccaguucagccggcccucccccaucggguaccugggccugcucagccagcgcacccgggacaucuacaucagccgccggcgccggggcaccuucaccuggacgcucuccgacagcgaggggaacgagaccccgggcggguacugccugacccgcuggaugcugaucgaggcggagcucaagugcuucggcaacaccgccguggccaagugcaacgagaagcacgacgaggaguucugcgacaugcugcggcuguucgacuucaacaagcaggccauccgccggcucaagacgcccgcccagauguccauccagcugaucaacaaggcggugaacgcccugaucaacgaccagcucaucaugaagaaccaccuccgcgacaucauggggauccccuacugcaacuacagccgguacugcuaccugaaccacaccuccaccggcaagaccagccugccccgcugcugccugaucuccaacggcagcuaccugaacgagacgaaguucuccgacgacaucgagcagcaggccgacaacaugaucaccgagaugcuccagaaggaguacaucgaccggcaggggaagacgccccugggccuggucgaccuguucguguucagcaccuccuucuaccucaucagcaucuuccugcaccuggugaagaucccgacccaccgccacaucgucgggaagcccugccccaagccccaccggcucaaccacaugggcaucugcuccugcgggcuguacaagcagccgggcgugcccgugcgcuggaagcggugaggacuagucccuguucccagagcccacuuuuuuuucuuuuuuugaaauaaaauagccugucuuucagaucucaaaggcucuuuucagagccaccaaaaaaaaaaaaaaaaaaaaaaaaaaaaaaaaaaaaaaaaaaaaaaaaaaaaaaaaaaaaaaaaagaauu

SEQ ID NO: 24809 - RNA, 1717 nt, Artificial Sequence
  mRNA product Design a-1 (hSL-A64-N5) comprising derived and/or modified sequence from LASV(AV;Clade V)__CCA30314__GPCmut3 (opt1)
aggagagucccgcagucggcguccagcggcucugcuuguucgugugugugucguugcaggccuuauucaagcuuaccaugggccagaucgugaccuucuuccaggaggucccccacgugaucgaggaggugaugaacaucguccugaucgcccucagcauccuggccgugcugaaggggcucuacaacaucgcgaccugcggccugaucgggcugaucacguuccuccugcugugcggccgcuccugcagcuccaaccucuacaaggggguguacgagcugcagagccuggaccucaacauggagacccugaacaugaccaugccgcuguccugcaccaagaacaacagccaccacuacauccgggucggcaacgacacgggccucgagcugacccugaccaacaccuccauccucaaccacaaguucugcaaccugagcgacgcccacaagaaggaccuguacgaccacgcccucauguccaucaucagcacguuccaccuguccauccccaacuucaaccaguacgaggccaugagcugcgacuucaacgggggcaagaucuccgugcaguacaaccugagccacuccuacgccaucgacgcggccaaccacugcgggaccguggccaacggcauccuccagaccuucaugcgcauggccuggggcgggagcuacaucgcgcuggacuccggccgggggaacugggacugcaucaugaccagcuaccaguaccugaucauccagaacacgaccugggagaaccacugccaguucucccgccccagccccaucggcuaccucgggcugcugagccagcggacccgcgacaucuacaucucccggcgccgccggggcaccuucacguggacccugagcgacuccgagggcaacgccacccccgggggcuacugccucacccgguggaugcugaucgaggccgagcugaagugcuucgggaacacggccgucgccaagugcaacgagaagcacgacgaggaguucugcgacaugcuccgccuguucgacuucaacaagcaggcgaucagccggcugaagucccccgcccagaugagcauccagcucaucaacaaggccgugaacgcccugaucaacgaccagcugaucaugaagaaccaccuccgcgacaucaugggcauccccuacugcaacuacuccaaguacugcuaccugaaccacaccaucaccgggaagaccagccugcccaagugcugccucguguccaacggcagcuaccugaacgagacgcacuucuccgacgacaucgagcagcaggccgacaacaugaucaccgagaugcugcagaaggaguacauggagcggcagggcaagaccccgcucgggcuggucgaccuguucguguucagcaccuccuucuaccugaucagcaucuuccuccgccuggugaagaucccgacgcaccggcacaucgucggcaagcccugccccaagccccaccgccugaaccacauggggaucugcuccugcggccucuacaagcagccgggggugcccgugcgguggaagcgcugaggacuagucccuguucccagagcccacuuuuuuuucuuuuuuugaaauaaaauagccugucuuucagaucucaaaggcucuuuucagagccaccaaaaaaaaaaaaaaaaaaaaaaaaaaaaaaaaaaaaaaaaaaaaaaaaaaaaaaaaaaaaaaaaagaauu

SEQ ID NO: 24810 - RNA, 1714 nt, Artificial Sequence
  mRNA product Design a-1 (hSL-A64-N5) comprising derived and/or modified sequence from LASV(Togo/2016/7082;Clade VI)__AMR44577__GPCmut3 (opt1)
aggagagucccgcagucggcguccagcggcucugcuuguucgugugugugucguugcaggccuuauucaagcuuaccaugggccagaucaucaccuucuuccaggaggugccccacgucaucgaggaggugaugaacaucgugcugaucgcccucagccugcuggccauccucaagggggucuacaacguggcgaccugcggcaucaucgggcuggugacguuccuguuccucugcggccgcuccugcagccugaucuacaagggguccuacgagcugcagacccucgagcugaacauggagacccugaacaugaccaugccgcucagcugcacgaagaacuccagccaccacuacauccgggucggcaacgagaccggccuggagcugacccucaccaacacguccaucaucaaccacaaguucugcaaccugagcgacgcccacaagcgcaaccuguacgaccacgcccucauguccauccugagcaccuuccaccuguccauccccaacuucaaccaguacgaggccaugagcugcgacuucaacgggggcaagaucuccgugcaguacaaccucagccacgccuacgcgguggacgccgccgagcacugcgggaccgucgccaacggcgugcugcagaccuucaugcggauggcguggggcggguccuacaucgcccuggacagcggccgcgggaacugggacugcaucaugacguccuaccaguaccucaucauccagaacaccaccugggaggaccacugccaguucagccggcccucccccaucggcuaccuggggcugcucagccagcgcacccgggacaucuacaucagccgccggcgccggggcacguucaccuggacccucuccgacagcgagggcaacgagacccccgggggcuacugccugacgcgcuggaugcugaucgaggccgagcucaagugcuucgggaacaccgccguggccaagugcaacgagaagcacgacgaggaguucugcgacaugcugcggcuguucgacuucaacaagcaggcgauccagcgccucaagucccccgcccagaugagcauccagcugaucaacaaggccgucaacgcccugaucaacgaccagcucaucaugaagaaccaccuccgggacaugaugggcauccccuacugcaacuacuccaaguacugcuaccugaaccacaccagcuccgggcgcaccagccugcccaagugcugccugguguccaacggcagcuaccugaacgagacgcacuucuccgacgacaucgagcagcaggccgacaacaugaucaccgagaugcuccagaaggaguacaucgaccggcagggcaagaccccgcuggggcugguggaccucuucgucuucagcaccuccuucuaccugaucagcaucuuccugcaccugaucaagaucccgacgcaccgccacaucgugggcaagcccugccccaagccccaccggcucaaccacauggggaucugcuccugcggccuguacaagcagccgggggugcccacccgcuggaagcggugaggacuagucccuguucccagagcccacuuuuuuuucuuuuuuugaaauaaaauagccugucuuucagaucucaaaggcucuuuucagagccaccaaaaaaaaaaaaaaaaaaaaaaaaaaaaaaaaaaaaaaaaaaaaaaaaaaaaaaaaaaaaaaaaagaauu

SEQ ID NO: 24811 - RNA, 1714 nt, Artificial Sequence
  mRNA product Design a-1 (hSL-A64-N5) comprising derived and/or modified sequence from LASV(KAK-428;Clade n.d. (VII))__ANH09740__GPCmut3 (opt1)
aggagagucccgcagucggcguccagcggcucugcuuguucgugugugugucguugcaggccuuauucaagcuuaccaugggccagaucgugaccuucuuccaggaggucccccacgugaucgaggaggugaugaacaucguccugaucgcccucagccugcuggccauccucaaggggcuguacaacuucgcgaccugcggcgugaucgggcugaucacguuccuccugcugugcggccgcuccugcagcgccaccuacaaggggcaguacgagcuccagacccuggagcugaacauggagucccucaacaugaccaugccgcugagcugcacgaagaacaacucccaccacuacauccgggccggcaacaacaccggccuggagcucacccugaccaacacgagcaucaucucccacaaguucugcaaccugagcgacgcccacaagaagaaccucuacgaccacacccugauguccaucaucaccaccuuccaccugagcauccccaacuucaaccaguacgaggccauguccugcgacuucaacgggggcaagaucagcauccaguacaaccucucccacagcuacgcgggggacgccgcccagcacugcggcacgguggccaacgggguccugcagaccuucaugcgcauggcguggggcggcuccuaccuggcccucgacagcgggcggcgcggcugggacugcaucaucuccagcuaccaguaccugaucauccagaacaccaccugggacgaccacugccaguucucccggcccagccccaucggguaccugggcuucgugagccagaagacgcgcgacaucuacaucucccggcgccgccggggcaccuucaccuggacccugagcgacuccgaggggcacgacaugccgggcggguacugccucacgcgguggaugcugaucgaggccgaccugaagugcuucggcaacaccgccguggccaagugcaacgagaagcacgacgaggaguucugcgacauguggcgccucuucgacuucaacaagcaggcgauccagcggcugaaggcccccgcccagaugaacauccagcugaucaacaaggccgucaacgcccucaucaacgaccagcugaugaugaagaaccaccuccgcgacaucauggggauccccuacugcaacuacagcaaguucugcuaccugaacaacaccaccacgggccggaccucccugccccgcugcugccugaucagcaacggcuccuaccucaacgagacccacuucagcgacgacaucgagcagcaggcggacaacaugaucaccgagaugcugcagaaggaguacauggaccggcaggggaagacgccccugggccucguggaccuguucguguucuccaccagcuucuaccugaucaccaucuuccuccaccuggucaagaucccgacccaccgccacaucguggggaagcccugccccaagccccaccggcugaaccacaugggcaucugcuccugcgggcuguacaagcagccgggcgugcccguccgcuggaagcggugaggacuagucccuguucccagagcccacuuuuuuuucuuuuuuugaaauaaaauagccugucuuucagaucucaaaggcucuuuucagagccaccaaaaaaaaaaaaaaaaaaaaaaaaaaaaaaaaaaaaaaaaaaaaaaaaaaaaaaaaaaaaaaaaagaauu

SEQ ID NO: 24812 - RNA, 1714 nt, Artificial Sequence; identical to SEQ ID NO: 24806
  mRNA product Design a-1 (hSL-A64-N5) comprising derived and/or modified sequence from LASV(Pinneo-NIG-1969;Clade I)__AIT17836__GPCmut3 (opt1)

SEQ ID NO: 24813 - RNA, 1714 nt, Artificial Sequence
  mRNA product Design a-1 (hSL-A64-N5) comprising derived and/or modified sequence from LASV(ISTH0009-NIG-2011;Clade II)__AIT17404__GPCmut3 (opt1)
aggagagucccgcagucggcguccagcggcucugcuuguucgugugugugucguugcaggccuuauucaagcuuaccaugggccagaucaucaccuucuuccaggaggugccccacgucaucgaggaggugaugaacaucgugcugaucgcccucagccugcuggccauccucaaggggaucuacaacgucgcgaccugcggccuguucgggcugguguccuuccuccugcugugcggccgcagcugcuccacgaccuacaaggggguguacgagcuccagacccuggagcuggacauggccagccucaacaugaccaugccgcuguccugcacgaagaacaacagccaccacuacaucauggucggcaacgagaccggccuggagcucacccugaccaacacguccaucaucaaccacaaguucugcaaccugagcgacgcccacaagaagaaccucuacgaccacgcccugauguccaucaucagcaccuuccaccuguccauccccaacuucaaccaguacgaggccaugagcugcgacuucaacgggggcaagaucuccgugcaguacaaccucagccacgcguacgccguggacgccgccaaccacugcgggaccaucgcgaacggcguccugcagaccuucaugcggauggccuggggcggguccuacaucgcccuggacagcggcaagggguccugggacugcaucaugacgagcuaccaguaccucaucauccagaacaccaccugggaggaccacugccaguucucccgccccagccccaucggcuaccuggggcugcucagccagcggacccgcgacaucuacaucucccggcgccgccggggcacguucaccuggacccucagcgacuccgagggcaacgagacccccgggggcuacugccugacgcgguggaugcugaucgaggccgagcucaagugcuucgggaacaccgccguggcgaagugcaacgagaagcacgacgaggaguucugcgacaugcugcgccuguucgacuucaacaagcaggccauccggcgccucaagacccccgcccagaugagcauccagcugaucaacaaggccgugaacgcccugaucaacgaccagcucaucaugaagaaccaccuccgggacaucaugggcaucccguacugcaacuacuccaaguacugcuaccugaaccacaccgucacggggaagaccagccugccccgcugcugccugguguccaacggcagcuaccugaacgagacccacuucuccgacgacaucgagcagcaggcggacaacaugaucaccgagcuccugcagaaggaguacauggaccggcagggcaagacgccccuggggcucguggaccuguucgucuucagcaccuccuucuaccugaucagcaucuuccugcaccucaucaagaucccgacccaccgccacaucaccggcaagcccugccccaagccccaccggcugaaccacauggggaucugcuccugcggccuguacaagcacccgggggugcccgugaaguggaagcgcugaggacuagucccuguucccagagcccacuuuuuuuucuuuuuuugaaauaaaauagccugucuuucagaucucaaaggcucuuuucagagccaccaaaaaaaaaaaaaaaaaaaaaaaaaaaaaaaaaaaaaaaaaaaaaaaaaaaaaaaaaaaaaaaaagaauu

SEQ ID NO: 24814 - RNA, 1714 nt, Artificial Sequence
  mRNA product Design a-1 (hSL-A64-N5) comprising derived and/or modified sequence from LASV(ISTH2010-NIG-2012;Clade II)__AIT17482__GPCmut3 (opt1)
aggagagucccgcagucggcguccagcggcucugcuuguucgugugugugucguugcaggccuuauucaagcuuaccaugggccagaucaucaccuucuuccaggaggugccccacgucaucgaggaggugaugaacaucgugcugaucgcccucagccugcuggccauccucaaggggaucuacaacgucgcgaccugcggccuguucgggcugguguccuuccuccugcugugcggccgcagcugcuccacgaccuacaaggggguguacgagcuccagacccuggagcuggacauggccagccucaacaugaccaugccgcuguccugcacgaagaacaacagccaccacuacaucauggucggcaacgagaccggccuggagcucacccugaccaacacguccaucaucaaccacaaguucugcaaccugagcgacgcccacaagaagaaccucuacgaccacgcccugauguccaucaucagcaccuuccaccuguccauccccaacuucaaccaguacgaggccaugagcugcgacuucaacgggggcaagaucuccgugcaguacaaccucagccacgcguacgccguggacgccgccaaccacugcgggaccaucgcgaacggcguccugcagaccuucaugcggauggccuggggcggguccuacaucgcccuggacagcggcaagggguccugggacugcaucaugacgagcuaccaguaccucaucauccagaacaucaccugggaggaccacugccaguucucccgccccagccccaucggcuaccuggggcugcucagccagcggacccgcgacaucuacaucucccggcgccgccggggcaccuucacguggacccucagcgacuccgagggcaacgagacccccgggggcuacugccugacccgguggaugcugaucgaggccgagcucaagugcuucgggaacacggccguggcgaagugcaacgagaagcacgacgaggaguucugcgacaugcugcgccuguucgacuucaacaagcaggccauccggcgccucaagacccccgcccagaugagcauccagcugaucaacaaggccgugaacgcccugaucaacgaccagcucaucaugaagaaccaccuccgggacaucaugggcauccccuacugcaacuacuccaaguacugcuaccugaaccacaccgucaccgggaagacgagccugccccgcugcugccugguguccaacggcagcuaccugaacgagacccacuucuccgacgacaucgagcagcaggcggacaacaugaucaccgagcuccugcagaaggaguacaucgaccggcagggcaagaccccgcuggggcucguggaccuguucgucuucagcacguccuucuaccugaucagcaucuuccugcaccucgugaagaucccgacccaccgccacguggucggcaagcccugccccaagccccaccggcugaaccacauggggaucugcuccugcggccuguacaagcacccgggggugcccgugaaguggaagcgcugaggacuagucccuguucccagagcccacuuuuuuuucuuuuuuugaaauaaaauagccugucuuucagaucucaaaggcucuuuucagagccaccaaaaaaaaaaaaaaaaaaaaaaaaaaaaaaaaaaaaaaaaaaaaaaaaaaaaaaaaaaaaaaaaagaauu

SEQ ID NO: 24815 - RNA, 1714 nt, Artificial Sequence
  mRNA product Design a-1 (hSL-A64-N5) comprising derived and/or modified sequence from LASV(Lassa virus/H.sapiens-wt/NGA/2015/ISTH_0543;Clade II)__AVO03639__GPCmut3 (opt1)
aggagagucccgcagucggcguccagcggcucugcuuguucgugugugugucguugcaggccuuauucaagcuuaccaugggccagaucaucaccuucuuccaggaggugccccacgucaucgaggaggugaugaacaucgugcugaucgcccucagccugcuggccauccucaaggggaucuacaacgucgcgaccugcggccuguucgggcugguguccuuccuccugcugugcggccgcagcugcuccacgaccuacaaggggguguacgagcuccagacccuggagcuggacauggccaaccucaacaugaccaugccgcugagcugcacgaagaacaacucccaccacuacaucauggucggcaacgagaccggccuggagcucacccugaccaacacgagcaucaucaaccacaaguucugcaaccuguccgacgcccacaagaagaaccucuacgaccacgcccugaugagcaucaucuccaccuuccaccugagcauccccaacuucaaccaguacgaggccauguccugcgacuucaacgggggcaagaucagcgugcaguacaaccucucccacaccuacgcgguggacgccgccaaccacugcgggaccaucgccaacggcguccugcagacguucaugcggauggcguggggcgggagcuacaucgcccuggacuccggcaaggggagcugggacugcaucaugaccuccuaccaguaccucgugauccagaacaccaccugggaggaccacugccaguucagccgccccucccccaucggcuaccuggggcugcucagccagcggacgcgcgacaucuacaucagccggcgccgccggggcaccuucaccuggacccucuccgacagcgagggcaacgagacgcccgggggcuacugccugacccgguggaugcugaucgaggccgagcucaagugcuucgggaacaccgccguggccaagugcaacgagaagcacgacgaggaguucugcgacaugcugcgccuguucgacuucaacaagcaggcgauccggcgccucaagacccccgcccagauguccauccagcugaucaacaaggccgucaacgcccugaucaacgaccagcucaucaugaagaaccaccuccgggacaucaugggcauccccuacugcaacuacagcaaguacugcuaccugaaccacacggugaccgggaagaccucccugccccgcugcugccuggugagcaacggcuccuaccugaacgagacccacuucagcgacgacaucgagcagcaggccgacaacaugaucacggagcuccugcagaaggaguacaucgaccggcagggcaagaccccgcuggggcucgucgaccuguucguguucuccaccagcuucuaccugaucuccaucuuccugcaccucgugaagaucccgacccaccgccacaucacgggcaagcccugccccaagccccaccggcugaaccacauggggaucugcagcugcggccuguacaagcacccggggguccccgugaaguggaagcgcugaggacuagucccuguucccagagcccacuuuuuuuucuuuuuuugaaauaaaauagccugucuuucagaucucaaaggcucuuuucagagccaccaaaaaaaaaaaaaaaaaaaaaaaaaaaaaaaaaaaaaaaaaaaaaaaaaaaaaaaaaaaaaaaaagaauu

SEQ ID NO: 24816 - RNA, 1714 nt, Artificial Sequence
  mRNA product Design a-1 (hSL-A64-N5) comprising derived and/or modified sequence from LASV(Lassa virus/H.sapiens-wt/NGA/2016/ISTH_0009;Clade II)__AVO03571__GPCmut3 (opt1)
aggagagucccgcagucggcguccagcggcucugcuuguucgugugugugucguugcaggccuuauucaagcuuaccaugggccagaucaucaccuucuuccaggaggugccccacgucaucgaggaggugaugaacaucgugcugaucgcccucagccugcuggccauccucaaggggaucuacaacgucgcgaccugcggccugcuggggcucguguccuuccugcugcucugcggccgcagcugcuccacgaccuacaaggggguguacgagcugcagacccuggagcucgacauggccagccugaacaugaccaugccgcuguccugcacgaagaacaacagccaccacuacaucauggucggcaacgagaccggccucgagcugacccugaccaacacguccaucaucaaccacaaguucugcaaccucagcgacgcccacaagaagaaccuguacgaccacgcccugauguccaucaucagcaccuuccaccucuccauccccaacuucaaccaguacgaggccaugagcugcgacuucaacgggggccggaucuccgugcaguacaaccugagccacuccuacgcgguggacgccgccaaccacugcgggaccaucgccaacggcguccugcagaccuucaugcgcauggcguggggcgggagcuacaucgcccucgacuccggcaaggggagcugggacugcaucaugacguccuaccaguaccugaucauccagaacaccaccugggaggaccacugccaguucagccggcccagccccaucggcuaccuggggcuccugucccagcgcacccgggacaucuacaucagccgccggcgccggggcacguucaccuggacccuguccgacagcgagggcaacgagacccccgggggcuacugccugacgcgcuggaugcucaucgaggccgagcugaagugcuucgggaacaccgccguggccaagugcaacgagaagcacgacgaggaguucugcgacaugcugcggcuguucgacuucaacaagcaggcgauccgccggcugaagacccccgcccagauguccauccagcugaucaacaaggccgugaacgcccucaucaacgaccagcugaucaugaagaaccaccuccgcgacaucaugggcaucccguacugcaacuacagcaaguacugcuaccucaaccacaccgucacggggaagaccucccugccccggugcugccuggugagcaacggcuccuaccucaacgagacccacuucagcgacgacaucgagcagcaggccgacaacaugaucaccgagcugcugcagaaggaguacaucgaccgccagggcaagacgccccucgggcugguggaccuguucgucuucuccaccagcuucuaccugaucuccaucuuccuccaccuggugaagaucccgacccaccggcacaucaccggcaagcccugccccaagccccaccgccugaaccacauggggaucugcagcugcggccucuacaaccacccgggggugcccgucaaguggaagcggugaggacuagucccuguucccagagcccacuuuuuuuucuuuuuuugaaauaaaauagccugucuuucagaucucaaaggcucuuuucagagccaccaaaaaaaaaaaaaaaaaaaaaaaaaaaaaaaaaaaaaaaaaaaaaaaaaaaaaaaaaaaaaaaaagaauu

SEQ ID NO: 24817 - RNA, 1714 nt, Artificial Sequence
  mRNA product Design a-1 (hSL-A64-N5) comprising derived and/or modified sequence from LASV(Lassa virus/H.sapiens-wt/NGA/2016/ISTH_0017;Clade II)__AVO03567__GPCmut3 (opt1)
aggagagucccgcagucggcguccagcggcucugcuuguucgugugugugucguugcaggccuuauucaagcuuaccaugggccagaucaucaccuucuuccaggaggugccccacgucaucgaggaggugaugaacaucgugcugaucgcccucagccugcuggccauccucaaggggaucuacaacgucgcgaccugcggccuguucgggcugguguccuuccuccugcugugcggccgcagcugcuccacgaccuacaaggggguguacgagcuccagacccuggagcuggacauggccagccucaacaugaccaugccgcuguccugcacgaagaacaacagccaccacuacaucauggucggcaacgagaccggccuggagcucacccugaccaacacguccaucaucaaccacaaguucugcaaccugagcgacgcccacaagaagaaccucuacgaccacgcccugauguccaucaucagcaccuuccaccuguccauccccaacuucaaccaguacgaggccaugagcugcgacuucaacgggggcaagaucuccgugcaguacaaccucagccacaccuacgcgaucgacgccgccaaccacugcgggaccaucgccaacggcgugcugcagacguucaugcggauggcguggggcggguccuacaucgcccuggacagcggcaagggguccugggacugcaucaugaccagcuaccaguaccucaucauccagaacaccaccugggaggaccacugccaguucucccgccccagccccaucggcuaccuggggcugcucagccagcggacgcgcgacaucuacaucucccggcgccgccggggcaccuucaccuggacccucagcgacuccgagggcaacgagacgcccgggggcuacugccugacccgguggaugcugaucgaggccgagcucaagugcuucgggaacaccgccgucgccaagugcaacgagaagcacgacgaggaguucugcgacaugcugcgccuguucgacuucaacaagcaggcgauccggcgccucaagacccccgcccagaugagcauccagcugaucaacaaggccgugaacgcccugaucaacgaccagcucaucaugaagaaccaccuccgggacaucaugggcauccccuacugcaacuacuccaaguacugcuaccugaaccacacggugaccgggaagaccagccugccccgcugcugccuggucuccaacggcagcuaccugaacgagacccacuucuccgacgacaucgagcagcaggccgacaacaugaucacggagcuccugcagaaggaguacauggaccggcagggcaagaccccgcuggggcucguggaccuguucguguucagcaccuccuucuaccugaucagcaucuuccugcaccucguccgcaucccgacccaccggcacgugaucggcaagcccugccccaagccccaccgccugaaccacauggggaucugcuccugcggccuguacaagcacccgggggugcccgucaaguggaagcggugaggacuagucccuguucccagagcccacuuuuuuuucuuuuuuugaaauaaaauagccugucuuucagaucucaaaggcucuuuucagagccaccaaaaaaaaaaaaaaaaaaaaaaaaaaaaaaaaaaaaaaaaaaaaaaaaaaaaaaaaaaaaaaaaagaauu

SEQ ID NO: 24818 - RNA, 1714 nt, Artificial Sequence
  mRNA product Design a-1 (hSL-A64-N5) comprising derived and/or modified sequence from LASV(Lassa virus/H.sapiens-wt/NGA/2018/ISTH_0959;Clade II)__AVV65099__GPCmut3 (opt1)
aggagagucccgcagucggcguccagcggcucugcuuguucgugugugugucguugcaggccuuauucaagcuuaccaugggccagaucaucaccuucuuccaggaggugccccacgucaucgaggaggugaugaacaucgugcugaucgcccucagccugcuggccauccucaaggggaucuacaacgucgugaccugcggccuguucgggcugguguccuuccuccugcugugcggccgcagcugcuccacgaccuacaagggggucuacgagcuccagacccuggagcuggacauggcgagccucaacaugaccaugccgcuguccugcacgaagaacaacagccaccacuacaucauggugggcaacgagaccggccuggagcucacccugaccaacacguccaucaucaaccacaaguucugcaaccugagcgacgcccacaagaagaaccucuacgaccacgcccugauguccaucaucagcaccuuccaccuguccauccccaacuucaaccaguacgaggccaugagcugcgacuucaacgggggcaagaucuccgugcaguacaaccucagccacgccuacgcgaucgacgccgccaaccacugcgggaccaucgccaacggcguccugcagaccuucaugcggauggcguggggcggguccuacaucgcccuggacagcggcaagggguccugggacugcaucaugacgagcuaccaguaccucaucauccagaacaccaccugggaggaccacugccaguucucccgccccagccccaucggcuaccuggggcugcucagccagcggacccgcgacaucuacaucucccggcgccgccggggcacguucaccuggacccucagcgacuccgagggcaacgagacccccgggggcuacugccugacgcgguggaugcugaucgaggccgagcucaagugcuucgggaacaccgccguggccaagugcaacgagaagcacgacgaggaguucugcgacaugcugcgccuguucgacuucaacaagcaggcgauccggcgccucaagacccccgcccagaugagcauccagcugaucaacaaggccgugaacgcccugaucaacgaccagcucaucaugaagaaccaccuccgggacaucaugggcaucccguacugcaacuacuccaaguacugcuaccugaaccacaccgucacggggaagaccagccugccccgcugcugccugguguccaacggcagcuaccugaacgagacccacuucuccgacgacaucgagcagcaggccgacaacaugaucaccgagcuccugcagaaggaguacaucgaccggcagggcaagacgccccuggggcucguggaccuguucgucuucagcaccuccuucuaccugaucagcaucuuccugcaccucgugaagaucccgacccaccgccacgugaucggcaagcccugccccaagccccaccggcugaaccacauggggaucugcuccugcggccuguacaagcacccggggguccccgugaaguggaagcgcugaggacuagucccuguucccagagcccacuuuuuuuucuuuuuuugaaauaaaauagccugucuuucagaucucaaaggcucuuuucagagccaccaaaaaaaaaaaaaaaaaaaaaaaaaaaaaaaaaaaaaaaaaaaaaaaaaaaaaaaaaaaaaaaaagaauu

SEQ ID NO: 24819 - RNA, 1714 nt, Artificial Sequence
  mRNA product Design a-1 (hSL-A64-N5) comprising derived and/or modified sequence from LASV(LASV003-NIG-2008;Clade II)__AIT17580__GPCmut3 (opt1)
aggagagucccgcagucggcguccagcggcucugcuuguucgugugugugucguugcaggccuuauucaagcuuaccaugggccagaucaucaccuucuuccaggaggugccccacgucaucgaggaggugaugaacaucgugcugaucgcccucagccugcuggccauccucaaggggaucuacaacgucgcgaccugcggccuguucgggcugguguccuuccuccugcugugcggccgcagcugcuccacgaccuacaaggggguguacgagcuccagacccuggagcuggacauggccagccucaacaugaccaugccgcuguccugcacgaagaacaacagccaccacuacaucauggucggcaacgagaccggccuggagcucacccugaccaacacguccaucaucaaccacaaguucugcaaccugagcgacgcccacaagaagaaccucuacgaccacgcccugauguccaucaucagcaccuuccaccuguccauccccaacuucaaccaguacgaggccaugagcugcgacuucaacgggggcaagaucuccgugcaguacaaccucagccacaccuacgcgguggacgccgccaaccacugcgggaccaucgccaacggcguccugcagacguucaugcggauggcguggggcggguccuacaucgcccuggacagcggcaagggguccugggacugcaucaugaccagcuaccaguaccucaucauccagaacaccaccugggaggaccacugccaguucucccgccccagccccaucggcuaccuggggcugcucagccagcggacgcgcgacaucuacaucucccggcgccgccggggcaccuucaccuggacccucagcgacuccgagagcaacgagacgccgggcggguacugccugacccgguggaugcugaucgaggccgagcucaagugcuucggcaacaccgccguggccaagugcaacgagaagcacgacgaggaguucugcgacaugcugcgccuguucgacuucaacaagcaggcgauccggcgccucaaggcccccgcccagauguccauccagcugaucaacaaggccgugaacgcccugaucaacgaccagcucaucaugaagaaccaccuccgggacaucauggggauccccuacugcaacuacagcaaguacugcuaccugaaccacaccgucacgggccgcaccucccugccccggugcugccuggugagcaacggguccuaccugaacgagacccacuucagcgacgacaucgagcagcaggcggacaacaugaucaccgagcuccugcagaaggaguacauggaccgccagggcaagacgccccugggccucguggaccuguucgucuucuccaccagcuucuaccugaucuccaucuuccugcaccucgugaagaucccgacccaccggcacgugaucgggaagcccugccccaagccccaccgccugaaccacaugggcaucugcagcugcgggcuguacaagcacccgggcguccccgugaaguggaagcggugaggacuagucccuguucccagagcccacuuuuuuuucuuuuuuugaaauaaaauagccugucuuucagaucucaaaggcucuuuucagagccaccaaaaaaaaaaaaaaaaaaaaaaaaaaaaaaaaaaaaaaaaaaaaaaaaaaaaaaaaaaaaaaaaagaauu

SEQ ID NO: 24820 - RNA, 1714 nt, Artificial Sequence
  mRNA product Design a-1 (hSL-A64-N5) comprising derived and/or modified sequence from LASV(LASV035-NIG-2009;Clade II)__AIT17588__GPCmut3 (opt1)
aggagagucccgcagucggcguccagcggcucugcuuguucgugugugugucguugcaggccuuauucaagcuuaccaugggccagaucaucaccuucuuccaggaggugccccacgucaucgaggaggugaugaacaucgugcugaucgcccucagccugcuggccauccucaaggggaucuacaacgucgcgaccugcggccuguucgggcugguguccuuccuccugcugugcggccgcagcugcuccacgaccuacaaggggguguacgagcuccagacccuggagcuggacauggccagccucaacaugaccaugccgcuguccugcacgaagaacaacagccaccacuacaucauggucggcaacgagaccggccuggagcucacccugaccaacacguccaucaucaaccacaaguucugcaaccugagcgacgcccacaagaagaaccucuacgaccacgcccugauguccaucaucagcaccuuccaccuguccauccccaacuucaaccaguacgaggccaugagcugcgacuucaacgggggcaagaucuccgugcaguacaaccucagccacgcguacgccguggacgccgccaaccacugcgggaccaucgcgaacggcguccugcagaccuucaugcggauggccuggggcggguccuacaucgcccuggacagcggcaagggguccugggacugcaucaugacgagcuaccaguaccucaucauccagaacaccaccugggaggaccacugccaguucucccgccccagccccaucggcuaccuggggcugcucagccagcggacccgcgacaucuacaucucccggcgccgccggggcacguucaccuggacccucagcgacuccgagggcaacgagacccccgggggcuacugccugacgcgguggaugcugaucgaggccgagcucaagugcuucgggaacaccgccguggcgaagugcaacgagaagcacgacgaggaguucugcgacaugcugcgccuguucgacuucaacaagcaggccauccggcgccucaaggcccccgcccagaugagcauccagcugaucaacaaggccgugaacgcgcugaucaacgaccagcucaucaugaagaaccaccuccgggacaucaugggcauccccuacugcaacuacuccaaguacugcuaccugaaccacaccgucaccgggaagacgagccugccccgcugcugccugguguccaacggcagcuaccugaacgagacccacuucuccgacgacaucgagcagcaggccgacaacaugaucaccgagcuccugcagaaggaguacaucgaccggcagggcaagaccccgcuggggcucguggaccuguucgucuucagcacguccuucuaccugaucagcaucuuccugcaccucgugaagaucccgacccaccgccacgugaucggcaagcccugccccaagccccaccggcugaaccacauggggaucugcuccugcggccuguacaagcacccggggguccccgugaaguggaagcgcugaggacuagucccuguucccagagcccacuuuuuuuucuuuuuuugaaauaaaauagccugucuuucagaucucaaaggcucuuuucagagccaccaaaaaaaaaaaaaaaaaaaaaaaaaaaaaaaaaaaaaaaaaaaaaaaaaaaaaaaaaaaaaaaaagaauu

SEQ ID NO: 24821 - RNA, 1714 nt, Artificial Sequence
  mRNA product Design a-1 (hSL-A64-N5) comprising derived and/or modified sequence from LASV(LASV1000-NIG-2009;Clade II)__AIT17782__GPCmut3 (opt1)
aggagagucccgcagucggcguccagcggcucugcuuguucgugugugugucguugcaggccuuauucaagcuuaccaugggccagaucaucaccuucuuccaggaggugccccacgucaucgaggaggugaugaacaucgugcugaucgcccucagccugcuggccauccucaaggggaucuacaacgucgcgaccugcggccuguucgggcugguguccuuccuccugcugugcggccgcagcugcuccacgaccuacaaggggguguacgagcuccagacccuggagcuggacauggccagccucaacaugaccaugccgcuguccugcacgaagaacaacagccaccacuacaucauggucggcaacgagaccggccuggagcucacccugaccaacacguccaucaucaaccacaaguucugcaaccugagcgacgcccacaagaagaaccucuacgaccacgcccugauguccaucaucagcaccuuccaccuguccauccccaacuucaaccaguacgaggccaugagcugcgacuucaacgggggcaagaucuccgugcaguacaaccucagccacaccuacgcgguggacgccgccaaccacugcgggaccaucgccaacggcguccugcagacguucaugcggauggcguggggcggguccuacaucgcccuggacagcggcaagggguccugggacugcaucaugaccagcuaccaguaccucaucauccagaacaccaccugggaggaccacugccaguucucccgccccagccccaucggcuaccuggggcugcucagccagcggacgcgcgacaucuacaucucccggcgccgccggggcaccuucaccuggacccucagcgacuccgagggcaacgagacgcccgggggcuacugccugacccgguggaugcugaucgaggccgagcucaagugcuucgggaacaccgccguggccaagugcaacgagaagcacgacgaggaguucugcgacaugcugcgccuguucgacuucaacaagcaggcgaucaagcggcucaagacccccgcccagaugagcauccagcugaucaacaaggccgugaacgcccugaucaacgaccagcucaucaugaagaaccaccuccgcgacaucaugggcauccccuacugcaacuacuccaaguacugcuaccugaaccacacggucaccgggaagaccagccugccccggugcugccugguguccaacggcagcuaccugaacgagacccacuucuccgacgacaucgagcagcaggccgacaacaugaucacggagcuccugcagaaggaguacaucgaccgccagggcaagaccccgcuggggcucguggaccuguucgucuucagcaccuccuucuaccugaucagcaucuuccugcaccucgugaagaucccgacccaccggcacguggucggcaagcccugccccaagccccaccgccugaaccacauggggaucugcuccugcggccuguacaagcacccgggggugcccgugaaguggaagcggugaggacuagucccuguucccagagcccacuuuuuuuucuuuuuuugaaauaaaauagccugucuuucagaucucaaaggcucuuuucagagccaccaaaaaaaaaaaaaaaaaaaaaaaaaaaaaaaaaaaaaaaaaaaaaaaaaaaaaaaaaaaaaaaaagaauu

SEQ ID NO: 24822 - RNA, 1714 nt, Artificial Sequence
  mRNA product Design a-1 (hSL-A64-N5) comprising derived and/or modified sequence from LASV(LASV221-NIG-2010;Clade II)__AIT17624__GPCmut3 (opt1)
aggagagucccgcagucggcguccagcggcucugcuuguucgugugugugucguugcaggccuuauucaagcuuaccaugggccagaucaucaccuucuuccaggaggugccccacgucaucgaggaggugaugaacaucgugcugaucgcccucagccugcuggccauccucaaggggaucuacaacgucgcgaccugcggccuguucgggcugguguccuuccuccugcugugcggccgcagcugcuccacgaccuacaaggggguguacgagcuccagacccuggagcuggacauggccagccucaacaugaccaugccgcuguccugcacgaagaacaacagccaccacuacaucauggucggcaacgagaccggccuggagcucacccugaccaacacguccaucaucaaccacaaguucugcaaccugagcgacgcccacaagaagaaccucuacgaccacgcccugauguccaucaucagcaccuuccaccuguccauccccaacuucaaccaguacgaggccaugagcugcgacuucaacgggggcaagaucuccgugcaguacaaccucagccacaccuacgcgaucgacgccgccaaccacugcgggaccaucgccaacggcgugcugcagacguucaugcggauggcguggggcggguccuacaucgcccuggacagcggcaagggguccugggacugcaucaugaccagcuaccaguaccucaucauccagaacaccaccugggaggaccacugccaguucucccgccccagccccaucggcuaccuggggcugcucagccagcggacgcgcgacaucuacaucucccggcgccgccggggcaccuucaccuggacccucagcgacuccgagggcaacgagacgcccgggggcuacugccugacccgguggaugcugaucgaggccgagcucaagugcuucgggaacaccgccgucgccaagugcaacgagaagcacgacgaggaguucugcgacaugcugcgccuguucgacuucaacaagcaggcgauccggcgccucaagacccccgcccagaugagcauccagcugaucaacaaggccgugaacgcccugaucaacgaccagcucaucaugaagaaccaccuccgggacaucaugggcauccccuacugcaacuacuccaaguacugcuaccugaaccacacggugaccgggaagaccagccugccccgcugcugccuggucuccaacggcagcuaccugaacgagacccacuucuccgacgacaucgagcagcaggccgacaacaugaucacggagaugcuccagaaggaguacauggaccggcagggcaagaccccgcuggggcugguggaccucuucguguucagcaccuccuucuaccugaucagcaucuuccugcaccuggucaagaucccgacccaccgccacgugaucggcaagcccugccccaagccccaccggcucaaccacauggggaucugcuccugcggccuguacaagcacccgggggugcccgucaaguggaagcgcugaggacuagucccuguucccagagcccacuuuuuuuucuuuuuuugaaauaaaauagccugucuuucagaucucaaaggcucuuuucagagccaccaaaaaaaaaaaaaaaaaaaaaaaaaaaaaaaaaaaaaaaaaaaaaaaaaaaaaaaaaaaaaaaaagaauu

SEQ ID NO: 24823 - RNA, 1714 nt, Artificial Sequence
  mRNA product Design a-1 (hSL-A64-N5) comprising derived and/or modified sequence from LASV(LASV237-NIG-2010;Clade II)__AIT17638__GPCmut3 (opt1)
aggagagucccgcagucggcguccagcggcucugcuuguucgugugugugucguugcaggccuuauucaagcuuaccaugggccagaucaucaccuucuuccaggaggugccccacgucaucgaggaggugaugaacaucgugcugaucgcccucagccugcuggccauccucaaggggaucuacaacgucgcgaccugcggccuguucgggcugguguccuuccuccugcugugcggccgcagcugcuccacgaccuacaaggggguguacgagcuccagacccuggagcuggacauggccagccucaacaugaccaugccgcuguccugcacgaagaacaacagccaccacuacaucauggucggcaacgagaccggccuggagcucacccugaccaacacguccaucaucaaccacaaguucugcaaccugagcgacgcccacaagaaggaccucuacgaccacgcccugauguccaucaucagcaccuuccaccuguccauccccaacuucaaccaguacgaggccaugagcugcgacuucaacgggggcaagaucuccgugcaguacaaccucagccacaccuacgcgguggacgccgccaaccacugcgggaccaucgccaacggcguccugcagacguucaugcggauggcguggggcggguccuacaucgcccuggacagcggcaagggguccugggacugcaucaugaccagcuaccaguaccucaucauccagaacaccaccugggaggaccacugccaguucucccgccccagccccaucggcuaccuggggcugcucagccagcggacgcgcgacaucuacaucucccggcgccgccggggcaccuucaccuggacccucagcgacuccgagggcaacgagacgcccgggggcuacugccugacccgguggaugcugaucgaggccgagcucaagugcuucgggaacaccgccguggccaagugcaacgagaagcacgacgaggaguucugcgacaugcugcgccuguucgacuucaacaagcaggcgauccggcgccucaagacccccgcccagaugagcauccagcugaucaacaaggccgugaacgcccugaucaacgaccagcucaucaugaagaaccaccuccgggacaucaugggcauccccuacugcaacuacuccaaguacugcuaccugaaccacacggucaccgggaagaccagccugccccgcugcugccugguguccaacggcagcuaccugaacgagacccacuucuccgacgacaucgagcagcaggccgacaacaugaucacggagcuccugcagaaggaguacauggaccggcagggcaagaccccgcuggggcucguggaccuguucgucuucagcaccuccuucuaccugaucagcaucuuccugcaccucaucaagaucccgacccaccgccacaucacgggcaagcccugccccaagccccaccggcugaaccacauggggaucugcuccugcggccuguacaagcacccgggggugcccgugaaguggaagcgcugaggacuagucccuguucccagagcccacuuuuuuuucuuuuuuugaaauaaaauagccugucuuucagaucucaaaggcucuuuucagagccaccaaaaaaaaaaaaaaaaaaaaaaaaaaaaaaaaaaaaaaaaaaaaaaaaaaaaaaaaaaaaaaaaagaauu

SEQ ID NO: 24824 - RNA, 1714 nt, Artificial Sequence
  mRNA product Design a-1 (hSL-A64-N5) comprising derived and/or modified sequence from LASV(LASV253-NIG-2011;Clade II)__AIT17670__GPCmut3 (opt1)
aggagagucccgcagucggcguccagcggcucugcuuguucgugugugugucguugcaggccuuauucaagcuuaccaugggccagaucaucaccuucuuccaggaggugccccacgucaucgaggaggugaugaacaucgugcugaucgcccucagccugcuggccauccucaaggggaucuacaacgucgcgaccugcggccuguucgggcugguguccuuccuccugcugugcggccgcagcugcuccacgaccuacaaggggguguacgagcuccagacccuggagcuggacauggccagccucaacaugaccaugccgcuguccugcacgaagaacaacagccaccacuacaucauggucggcaacgagaccggccuggagcucacccugaccaacacguccaucaucaaccacaaguucugcaaccugagcgacgcccacaagaagaaccucuacgaccacgcccugauguccaucaucagcaccuuccaccuguccauccccaacuucaaccaguacgaggccaugagcugcgacuucaacgggggcaagaucuccgugcaguacaaccucagccacaccuacgcgguggacgccgccaaccacugcgggaccaucgccaacggcguccugcagacguucaugcggauggcguggggcggguccuacaucgcccuggacagcggcaagggguccugggacugcaucaugaccagcuaccaguaccucaucauccagaacaccaccugggaggaccacugccaguucucccgccccagccccaucggcuaccuggggcugcucagccagcggacgcgcgacaucuacaucucccggcgccgccggggcaccuucaccuggacccucagcgacuccgagggcaacgagacgcccgggggcuacugccugacccgguggaugcugaucgaggccgagcucaagugcuucgggaacaccgccguggccaagugcaacgagaagcacgacgaggaguucugcgacaugcugcgccuguucgacuucaacaagcaggcgauccggcgccucaaggcccccgcccagaugagcauccagcugaucaacaaggccgugaacgcccugaucaacgaccagcucaucaugaagaaccaccuccgggacaucaugggcaucccguacugcaacuacuccaaguacugcuaccugaaccacaccgucacggggcgcaccagccugccccggugcugccugguguccaacggcagcuaccugaacgagacccacuucuccgacgacaucgagcagcaggcggacaacaugaucaccgagcuccugcagaaggaguacaucgaccgccagggcaagacgccccuggggcucguggaccuguucgucuucagcaccuccuucuaccugaucagcaucuuccugcaccucgugaagaucccgacccaccggcacaucaucggcaagcccugccccaagccccaccgccugaaccacauggggaucugcuccugcggccuguacaagcacccgggggugcccgucaaguggaagcggugaggacuagucccuguucccagagcccacuuuuuuuucuuuuuuugaaauaaaauagccugucuuucagaucucaaaggcucuuuucagagccaccaaaaaaaaaaaaaaaaaaaaaaaaaaaaaaaaaaaaaaaaaaaaaaaaaaaaaaaaaaaaaaaaagaauu

SEQ ID NO: 24825 - RNA, 1714 nt, Artificial Sequence
  mRNA product Design a-1 (hSL-A64-N5) comprising derived and/or modified sequence from LASV(LASV254-NIG-2011;Clade II)__AIT17674__GPCmut3 (opt1)
aggagagucccgcagucggcguccagcggcucugcuuguucgugugugugucguugcaggccuuauucaagcuuaccaugggccagaucaucaccuucuuccaggaggugccccacgucaucgaggaggugaugaacaucgugcugaucgcccucagccugcuggccauccucaaggggaucuacaacgucgcgaccugcggccuguucgggcugguguccuuccuccugcugugcggccgcagcugcuccacgaccuacaaggggguguacgagcuccagacccuggagcuggacaugaccaaccucaacaugacgaugccgcugagcugcaccaagaacaacucccaccacuacaucauggucggcaacgagaccggccuggagcucacccugacgaacaccagcaucaucaaccacaaguucugcaaccuguccgacgcccacaagaagaaccucuacaaccacgcccugaugagcaucaucuccaccuuccaccugagcauccccaacuucaaccaguacgaggccauguccugcgacuucaacgggggcaagaucagcgugcaguacaaccucucccacagcuacgccguggacgcggccaaccacugcgggaccaucgccaacggcguccugcagacguucaugcggauggccuggggcggguccuacaucgcgcuggacagcggcaaggggaacugggacugcaucaugaccuccuaccaguaccucaucauccagaacaccaccugggaggaccacugccaguucagccgccccucccccaucggcuaccuggggcugcucagccagcggacgcgcgacaucuacaucagccggcgccgccggggcaccuucaccuggacccucuccgacagcgagggcaacgagacgcccgggggcuacugccugacccgguggaugcugaucgaggccgagcucaagugcuucgggaacaccgccguggccaagugcaacgagaagcacgacgaggaguucugcgacaugcugcgccuguucgacuucaacaagcaggccauccggcgccucaagacccccgcgcaggccaacauccagcugaucaacaaggccgugaacgcccugaucaacgaccagcucaucaugaagaaccaccuccgggacaucaugggcauccccuacugcaacuacuccaaguacugcuaccugaaccacacggucaccgggaagaccagccugccccgcugcugccugguguccaacggcagcuaccugaacgagacccacuucuccgacgacaucgagcagcaggccgacaacaugaucacggagcuccugcagaaggaguacauggaccggcagggcaagaccccgcuggggcucguggaccuguucgucuucagcaccuccuucuaccugaucagcaucuuccugcaccucgugaagaucccgacccaccgccacgugaucggcaagcccugccccaagccccaccggcugaaccacauggggaucugcuccugcggccuguacaagcacccggggguccccgugaaguggaagcgcugaggacuagucccuguucccagagcccacuuuuuuuucuuuuuuugaaauaaaauagccugucuuucagaucucaaaggcucuuuucagagccaccaaaaaaaaaaaaaaaaaaaaaaaaaaaaaaaaaaaaaaaaaaaaaaaaaaaaaaaaaaaaaaaaagaauu

SEQ ID NO: 24826 - RNA, 1714 nt, Artificial Sequence
  mRNA product Design a-1 (hSL-A64-N5) comprising derived and/or modified sequence from LASV(Nig08-A19;Clade III)__ADU56618__GPCmut3 (opt1)
aggagagucccgcagucggcguccagcggcucugcuuguucgugugugugucguugcaggccuuauucaagcuuaccaugggccagaucgugaccuucuuccaggaggucccccacgugaucgaggaggugaugaacaucguccugaucgcccucagcauccuggccauccugaaggggcucuacaacaucgcgaccugcggccugaucgggcuggugacguuccuccugcuguccggccgcagcugcuccaugaccuacaaggggguguacgagcuccagacccuggagcugaacaugaacacccucaacaugacgaugccgcugagcugcaccaagaacaacucccaccacuacaucauggucggcaacgagaccggccuggagcucacccugacgaacaccagccugcuccaccacaaguucugcaaccuguccgacgcccacaagaagaaccuguacgaccacacccucaugagcaucaucuccaccuuccaccugagcauccccaacuucaaccaguacgaggccauguccugcgacuucaacgggggcaagaucacggugcaguacaaccugagccacuccuacgccaucgacgccgcgaaccacugcgggaccguggccaacggcguccuccagaccuucaugcggauggccuggggcgggagcuacaucgcccuggacuccggccgcgggaagugggacugcaucaugaccagcuaccaguaccugaucauccagaacacgaccugggaggaccacugccaguucucccggcccagccccaucggcuaccucgggcugcugucccagcgcacccgggacaucuacaucagccgccggcgccggggcaccuucacguggacccugagcgacuccgagggcaacgagacccccgggggcuacugccucacccgcuggaugcugaucgaggcggagcugaagugcuucgggaacacggccguggccaagugcaacgagaagcacgacgaggaguucugcgacaugcuccggcuguucgacuucaacaagcaggccauccgccggcugaaggcccccgcgcagaugagcauccagcucaucaacaaggccgugaacgcccugaucaacgaccagcugaucaugaagaaccaccuccgcgacaucaugggcauccccuacugcaacuacuccaaguacugcuaccugaaccacaccagcaccgggcggaccucccugccccgcugcugccucgucagcaacggcuccuaccugaacgagacgcacuucagcgacgacaucgagcagcaggccgacaacaugaucaccgagaugcugcagaaggaguaccucgaccggcagggcaagaccccgcuggggcugguggaccuguucguguucuccaccagcuucuaccucaucuccaucuuccugcaccuggucaagaucccgacgcaccgccacaucgugggcaagcccugccccaagccccaccggcucaaccacauggggaucugcagcugcggccuguacaagcagccgggggugcccguccgcuggaagcggugaggacuagucccuguucccagagcccacuuuuuuuucuuuuuuugaaauaaaauagccugucuuucagaucucaaaggcucuuuucagagccaccaaaaaaaaaaaaaaaaaaaaaaaaaaaaaaaaaaaaaaaaaaaaaaaaaaaaaaaaaaaaaaaaagaauu

SEQ ID NO: 24827 - RNA, 1717 nt, Artificial Sequence
  mRNA product Design a-1 (hSL-A64-N5) comprising derived and/or modified sequence from LASV(G1180-SLE-2010;Clade IV)__AIT17168__GPCmut3 (opt1)
aggagagucccgcagucggcguccagcggcucugcuuguucgugugugugucguugcaggccuuauucaagcuuaccaugggccagaucgugaccuucuuccaggaggucccccacgugaucgaggaggugaugaacaucguccugaucgcccucagcauccuggccgugcugaaggggcucuacaacuucgcgaccugcggccugguggggcugcucaccuuccugcugcucugcggccgcuccugcaccgccagccgguacaagggggucuacgagcugcagacccuggagcucaacauggagacccugaacaugacgaugccgcuguccugcaccaagaacaacagccaccacuacaucauggugggcaacgagaccggccucgagcugacccugacgaacaccuccaucaucaaccacaaguucugcaaccucagcgacgcccacaagaagaaccuguacgaccacgcccugauguccaucaucagcaccuuccaccucuccauccccaacuucaaccaguacgaggccaugagcugcgacuucaacgggggcaagaucuccgugcaguacaaccugagccacuccuacgcgggggacgccgccaaccacugcggcaccgucgccaacggggugcugcagacguucaugcgcauggcguggggcggcagcuacaucgcccucgacuccgggcacggcagcugggacugcaucaugaccuccuaccaguaccugaucauccagaacaccaccugggaggaccacugccaguucagccggcccucccccaucggguaccugggccuccugagccagcgcacgcgggacaucuacaucagccgccggcgccggggcaccuucaccuggacccuguccgacagcgaggggaaggacacgccgggcggguacugccugacccgcuggaugcucaucgaggccgagcugaagugcuucggcaacaccgccguggccaagugcaacgagaagcacgacgaggaguucugcgacaugcugcggcuguucgacuucaacaagcaggcgauccagcgccugaaggcccccgcccagauguccauccagcugaucaacaaggccgucaacgcccucaucaacgaccagcugaucaugaagaaccaccuccgggacaucauggggauccccuacugcaacuacagcaaguacugcuaccucaaccacaccacgaccggcaagaccucccugcccaagugcugccuggugagcaacggcuccuaccucaacgagacccacuucagcgacgacaucgagcagcaggcggacaacaugaucacggagaugcugcagaaggaguacauggagcgccaggggaagacgccccugggccucguggaccuguucgucuucuccaccagcuucuaccugaucuccaucuuccugcaccucgugaagaucccgacccaccggcacaucgugggcaagagcugccccaagccccaccgccugaaccacauggggaucugcuccugcgggcuguacaagcagcccggcgucccggugaaguggaagcggugaggacuagucccuguucccagagcccacuuuuuuuucuuuuuuugaaauaaaauagccugucuuucagaucucaaaggcucuuuucagagccaccaaaaaaaaaaaaaaaaaaaaaaaaaaaaaaaaaaaaaaaaaaaaaaaaaaaaaaaaaaaaaaaaagaauu

SEQ ID NO: 24828 - RNA, 1717 nt, Artificial Sequence
  mRNA product Design a-1 (hSL-A64-N5) comprising derived and/or modified sequence from LASV(G1442-SLE-2011;Clade IV)__AIT17180__GPCmut3 (opt1)
aggagagucccgcagucggcguccagcggcucugcuuguucgugugugugucguugcaggccuuauucaagcuuaccaugggccagaucgugaccuucuuccaggaggucccccacgugaucgaggaggugaugaacaucguccugaucgcccucagcauccuggccgugcugaaggggcucuacaacguggcgaccugcggccugaucgggcuggucacguuccuccugcugugcggccgcuccugcaccaccacccucuacaaggggguguacgagcugcagacgcuggagcucaacauggagacccugaacaugaccaugccgcugagcugcaccaagaacaacucccaccacuacauccgggugggcaacgagacgggccucgagcugacccugaccaacaccagcaucaucaaccacaaguucugcaaccucuccgacgcccacaagaagaaccuguacgaccacgcccugaugagcaucaucuccacguuccaccucagcauccccaacuucaaccaguacgaggccauguccugcgacuucaacgggggcaagaucagcguccaguacaaccugucccacagcuacgccggggacgcggccaaccacugcggcaccguggccaacggggugcugcagaccuucaugcgcauggccuggggcggcuccuacaucgcgcucgacagcgggcggggcaacugggacugcaucaugaccuccuaccaguaccugaucauccagaacacgaccugggacgaccacugccaguucagccgccccucccccaucggguaccugggccuccugagccagcggacccgcgacgucuacaucucccggcgccgccggggcaccuucacguggacccugagcgacagcgaggggaaggacaccccgggcggguacugccugacccgguggaugcucaucgaggccgagcugaagugcuucggcaacacggccguggccaagugcaacgagaagcacgacgaggaguucugcgacaugcugcgccucuucgacuucaacaagcaggccauccagcggcugaaggcgcccgcccagauguccauccagcugaucaacaaggccgugaacgcccucaucaacgaccagcugaucaugaagaaccaccuccgcgacaucauggggauccccuacugcaacuacagcaaguacugcuaccugaacaacaccgccaccggcaagaccucccugcccaagugcugccugaucagcaacggcuccuaccucaacgagacgcacuucagcgacgacaucgagcaggaggcggacaacaugaucaccgagaugcugcagaaggaguacauggagcggcaggggaagacgccccugggccucgucgaccuguucguguucuccaccagcuucuaccugaucuccaucuuccugcaccucgugaagaucccgacccaccgccacaucgucggcaagagcugccccaagccccaccggcugaaccacauggggaucugcuccugcgggcuguacaagcagcccggcgugccggugcgcuggaagcggugaggacuagucccuguucccagagcccacuuuuuuuucuuuuuuugaaauaaaauagccugucuuucagaucucaaaggcucuuuucagagccaccaaaaaaaaaaaaaaaaaaaaaaaaaaaaaaaaaaaaaaaaaaaaaaaaaaaaaaaaaaaaaaaaagaauu

SEQ ID NO: 24829 - RNA, 1717 nt, Artificial Sequence
  mRNA product Design a-1 (hSL-A64-N5) comprising derived and/or modified sequence from LASV(G3010-SLE-2013;Clade IV)__AIT17344__GPCmut3 (opt1)
aggagagucccgcagucggcguccagcggcucugcuuguucgugugugugucguugcaggccuuauucaagcuuaccaugggccagaucgugaccuucuuccaggaggucccccacgugaucgaggaggugaugaacaucguccugaucgcccucagcauccuggccgugcugaaggggcucuacaacuucgcgaccugcggccugguggggcuggucacguuccuccugcugugcggccgcuccugcaccaccagccucuacaaggggguguacgagcugcagacccuggagcucaacauggagacgcugaacaugaccaugccgcuguccugcaccaagaacaacagccaccacuacaucauggugggcaacgagaccggccucgagcugacgcugaccaacaccuccaucaucaaccacaaguucugcaaccucagcgacgcccacaagaagaaccuguacaaccacgcccugauguccaucaucagcaccuuccaccucuccauccccaacuucaaccaguacgaggccaugagcugcgacuucaacgggggcaagaucuccguccaguacaaccugagccacuccuacgccggggacgcggccagccacugcggcacgguggccaacggggugcugcagaccuucaugcggauggccuggggcggcuccuacaucgcgcucgacagcggguacggcaagugggacugcaucaugaccuccuaccaguaccugaucauccagaacaccacgugggaggaccacugccaguucagccgccccucccccaucggguaccugggccuccugagccagcggacccgcgacaucuacaucagccggcgccgccggggcaccuucaccuggacgcuguccgacagcgaggggaaggacaccccgggcggguacugccugacccgguggaugcucaucgaggccgagcugaagugcuucggcaacaccgccgucgccaagugcaacgagaagcacgacgaggaguucugcgacaugcugcgccucuucgacuucaacaagcaggccauccagcggcugaagacgcccgcgcagauguccauccagcugaucaacaaggccgugaacgcccucaucaacgaccagcugaucaugaagaaccaccuccgcgacaucauggggauccccuacugcaacuacagcaaguacugcuaccugaaccacaccaccaccggcaagacgucccugcccaagugcugccuggugagcaacggcuccuaccucaacgagacccacuucagcgacgacaucgagcagcaggccgacaacaugaucaccgagaugcugcagaaggaguacauggagcggcaggggaagacgccccugggccucgucgaccuguucguguucuccaccagcuucuaccugaucuccaucuuccugcaccucgugaagaucccgacccaccgccacaucgucggcaagagcugccccaagccccaccggcugaaccacauggggaucugcuccugcgggcuguacaagcagcccggcgugccggugcgcuggaagcggugaggacuagucccuguucccagagcccacuuuuuuuucuuuuuuugaaauaaaauagccugucuuucagaucucaaaggcucuuuucagagccaccaaaaaaaaaaaaaaaaaaaaaaaaaaaaaaaaaaaaaaaaaaaaaaaaaaaaaaaaaaaaaaaaagaauu

SEQ ID NO: 24830 - RNA, 1717 nt, Artificial Sequence
  mRNA product Design a-1 (hSL-A64-N5) comprising derived and/or modified sequence from LASV(G502-SLE-2009;Clade IV)__AIT17126__GPCmut3 (opt1)
aggagagucccgcagucggcguccagcggcucugcuuguucgugugugugucguugcaggccuuauucaagcuuaccaugggccagaucgugaccuucuuccaggaggucccccacgugaucgaggaggugaugaacaucguccugaucgcccucagcauccuggccgugcugaaggggcucuacaacuucgcgaccugcggccugguggggcugcucacguuccugcugcucugcggccgcuccugcaccaccgggcuguacaagggcgucuacgagcugcagacccucgagcugaacauggagacgcugaacaugaccaugccgcucagcugcaccaagaacaacucccaccacuacaucauggugggcaacgagaccgggcuggagcugacgcucaccaacaccagcaucaucaaccacaaguucugcaaccuguccgacgcccacaagaagaaccuguacgaccacgcccucaugagcaucaucuccaccuuccaccugagcauccccaacuucaaccaguacgaggccauguccugcgacuucaacggcgggaagaucagcgugcaguacaaccugucccacagcuacgccggcgacgcggccgaccacugcgggacggucgccaacggcgugcuccagaccuucaugcggauggccuggggcggguccuacaucgcgcuggacagcggccgcgggcggugggacugcaucaugaccuccuaccaguaccugaucauccagaacaccacgugggaggaccacugccaguucagccgccccucccccaucggcuaccucggccugcugagccagcggacccgcgacaucuacaucucccggcgccgccgggggaccuucaccuggacgcugagcgacagcgagggcaaggacacccccgggggcuacugccucacccgguggaugcugaucgaggccgagcugaagugcuucgggaacaccgccguggccaagugcaacgagaagcacgacgaggaguucugcgacaugcuccgccuguucgacuucaacaagcaggccauccagcggcugaaggcgcccgcccagauguccauccagcucaucaacaaggccgucaacgcccugaucaacgaccagcuggugaugaagaaccaccuccgcgacaucaugggcauccccuacugcaacuacagccgguacugcuaccugaaccacacgaccaccggccgcaccucccugcccaagugcugccucgugagcaacggguccuaccugaacgagacgcacuucagcgacgacaucgagcagcaggccgacaacaugaucaccgagaugcugcagaaggaguacauggagcggcagggcaagaccccgcucgggcuggucgaccuguucguguucuccaccagcuucuaccugaucuccaucuuccuccaccuggugaagaucccgacgcaccgccacaucgucggcaagagcugccccaagccccaccggcugaaccacauggggaucugcuccugcggccucuacaagcagcccggcgugccggugaaguggaagcgcugaggacuagucccuguucccagagcccacuuuuuuuucuuuuuuugaaauaaaauagccugucuuucagaucucaaaggcucuuuucagagccaccaaaaaaaaaaaaaaaaaaaaaaaaaaaaaaaaaaaaaaaaaaaaaaaaaaaaaaaaaaaaaaaaagaauu

SEQ ID NO: 24831 - RNA, 1717 nt, Artificial Sequence
  mRNA product Design a-1 (hSL-A64-N5) comprising derived and/or modified sequence from LASV(G733-SLE-2010;Clade IV)__AIT17154__GPCmut3 (opt1)
aggagagucccgcagucggcguccagcggcucugcuuguucgugugugugucguugcaggccuuauucaagcuuaccaugggccagaucgugaccuucuuccaggaggucccccacgugaucgaggaggugaugaacaucguccugaucgcccucagcauccuggccgugcugaaggggcucuacaacuucgcgaccugcggcaucguggggcuggucuccuuccugcuccugugcggccgcagcugcacgaccucccuguacaaggggguguacgagcuccagacccuggagcugaacauggagacccucaacaugacgaugccgcugagcugcaccaagaacaacucccaccacuacaucauggugggcaacgagaccggccuggagcucacccugacgaacaccagcaucaucaaccacaaguucugcaaccuguccgacgcccacaagaagaaccucuacgaccacgcccugaugagcaucaucuccaccuuccaccugagcauccccaacuucaaccaguacgaggccauguccugcgacuucaacgggggcaagaucagcguccaguacaaccucucccacagcuacgccggggacgcggccaaccacugcggcaccaucgccaacggggugcugcagacguucaugcggauggccuggggcggcuccuacaucgcgcuggacagcgggcgcgaccggugggacugcaucaugaccuccuaccaguaccucaucauccagaacaccaccugggaggaccacugccaguucagccgccccucccccaucggcuaccuggggcugcucagccagcggacgcgcgacaucuacaucagccggcgccgccggggcaccuucaccuggacccucuccgacagcgagggcaaggacacgcccgggggcuacugccugacccgguggaugcugaucgaggccgagcucaagugcuucgggaacaccgccguggccaagugcaacgagaagcacgacgaggaguucugcgacaugcugcgccuguucgacuucaacaagcaggccauccagcggcucaaggcgcccgcccagauguccauccagcugaucaacaaggccgucaacgcccugaucaacgaccagcucaucaugaagaaccaccuccgcgacaucaugggcauccccuacugcaacuacagcaaguacugcuaccugaaccacaccacgaccgggaagaccucccugcccaagugcugccuggugagcaacggcuccuaccugaacgagacccacuucagcgacgacaucgagcagcaggccgacaacaugaucacggagaugcuccagaaggaguacauggagcggcagggcaagaccccgcuggggcugguggaccucuucgucuucuccaccagcuucuaccugaucuccaucuuccugcaccuggugaagaucccgacccaccgccacguggucggcaagagcugccccaagccccaccggcucaaccacauggggaucugcuccugcggccuguacgggcagcccggcgugccggugaaguggaagcgcugaggacuagucccuguucccagagcccacuuuuuuuucuuuuuuugaaauaaaauagccugucuuucagaucucaaaggcucuuuucagagccaccaaaaaaaaaaaaaaaaaaaaaaaaaaaaaaaaaaaaaaaaaaaaaaaaaaaaaaaaaaaaaaaaagaauu

SEQ ID NO: 24832 - RNA, 1717 nt, Artificial Sequence
  mRNA product Design a-1 (hSL-A64-N5) comprising derived and/or modified sequence from MOPV/LASV reassortant(IGS-1;Clade IV)__AFY05576__GPCmut3 (opt1)
aggagagucccgcagucggcguccagcggcucugcuuguucgugugugugucguugcaggccuuauucaagcuuaccaugggccagaucgugaccuucuuccaggaggucccccacgugaucgaggaggugaugaacaucguccugaucgcccucagcgugcuggccgugcugaaggggcucuacaacuucgcgaccugcggccuggucgggcuggugacguuccuccugcugugcggccgcuccugcaccaccagccucuacaaggggguguacgagcugcagacccuggagcucaacauggagacgcugaacaugaccaugccgcuguccugcaccaagaacaacagccaccacuacaucauggucggcaacgagaccggccucgagcugacgcugaccaacaccuccaucaucaaccacaaguucugcaaccucagcgacgcccacaagaagaaccuguacgaccacgcccugauguccaucaucagcaccuuccaccucuccauccccaacuucaaccaguacgaggccaugagcugcgacuucaacgggggcaagaucuccgugcaguacaaccugagccacuccuacgccggggacgcggccaaccacugcggcacgguggccaacgggguccugcagaccuucaugcggauggccuggggcggcagcuacaucgcgcucgacuccgggcgcggcaacugggacugcaucaugaccagcuaccaguaccugaucauccagaacaccacgugggaggaccacugccaguucucccggcccagccccaucggguaccugggccuccugucccagcgcacccgggacaucuacaucagccgccggcgccggggcaccuucaccuggacgcugagcgacuccgagggggaggacaccccgggcggguacugccugacccgcuggaugcucaucgaggccgagcugaagugcuucggcaacaccgccguggccaagugcaacgagaagcacgacgaggaguucugcgacaugcugcggcuguucgacuucaacaagcaggccauccagcgccugaaggcgcccgcccagaugagcauccagcugaucaacaaggccgugaacgcccucaucaacgaccagcugaucaugaagaaccaccuccgggacaucauggggauccccuacugcaacuacuccaaguacugcuaccucaaccacacgaccaccggccgcaccagccugcccaagugcugccuggucuccaacggcagcuaccucaacgagacgcacuucuccgacgacaucgagcagcaggccgacaacaugaucaccgagaugcugcagaaggaguacauggagcggcaggggaagacgccccugggccucguggaccuguucguguucagcaccuccuucuaccugaucagcaucuuccugcaccucgucaagaucccgacccaccgccacaucguggggaaguccugccccaagccccaccggcugaaccacaugggcaucugcagcugcgggcuguacaagcagcccggcgugccggucaaguggaagcgcugaggacuagucccuguucccagagcccacuuuuuuuucuuuuuuugaaauaaaauagccugucuuucagaucucaaaggcucuuuucagagccaccaaaaaaaaaaaaaaaaaaaaaaaaaaaaaaaaaaaaaaaaaaaaaaaaaaaaaaaaaaaaaaaaagaauu

SEQ ID NO: 24833 - RNA, 1717 nt, Artificial Sequence
  mRNA product Design a-1 (hSL-A64-N5) comprising derived and/or modified sequence from LASV(LM765-SLE-2012;Clade IV)__AIT17814__GPCmut3 (opt1)
aggagagucccgcagucggcguccagcggcucugcuuguucgugugugugucguugcaggccuuauucaagcuuaccaugggccagaucgugaccuucuuccaggaggucccccacgugaucgaggaggugaugaacaucguccugaucgcccucagcauccuggccgugcugaaggggcucuacaacuucgcgaccugcggccugguggggcuggucacguuccuccugcugugcggccgcuccugcaccaccagccucuacaaggggguguacgagcugcagacccuggagcucaacauggagacgcugaacaugaccaugccgcuguccugcaccaagaacaacagccaccacuacaucauggugggcaacgagaccggccucgagcugacgcugaccaacaccuccaucaucgaccacaaguucugcaaccucagcgacgcccaccggaagaaccuguacgaccacgcccugauguccaucaucagcaccuuccaccucuccauccccaacuucaaccaguacgaggccaugagcugcgacuucaacgggggcaagaucuccguccaguacaaccugagccacuccuacgccaaggacgcggccgaccacugcgggacgguggccaacggcgugcugcagaccuucaugcgcauggccuggggcgggagcuacaucgcgcucgacuccggccgggggcgcugggacugcaucaugaccagcuaccaguaccugaucauccagaacaccacgugggaggaccacugccaguucucccggcccagccccaucggcuaccuggggcuccugucccagcgcacccgggacaucuacaucagccgccggcgccggggcaccuucaccuggacgcugagcgacuccgagggcaaggacacccccgggggcuacugccugacccgcuggaugcucaucgaggccgagcugaagugcuucgggaacaccgccgucgccaagugcaacgagaagcacgacgaggaguucugcgacaugcugcggcuguucgacuucaacaagcaggccauccagcgccugaaggcgcccgcccagaugagcauccagcugaucaacaaggccgugaacgcccucaucaacgaccagcugaucaugaagaaccaccuccgggacaucaugggcauccccuacugcaacuacuccaaguacugcuaccucaaccacacgaccaccgggaagaccagccugcccaagugcugccugguguccaacggcagcuaccucaacgagacgcacuucuccgacgacaucgagcagcaggccgacaacaugaucaccgagaugcugcagaaggaguacauggagcgccagggcaagaccccgcuggggcucgucgaccuguucguguucagcaccuccuucuaccugaucagcaucuuccugcaccucgugaagaucccgacgcaccggcacaucgucggcaagcccugccccaagccccaccgccugaaccacauggggaucugcuccugcggccuguacaagcagccgggggugcccgugaaguggaagcggugaggacuagucccuguucccagagcccacuuuuuuuucuuuuuuugaaauaaaauagccugucuuucagaucucaaaggcucuuuucagagccaccaaaaaaaaaaaaaaaaaaaaaaaaaaaaaaaaaaaaaaaaaaaaaaaaaaaaaaaaaaaaaaaaagaauu

SEQ ID NO: 24834 - RNA, 1717 nt, Artificial Sequence
  mRNA product Design a-1 (hSL-A64-N5) comprising derived and/or modified sequence from LASV(LM776-SLE-2012;Clade IV)__AIT17824__GPCmut3 (opt1)
aggagagucccgcagucggcguccagcggcucugcuuguucgugugugugucguugcaggccuuauucaagcuuaccaugggccagaucgugaccuucuuccaggaggucccccacgugaucgaggaggugaugaacaucguccugaucgcccucagcauccuggccgugcugaaggggcucuacaacuucgcgaccugcggccugguggggcuggucacguuccuccugcugugcggccgcuccugcaccaccagcguguacaaggggguguacgagcuccagacccuggagcugaacauggagacgcucaacaugaccaugccgcuguccugcaccaagaacaacagccaccacuacaucauggucggcaacgagaccggccuggagcucacgcugaccaacaccuccaucaucaaccacaaguucugcaaccugagcgacgcccacaagaagaaccucuacgaccacgcccugauguccaucaucagcaccuuccaccuguccauccccaacuucaaccaguacgaggccaugagcugcgacuucaacgggggcaagaucuccgugcaguacaaccucagccacuccuacgccggggacgcggccaaccacugcggcacgguggccaacgggguccugcagaccuucaugcggauggccuggggcggcagcuacaucgcgcuggacuccgggcacggcaagugggacugcaucaugaccagcuaccaguaccucaucauccagaacaccacgugggaggaccacugccaguucucccgccccagccccaucggguaccugggccugcucucccagcggacccgcgacaucuacaucagccggcgccgccggggcaccuucaccuggacgcucagcgacuccgaggggaaggacaccccgggcggguacugccugacccgguggaugcugaucgaggccgagcucaagugcuucggcaacaccgccguggccaagugcaacgagaagcacgacgaggaguucugcgacaugcugcgccuguucgacuucaacaagcaggccauccagcggcucaaggcgcccgcccagaugagcauccagcugaucaacaaggccgugaacgcccugaucaacgaccagcucaucaugaagaaccaccuccgcgacaucauggggauccccuacugcaacuacuccaaguacugcuaccugaaccacacgaccaccggcaagaccagccugcccaagugcugccuggucuccaacggcagcuaccugaacgagacgcacuucuccgacgacaucgagcagcaggccgacaacaugaucaccgagaugcuccagaaggaguacauggagcggcaggggaagacgccccugggccugguggaccucuucguguucagcaccuccuucuaccugaucagcaucuuccugcaccuggucaagaucccgacccaccgccacaucguggggaaguccugccccaagccccaccggcucaaccacaugggcaucugcagcugcgggcuguacaagcagcccggcgugccgguccgcuggaagcggugaggacuagucccuguucccagagcccacuuuuuuuucuuuuuuugaaauaaaauagccugucuuucagaucucaaaggcucuuuucagagccaccaaaaaaaaaaaaaaaaaaaaaaaaaaaaaaaaaaaaaaaaaaaaaaaaaaaaaaaaaaaaaaaaagaauu

SEQ ID NO: 24835 - RNA, 1717 nt, Artificial Sequence
  mRNA product Design a-1 (hSL-A64-N5) comprising derived and/or modified sequence from LASV(Mad39;Clade IV)__ANH09722__GPCmut3 (opt1)
aggagagucccgcagucggcguccagcggcucugcuuguucgugugugugucguugcaggccuuauucaagcuuaccaugggccagaucgugaccuucuuccaggaggucccccacgugaucgaggaggugaugaacaucguccugaucgcccucagcauccuggccgugcugaaggggcucuacaacguggcgaccugcggccugaucgggcuggucacguuccuccugcugugcggccgcuccugcaccaccacccucuacaaggggguguacgagcugcaggcccuggagcucaacauggagacgcugaacaugaccaugccgcugagcugcaccaagaacaacucccaccacuacauccgggugggcaacgagaccggccucgagcugacgcugaccaacaccagccucaucaaccacaaguucugcaaccuguccgacgcccacaagaagaaccuguacgaccacgcccucaugagcaucaucuccaccuuccaccugagcauccccaacuucaaccaguacgaggccauguccugcgacuucaacgacgggaagaucagcguccaguacaaccugucccacacguacgcgggcgacaccgccaaccacugcgggaccguggccaacggcgugcuccagaccuucaugcgcauggccuggggcgggagcuacaucgcgcuggacuccggccgcgggggcugggacugcaucaugacgagcuaccaguaccugaucauccagaacaccaccugggaggaccacugccaguucucccggcccagccccaucggguaccucggccugcugucccagcggacccgcgacaucuacaucagccggcgccgccggggcacguucaccuggacccuguccgacagcgaggggaaggacaccccgggcggguacugccucacgcgguggaugcugaucgaggccgagcugaagugcuucggcaacaccgccgucgccaagugcaacgagaagcacgacgaggaguucugcgacaugcuccgccuguucgacuucaacaagcaggccauccagcggcugaaggcgcccgcccagaugagcauccagcucaucaacaaggccgugaacgcccugaucaacgaccagcugaucaugaagaaccaccuccgcgacaucauggggauccccuacugcaacuacuccaaguacugcuaccugaaccacaccgugaccggcaagacgagccugcccaagugcugccucgucuccaacggcagcuaccugaacgagacccacuucuccgacgacaucgagcagcaggccgacaacaugaucaccgagaugcugcagaaggaguacauggagcggcaggggaagacgccccucggccugguggaccuguucguguucagcaccuccuucuaccugaucagcaucuuccuccaccuggucaagaucccgacccaccgccacgugguggggaagcccugccccaagccccaccggcugaaccacaugggcaucugcuccugcggguucuacaagcagccgggcguccccgugcgcuggaagcggugaggacuagucccuguucccagagcccacuuuuuuuucuuuuuuugaaauaaaauagccugucuuucagaucucaaaggcucuuuucagagccaccaaaaaaaaaaaaaaaaaaaaaaaaaaaaaaaaaaaaaaaaaaaaaaaaaaaaaaaaaaaaaaaaagaauu

SEQ ID NO: 24836 - RNA, 1717 nt, Artificial Sequence
  mRNA product Design a-1 (hSL-A64-N5) comprising derived and/or modified sequence from LASV(Z0947-SLE-2011;Clade IV)__AIT17840__GPCmut3 (opt1)
aggagagucccgcagucggcguccagcggcucugcuuguucgugugugugucguugcaggccuuauucaagcuuaccaugggccagaucgugaccuucuuccaggaggucccccacgugaucgaggaggugaugaacaucguccugaucgcccucagcauccuggccgugcugaaggggcucuacaacuucgcgaccugcggccugguggggcuggucacguuccuccugcugugcggccgcuccugcaccaucagccucuacaaggggguguacgagcugcagacccuggagcucaacauggagacccugaacaugacgaugccgcuguccugcaccaagaacaacagccaccacuacaucauggugggcaacgagaccggccucgagcugacccugacgaacaccuccaucaucaaccacaaguucugcaaccucagcgacgcccacaagaagaaccuguacgaccacgcccugauguccaucaucagcaccuuccaccucuccauccccaacuucaaccaguacgaggccaugagcugcgacuucaacgggggcaagaucuccguccaguacaaccugagccacuccuacgccggggacgcggccaaccacugcggcaccguggccaacggggugcugcagacguucaugcggauggccuggggcggcagcuacaucgcgcucgacuccgggcgcgaccggugggacugcaucaugaccagcuaccaguaccugaucauccagaacaccaccugggaggaccacugccaguucucccgccccagccccaucggcuaccuggggcuccugucccagcggacgcgcgacaucuacaucagccggcgccgccggggcaccuucaccuggacccugagcgacuccgagggcaaggacacgcccgggggcuacugccugacccgguggaugcucaucgaggccgagcugaagugcuucgggaacaccgccgucgccaagugcaacgagaagcacgacgaggaguucugcgacaugcugcgccucuucgacuucaacaagcaggccauccagcggcugaaggcgcccgcccagaugagcauccagcugaucaacaaggccgugaacgcccucaucaacgaccagcugaucaugaagaaccaccuccgcgacaucaugggcauccccuacugcaacuacuccaaguacugcuaccugaaccacaccacgaccgggaagaccagccugcccaagugcugccugguguccaacggcagcuaccucaacgagacccacuucuccgacgacaucgagcagcaggccgacaacaugaucacggagaugcugcagaaggaguacauggagcggcagggcaagaccccgcuggggcucgucgaccuguucguguucagcaccuccuucuaccugaucagcaucuuccugcaccucgugaagaucccgacccaccgccacaucgucggcaagcccugccccaagccccaccggcugaaccacauggggaucugcuccugcggccuguacaagcagccgggggugcccgugaaguggaagcgcugaggacuagucccuguucccagagcccacuuuuuuuucuuuuuuugaaauaaaauagccugucuuucagaucucaaaggcucuuuucagagccaccaaaaaaaaaaaaaaaaaaaaaaaaaaaaaaaaaaaaaaaaaaaaaaaaaaaaaaaaaaaaaaaaagaauu

SEQ ID NO: 24837 - RNA, 1717 nt, Artificial Sequence
  mRNA product Design a-1 (hSL-A64-N5) comprising derived and/or modified sequence from LASV(Josiah;Clade IV)__NP_694870__GPCmut3 (opt1)
aggagagucccgcagucggcguccagcggcucugcuuguucgugugugugucguugcaggccuuauucaagcuuaccaugggccagaucgugaccuucuuccaggaggucccccacgugaucgaggaggugaugaacaucguccugaucgcccucagcgugcuggccgugcugaaggggcucuacaacuucgcgaccugcggccuggucgggcuggugacguuccuccugcugugcggccgcuccugcaccaccagccucuacaaggggguguacgagcugcagacccuggagcucaacauggagacgcugaacaugaccaugccgcuguccugcaccaagaacaacagccaccacuacaucauggucggcaacgagaccggccucgagcugacgcugaccaacaccuccaucaucaaccacaaguucugcaaccucagcgacgcccacaagaagaaccuguacgaccacgcccugauguccaucaucagcaccuuccaccucuccauccccaacuucaaccaguacgaggccaugagcugcgacuucaacgggggcaagaucuccgugcaguacaaccugagccacuccuacgccggggacgcggccaaccacugcggcacgguggccaacgggguccugcagaccuucaugcggauggccuggggcggcagcuacaucgcgcucgacuccgggcgcggcaacugggacugcaucaugaccagcuaccaguaccugaucauccagaacaccacgugggaggaccacugccaguucucccggcccagccccaucggguaccugggccuccugucccagcgcacccgggacaucuacaucagccgccggcgccggggcaccuucaccuggacgcugagcgacuccgaggggaaggacaccccgggcggguacugccucacccgcuggaugcugaucgaggccgagcugaagugcuucggcaacaccgccguggccaagugcaacgagaagcacgacgaggaguucugcgacaugcuccggcuguucgacuucaacaagcaggccauccagcgccugaaggcgcccgcccagaugagcauccagcucaucaacaaggccgugaacgcccugaucaacgaccagcugaucaugaagaaccaccuccgggacaucauggggauccccuacugcaacuacuccaaguacugcuaccugaaccacacgaccaccggccgcaccagccugcccaagugcugccucgucuccaacggcagcuaccugaacgagacgcacuucuccgacgacaucgagcagcaggccgacaacaugaucaccgagaugcugcagaaggaguacauggagcggcaggggaagaccccgcucggccugguggaccuguucguguucagcaccuccuucuaccugaucagcaucuuccuccaccuggucaagauccccacgcaccgccacaucguggggaaguccugccccaagccccaccggcugaaccacaugggcaucugcagcugcgggcucuacaagcagccgggcgugcccgucaaguggaagcgcugaggacuagucccuguucccagagcccacuuuuuuuucuuuuuuugaaauaaaauagccugucuuucagaucucaaaggcucuuuucagagccaccaaaaaaaaaaaaaaaaaaaaaaaaaaaaaaaaaaaaaaaaaaaaaaaaaaaaaaaaaaaaaaaaagaauu

SEQ ID NO: 24838 - RNA, 1714 nt, Artificial Sequence
  mRNA product Design a-1 (hSL-A64-N5) comprising derived and/or modified sequence from LASV(LP;Clade I)__AAF86701__GPCmut3 (opt1)
aggagagucccgcagucggcguccagcggcucugcuuguucgugugugugucguugcaggccuuauucaagcuuaccaugggccagaucaucaccuucuuccaggaggugccccacgucaucgaggaggugaugaacaucgugcugaucgcccucagccugcuggccauccucaaggggcuguacaacaucgcgaccugcggcaucaucgggcuggucgccuuccucuuccugugcggcaaguccugcagccugacgcucaagggcggguacgagcugcagacccuggagcucaacauggagacccugaacaugaccaugccgcuguccugcacgaagaacagcucccaccacuacauccgcgugggcaacgagaccgggcucgagcugacccugaccaacacgagcaucaucaaccacaaguucugcaaccucuccgacgcccacaagaagaaccuguacgaccacgcccugaugagcaucaucuccaccuuccaccucagcauccccaacuucaaccaguacgaggccauguccugcgacuucaacggcgggaagaucagcgugcaguacaaccugucccacagcuacgcgggcgacgccgccgagcacugcgggaccgucgccaacggcgugcugcagaccuucaugcggauggcguggggcgggcgcuacaucgcccucgacuccggcaaggggaacugggacugcaucaugacgagcuaccaguaccugaucauccagaacaccaccugggaggaccacugccaguucucccggcccagccccaucggcuaccugggccuccugucccagcgcacccgggacaucuacaucagccgccggcgccgggggacguucaccuggacccugagcgacuccgagggcaacgagacccccgggggcuacugccucacgcgcuggaugcugaucgaggccgagcugaagugcuucgggaacaccgccguggccaagugcaacgagaagcacgacgaggaguucugcgacaugcuccggcuguucgacuucaacaagcaggcgauccgccggcugaaggccccggcccagaugagcauccagcucaucaacaaggccgucaacgcccugaucaacgaccagcugaucaugaagaaccaccuccgcgacaucaugggcauccccuacugcaacuacuccaaguacugcuaccugaaccacaccagcuccggccggaccagccugcccaagugcugccucaucuccaacgggagcuaccugaacgagacgcaguucuccgacgacaucgagcagcaggcggacaacaugaucaccgagaugcugcagaaggaguacaucgagcgccagggcaagaccccgcucgggcugguggacaucuucaucuucagcaccuccuucuaccugaucagcaucuuccugcaccucaucaagauccccacgcaccggcacaucgugggcaagcccugccccaagccgcaccgccugaaccacaugggggucugcuccugcggccuguacaagcaccccggcgugcccaccaaguggaagcggugaggacuagucccuguucccagagcccacuuuuuuuucuuuuuuugaaauaaaauagccugucuuucagaucucaaaggcucuuuucagagccaccaaaaaaaaaaaaaaaaaaaaaaaaaaaaaaaaaaaaaaaaaaaaaaaaaaaaaaaaaaaaaaaaagaauu

SEQ ID NO: 24839 - RNA, 1714 nt, Artificial Sequence
  mRNA product Design a-1 (hSL-A64-N5) comprising derived and/or modified sequence from LASV(803213;Clade II)__AAF86703__GPCmut3 (opt1)
aggagagucccgcagucggcguccagcggcucugcuuguucgugugugugucguugcaggccuuauucaagcuuaccaugggccagaucaucaccuucuuccaggaggugccccacgucaucgaggaggugaugaacaucgugcugaucgcccucagccugcuggccauccucaaggggaucuacaacgucgcgaccugcggccuguucgggcugaucuccuuccuccugcugugcggccgcagcugcuccgugacguacaaggggguguacgagcuccagacccuggagcugaacauggccaaccucaacaugaccaugccgcugagcugcaccaagaacaacucccaccacuacaucauggucggcaacgagacgggccuggagcucacccugaccaacaccagcaucaucaaccacaaguucugcaaccuguccgacgcccacaagaagaaccucuacgaccacgcccugaugagcaucaucuccacguuccaccugagcauccccaacuucaaccaguacgaggccauguccugcgacuucaacgggggcaagaucagcgugcaguacaaccucucccacagcuucgcgguggacgccgccaaccacugcgggaccaucgccaacggcguccugcagaccuucaugcggauggcguggggcggguccuacaucgcccuggacagcggcaaggggaacugggacugcaucaugaccuccuaccaguaccucaucauccagaacacgaccugggaggaccacugccaguucagccgccccucccccaucggcuaccuggggcugcucagccagcggacccgcgacaucuacaucagccggcgccggcgcggcaccuucacguggacccuguccgacagcgagggcaacgaggcccccgggggcuacugccugacccgguggaugcucaucgaggccgagcugaagugcuucgggaacaccgccguggcgaagugcaacgagaagcacgacgaggaguucugcgacaugcugcgccucuucgacuucaacaagcaggccaucaagcggcugaagacgccggcccagauguccauccagcugaucaacaaggccgugaacgcccucaucaacgaccagcugaucaugaagaaccaccuccgcgacaucaugggcauccccuacugcaacuacagccgguacugcuaccugaaccacaccgucaccgggaagaccucccugccccgcugcugccuggugagcaacggcuccuaccucaacgagacgcacuucagcgacgacaucgagcagcaggcggacaacaugaucaccgagaugcugcagaaggaguacauggaccggcagggcaagaccccgcuggggcucguggaccuguucgucuucuccaccagcuucuaccugaucuccaucuuccugcaccucgugaagauccccacgcaccgccacaucgugggcaagcccugccccaagccgcaccggcugaaccacauggggaucugcagcugcggccuguacaagcaccccgggguccccgugaaguggaagcgcugaggacuagucccuguucccagagcccacuuuuuuuucuuuuuuugaaauaaaauagccugucuuucagaucucaaaggcucuuuucagagccaccaaaaaaaaaaaaaaaaaaaaaaaaaaaaaaaaaaaaaaaaaaaaaaaaaaaaaaaaaaaaaaaaagaauu

SEQ ID NO: 24840 - RNA, 1714 nt, Artificial Sequence
  mRNA product Design a-1 (hSL-A64-N5) comprising derived and/or modified sequence from LASV(GA391;Clade III)__CAA36645__GPCmut3 (opt1)
aggagagucccgcagucggcguccagcggcucugcuuguucgugugugugucguugcaggccuuauucaagcuuaccaugggccagaucgugaccuucuuccaggaggucccccacgugaucgaggaggugaugaacaucguccugaucgcccucagcauccuggccauccugaaggggcucuacaacguggcgaccugcggccugaucgggcuggugacguuccuccugcuguccggccgcagcugcucccucaucuacaaggggaccuacgagcugcagacccuggagcucaacauggagacccugaacaugacgaugccgcugagcugcaccaagaacaacucccaccacuacauccgggucggcaacgagaccggccucgagcugacccugacgaacaccagcauccucaaccacaaguucugcaaccuguccgacgcccacaagcgcaaccuguacgaccacagccucauguccaucaucagcaccuuccaccuguccauccccaacuucaaccaguacgaggccaugagcugcgacuucaacgggggcaagaucaccgugcaguacaaccugucccacagcuucgccguggacgccgcggggcacugcggcacgcucgccaacgggguccugcagaccuucaugcggauggccuggggcggcuccuacaucgcccuggacagcgggcgcggcaacugggacugcaucaugaccuccuaccaguaccucaucauccagaacaccacgugggacgaccacugccaguucagccggcccucccccaucggguaccugggccugcucagccagcgcacccgggacaucuacaucagccgccggcgccggggcaccuucaccuggacgcuguccgacagcgaggggaacgagaccccgggcggguacugccugacccgcuggaugcucaucgaggcggagcugaagugcuucggcaacaccgccguggccaagugcaacgagaagcacgacgaggaguucugcgacaugcugcggcuguucgacuucaacaagcaggccauccgccggcugaagacgcccgcccagauguccauccagcugaucaacaaggcggugaacgcccucaucaacgaccagcugaucaugaagaaccaccuccgcgacaucauggggauccccuacugcaacuacagccgguacugcuaccucaaccacaccuccaccggcaagaccagccugccccgcugcugccugaucuccaacggcagcuaccucaacgagacgaaguucuccgacgacaucgagcagcaggccgacaacaugaucaccgagaugcugcagaaggaguacaucgaccggcaggggaagaccccgcugggccuggucgaccucuucguguucagcaccuccuucuaccugaucagcaucuuccugcaccucgugaagauccccacgcaccgccacaucgucgggaagcccugccccaagccgcaccggcugaaccacaugggcaucugcuccugcgggcuguacaagcagcccggcgugcccgugcgcuggaagcgcugaggacuagucccuguucccagagcccacuuuuuuuucuuuuuuugaaauaaaauagccugucuuucagaucucaaaggcucuuuucagagccaccaaaaaaaaaaaaaaaaaaaaaaaaaaaaaaaaaaaaaaaaaaaaaaaaaaaaaaaaaaaaaaaaagaauu

SEQ ID NO: 24841 - RNA, 1717 nt, Artificial Sequence
  mRNA product Design a-1 (hSL-A64-N5) comprising derived and/or modified sequence from LASV(AV;Clade V)__CCA30314__GPCmut3 (opt1)
aggagagucccgcagucggcguccagcggcucugcuuguucgugugugugucguugcaggccuuauucaagcuuaccaugggccagaucgugaccuucuuccaggaggucccccacgugaucgaggaggugaugaacaucguccugaucgcccucagcauccuggccgugcugaaggggcucuacaacaucgcgaccugcggccugaucgggcugaucacguuccuccugcugugcggccgcuccugcagcuccaaccucuacaaggggguguacgagcugcagagccuggaccucaacauggagacccugaacaugaccaugccgcuguccugcaccaagaacaacagccaccacuacauccgggucggcaacgacacgggccucgagcugacccugaccaacaccuccauccucaaccacaaguucugcaaccugagcgacgcccacaagaaggaccuguacgaccacgcccucauguccaucaucagcacguuccaccuguccauccccaacuucaaccaguacgaggccaugagcugcgacuucaacgggggcaagaucuccgugcaguacaaccugagccacuccuacgccaucgacgcggccaaccacugcgggaccguggccaacggcauccuccagaccuucaugcgcauggccuggggcgggagcuacaucgcgcuggacuccggccgggggaacugggacugcaucaugaccagcuaccaguaccugaucauccagaacacgaccugggagaaccacugccaguucucccgccccagccccaucggcuaccucgggcugcugagccagcggacccgcgacaucuacaucucccggcgccggcgcggcaccuucacguggacccucagcgacuccgagggcaacgccacccccgggggcuacugccugacccgguggaugcugaucgaggccgagcucaagugcuucgggaacacggccgucgccaagugcaacgagaagcacgacgaggaguucugcgacaugcugcgccuguucgacuucaacaagcaggcgaucagccggcucaaguccccggcccagaugagcauccagcugaucaacaaggccgugaacgcccugaucaacgaccagcucaucaugaagaaccaccuccgcgacaucaugggcauccccuacugcaacuacuccaaguacugcuaccugaaccacaccaucaccgggaagaccagccugcccaagugcugccugguguccaacggcagcuaccugaacgagacgcacuucuccgacgacaucgagcagcaggccgacaacaugaucaccgagaugcuccagaaggaguacauggagcggcagggcaagaccccgcuggggcuggucgaccuguucguguucagcaccuccuucuaccucaucagcaucuuccugcgccuggugaagauccccacgcaccggcacaucgucggcaagcccugccccaagccgcaccgccucaaccacauggggaucugcuccugcggccuguacaagcagcccggggugcccgugcgguggaagcgcugaggacuagucccuguucccagagcccacuuuuuuuucuuuuuuugaaauaaaauagccugucuuucagaucucaaaggcucuuuucagagccaccaaaaaaaaaaaaaaaaaaaaaaaaaaaaaaaaaaaaaaaaaaaaaaaaaaaaaaaaaaaaaaaaagaauu

SEQ ID NO: 24842 - RNA, 1714 nt, Artificial Sequence
  mRNA product Design a-1 (hSL-A64-N5) comprising derived and/or modified sequence from LASV(Togo/2016/7082;Clade VI)__AMR44577__GPCmut3 (opt1)
aggagagucccgcagucggcguccagcggcucugcuuguucgugugugugucguugcaggccuuauucaagcuuaccaugggccagaucaucaccuucuuccaggaggugccccacgucaucgaggaggugaugaacaucgugcugaucgcccucagccugcuggccauccucaagggggucuacaacguggcgaccugcggcaucaucgggcuggugacguuccuguuccucugcggccgcuccugcagccugaucuacaagggguccuacgagcugcagacccucgagcugaacauggagacccugaacaugaccaugccgcucagcugcacgaagaacuccagccaccacuacauccgggucggcaacgagaccggccuggagcugacccucaccaacacguccaucaucaaccacaaguucugcaaccugagcgacgcccacaagcgcaaccuguacgaccacgcccucauguccauccugagcaccuuccaccuguccauccccaacuucaaccaguacgaggccaugagcugcgacuucaacgggggcaagaucuccgugcaguacaaccucagccacgccuacgcgguggacgccgccgagcacugcgggaccgucgccaacggcgugcugcagaccuucaugcggauggcguggggcggguccuacaucgcccuggacagcggccgcgggaacugggacugcaucaugacguccuaccaguaccucaucauccagaacaccaccugggaggaccacugccaguucagccggcccucccccaucggcuaccuggggcugcucagccagcgcacccgggacaucuacaucagccgccggcgccggggcacguucaccuggacccuguccgacagcgagggcaacgagacccccgggggcuacugccugacgcgcuggaugcucaucgaggccgagcugaagugcuucgggaacaccgccguggccaagugcaacgagaagcacgacgaggaguucugcgacaugcugcggcuguucgacuucaacaagcaggcgauccagcgccugaaguccccggcccagaugagcauccagcugaucaacaaggccgucaacgcccucaucaacgaccagcugaucaugaagaaccaccuccgggacaugaugggcauccccuacugcaacuacuccaaguacugcuaccucaaccacaccagcuccgggcgcaccagccugcccaagugcugccugguguccaacggcagcuaccucaacgagacgcacuucuccgacgacaucgagcagcaggccgacaacaugaucaccgagaugcugcagaaggaguacaucgaccggcagggcaagaccccgcuggggcucguggaccuguucgucuucagcaccuccuucuaccugaucagcaucuuccugcaccucaucaagauccccacgcaccgccacaucgugggcaagcccugccccaagccgcaccggcugaaccacauggggaucugcuccugcggccuguacaagcagcccggggugcccacccgcuggaagcggugaggacuagucccuguucccagagcccacuuuuuuuucuuuuuuugaaauaaaauagccugucuuucagaucucaaaggcucuuuucagagccaccaaaaaaaaaaaaaaaaaaaaaaaaaaaaaaaaaaaaaaaaaaaaaaaaaaaaaaaaaaaaaaaaagaauu

SEQ ID NO: 24843 - RNA, 1714 nt, Artificial Sequence
  mRNA product Design a-1 (hSL-A64-N5) comprising derived and/or modified sequence from LASV(KAK-428;Clade n.d. (VII))__ANH09740__GPCmut3 (opt1)
aggagagucccgcagucggcguccagcggcucugcuuguucgugugugugucguugcaggccuuauucaagcuuaccaugggccagaucgugaccuucuuccaggaggucccccacgugaucgaggaggugaugaacaucguccugaucgcccucagccugcuggccauccucaaggggcuguacaacuucgcgaccugcggcgugaucgggcugaucacguuccuccugcugugcggccgcuccugcagcgccaccuacaaggggcaguacgagcuccagacccuggagcugaacauggagucccucaacaugaccaugccgcugagcugcacgaagaacaacucccaccacuacauccgggccggcaacaacaccggccuggagcucacccugaccaacacgagcaucaucucccacaaguucugcaaccugagcgacgcccacaagaagaaccucuacgaccacacccugauguccaucaucaccaccuuccaccugagcauccccaacuucaaccaguacgaggccauguccugcgacuucaacgggggcaagaucagcauccaguacaaccucucccacagcuacgcgggggacgccgcccagcacugcggcacgguggccaacgggguccugcagaccuucaugcgcauggcguggggcggcuccuaccuggcccucgacagcgggcggcgcggcugggacugcaucaucuccagcuaccaguaccugaucauccagaacaccaccugggacgaccacugccaguucucccggcccagccccaucggguaccugggcuucgugagccagaagacgcgcgacaucuacaucucccggcgccggcgcggcaccuucaccuggacccucagcgacuccgaggggcacgacaugccgggcggguacugccugacgcgguggaugcugaucgaggccgaccucaagugcuucggcaacaccgccguggccaagugcaacgagaagcacgacgaggaguucugcgacauguggcgccuguucgacuucaacaagcaggcgauccagcggcugaaggcccccgcccagaugaacauccagcucaucaacaaggccgucaacgcccugaucaacgaccagcugaugaugaagaaccaccuccgcgacaucauggggauccccuacugcaacuacagcaaguucugcuaccugaacaacaccaccacgggccggaccucccugccccgcugcugccucaucagcaacggcuccuaccugaacgagacccacuucagcgacgacaucgagcagcaggcggacaacaugaucaccgagaugcugcagaaggaguacauggaccggcaggggaagacgccgcucggccugguggaccuguucguguucuccaccagcuucuaccucaucaccaucuuccugcaccuggucaagauccccacccaccgccacaucguggggaagcccugccccaagccgcaccggcugaaccacaugggcaucugcuccugcgggcucuacaagcagcccggcgugcccguccgcuggaagcggugaggacuagucccuguucccagagcccacuuuuuuuucuuuuuuugaaauaaaauagccugucuuucagaucucaaaggcucuuuucagagccaccaaaaaaaaaaaaaaaaaaaaaaaaaaaaaaaaaaaaaaaaaaaaaaaaaaaaaaaaaaaaaaaaagaauu

SEQ ID NO: 24844 - RNA, 1714 nt, Artificial Sequence; identical to SEQ ID NO: 24838
  mRNA product Design a-1 (hSL-A64-N5) comprising derived and/or modified sequence from LASV(Pinneo-NIG-1969;Clade I)__AIT17836__GPCmut3 (opt1)

SEQ ID NO: 24845 - RNA, 1714 nt, Artificial Sequence
  mRNA product Design a-1 (hSL-A64-N5) comprising derived and/or modified sequence from LASV(ISTH0009-NIG-2011;Clade II)__AIT17404__GPCmut3 (opt1)
aggagagucccgcagucggcguccagcggcucugcuuguucgugugugugucguugcaggccuuauucaagcuuaccaugggccagaucaucaccuucuuccaggaggugccccacgucaucgaggaggugaugaacaucgugcugaucgcccucagccugcuggccauccucaaggggaucuacaacgucgcgaccugcggccuguucgggcugguguccuuccuccugcugugcggccgcagcugcuccacgaccuacaaggggguguacgagcuccagacccuggagcuggacauggccagccucaacaugaccaugccgcuguccugcacgaagaacaacagccaccacuacaucauggucggcaacgagaccggccuggagcucacccugaccaacacguccaucaucaaccacaaguucugcaaccugagcgacgcccacaagaagaaccucuacgaccacgcccugauguccaucaucagcaccuuccaccuguccauccccaacuucaaccaguacgaggccaugagcugcgacuucaacgggggcaagaucuccgugcaguacaaccucagccacgcguacgccguggacgccgccaaccacugcgggaccaucgcgaacggcguccugcagaccuucaugcggauggccuggggcggguccuacaucgcccuggacagcggcaagggguccugggacugcaucaugacgagcuaccaguaccucaucauccagaacaccaccugggaggaccacugccaguucucccgccccagccccaucggcuaccuggggcugcucagccagcggacccgcgacaucuacaucucccggcgccggcgcggcacguucaccuggacccugagcgacuccgagggcaacgagacccccgggggcuacugccugacgcgguggaugcucaucgaggccgagcugaagugcuucgggaacaccgccguggcgaagugcaacgagaagcacgacgaggaguucugcgacaugcugcgccucuucgacuucaacaagcaggccauccggcgccugaagaccccggcccagaugagcauccagcugaucaacaaggccgugaacgcccucaucaacgaccagcugaucaugaagaaccaccuccgggacaucaugggcauccccuacugcaacuacuccaaguacugcuaccugaaccacaccgucacggggaagaccagccugccccgcugcugccugguguccaacggcagcuaccucaacgagacccacuucuccgacgacaucgagcagcaggcggacaacaugaucaccgagcugcugcagaaggaguacauggaccggcagggcaagacgccgcucgggcugguggaccuguucgucuucagcaccuccuucuaccugaucagcaucuuccuccaccugaucaagauccccacccaccgccacaucaccggcaagcccugccccaagccgcaccggcugaaccacauggggaucugcuccugcggccucuacaagcaccccggggugcccgugaaguggaagcgcugaggacuagucccuguucccagagcccacuuuuuuuucuuuuuuugaaauaaaauagccugucuuucagaucucaaaggcucuuuucagagccaccaaaaaaaaaaaaaaaaaaaaaaaaaaaaaaaaaaaaaaaaaaaaaaaaaaaaaaaaaaaaaaaaagaauu

SEQ ID NO: 24846 - RNA, 1714 nt, Artificial Sequence
  mRNA product Design a-1 (hSL-A64-N5) comprising derived and/or modified sequence from LASV(ISTH2010-NIG-2012;Clade II)__AIT17482__GPCmut3 (opt1)
aggagagucccgcagucggcguccagcggcucugcuuguucgugugugugucguugcaggccuuauucaagcuuaccaugggccagaucaucaccuucuuccaggaggugccccacgucaucgaggaggugaugaacaucgugcugaucgcccucagccugcuggccauccucaaggggaucuacaacgucgcgaccugcggccuguucgggcugguguccuuccuccugcugugcggccgcagcugcuccacgaccuacaaggggguguacgagcuccagacccuggagcuggacauggccagccucaacaugaccaugccgcuguccugcacgaagaacaacagccaccacuacaucauggucggcaacgagaccggccuggagcucacccugaccaacacguccaucaucaaccacaaguucugcaaccugagcgacgcccacaagaagaaccucuacgaccacgcccugauguccaucaucagcaccuuccaccuguccauccccaacuucaaccaguacgaggccaugagcugcgacuucaacgggggcaagaucuccgugcaguacaaccucagccacgcguacgccguggacgccgccaaccacugcgggaccaucgcgaacggcguccugcagaccuucaugcggauggccuggggcggguccuacaucgcccuggacagcggcaagggguccugggacugcaucaugacgagcuaccaguaccucaucauccagaacaucaccugggaggaccacugccaguucucccgccccagccccaucggcuaccuggggcugcucagccagcggacccgcgacaucuacaucucccggcgccggcgcggcaccuucacguggacccugagcgacuccgagggcaacgagacccccgggggcuacugccugacccgguggaugcucaucgaggccgagcugaagugcuucgggaacacggccguggcgaagugcaacgagaagcacgacgaggaguucugcgacaugcugcgccucuucgacuucaacaagcaggccauccggcgccugaagaccccggcccagaugagcauccagcugaucaacaaggccgugaacgcccucaucaacgaccagcugaucaugaagaaccaccuccgggacaucaugggcauccccuacugcaacuacuccaaguacugcuaccugaaccacaccgucaccgggaagacgagccugccccgcugcugccugguguccaacggcagcuaccucaacgagacccacuucuccgacgacaucgagcagcaggcggacaacaugaucaccgagcugcugcagaaggaguacaucgaccggcagggcaagaccccgcucgggcugguggaccuguucgucuucagcacguccuucuaccugaucagcaucuuccuccaccuggugaagauccccacccaccgccacguggucggcaagcccugccccaagccgcaccggcugaaccacauggggaucugcuccugcggccucuacaagcaccccggggugcccgugaaguggaagcgcugaggacuagucccuguucccagagcccacuuuuuuuucuuuuuuugaaauaaaauagccugucuuucagaucucaaaggcucuuuucagagccaccaaaaaaaaaaaaaaaaaaaaaaaaaaaaaaaaaaaaaaaaaaaaaaaaaaaaaaaaaaaaaaaaagaauu

SEQ ID NO: 24847 - RNA, 1714 nt, Artificial Sequence
  mRNA product Design a-1 (hSL-A64-N5) comprising derived and/or modified sequence from LASV(Lassa virus/H.sapiens-wt/NGA/2015/ISTH_0543;Clade II)__AVO03639__GPCmut3 (opt1)
aggagagucccgcagucggcguccagcggcucugcuuguucgugugugugucguugcaggccuuauucaagcuuaccaugggccagaucaucaccuucuuccaggaggugccccacgucaucgaggaggugaugaacaucgugcugaucgcccucagccugcuggccauccucaaggggaucuacaacgucgcgaccugcggccuguucgggcugguguccuuccuccugcugugcggccgcagcugcuccacgaccuacaaggggguguacgagcuccagacccuggagcuggacauggccaaccucaacaugaccaugccgcugagcugcacgaagaacaacucccaccacuacaucauggucggcaacgagaccggccuggagcucacccugaccaacacgagcaucaucaaccacaaguucugcaaccuguccgacgcccacaagaagaaccucuacgaccacgcccugaugagcaucaucuccaccuuccaccugagcauccccaacuucaaccaguacgaggccauguccugcgacuucaacgggggcaagaucagcgugcaguacaaccucucccacaccuacgcgguggacgccgccaaccacugcgggaccaucgccaacggcguccugcagacguucaugcggauggcguggggcgggagcuacaucgcccuggacuccggcaaggggagcugggacugcaucaugaccuccuaccaguaccucgugauccagaacaccaccugggaggaccacugccaguucagccgccccucccccaucggcuaccuggggcugcucagccagcggacgcgcgacaucuacaucagccggcgccggcgcggcaccuucaccuggacccuguccgacagcgagggcaacgagacgcccgggggcuacugccugacccgguggaugcucaucgaggccgagcugaagugcuucgggaacaccgccguggccaagugcaacgagaagcacgacgaggaguucugcgacaugcugcgccucuucgacuucaacaagcaggcgauccggcgccugaagaccccggcccagauguccauccagcugaucaacaaggccgucaacgcccucaucaacgaccagcugaucaugaagaaccaccuccgggacaucaugggcauccccuacugcaacuacagcaaguacugcuaccugaaccacacggugaccgggaagaccucccugccccgcugcugccuggugagcaacggcuccuaccucaacgagacccacuucagcgacgacaucgagcagcaggccgacaacaugaucacggagcugcugcagaaggaguacaucgaccggcagggcaagaccccgcucgggcuggucgaccuguucguguucuccaccagcuucuaccugaucuccaucuuccuccaccuggugaagauccccacccaccgccacaucacgggcaagcccugccccaagccgcaccggcugaaccacauggggaucugcagcugcggccucuacaagcaccccgggguccccgugaaguggaagcgcugaggacuagucccuguucccagagcccacuuuuuuuucuuuuuuugaaauaaaauagccugucuuucagaucucaaaggcucuuuucagagccaccaaaaaaaaaaaaaaaaaaaaaaaaaaaaaaaaaaaaaaaaaaaaaaaaaaaaaaaaaaaaaaaaagaauu

SEQ ID NO: 24848 - RNA, 1714 nt, Artificial Sequence
  mRNA product Design a-1 (hSL-A64-N5) comprising derived and/or modified sequence from LASV(Lassa virus/H.sapiens-wt/NGA/2016/ISTH_0009;Clade II)__AVO03571__GPCmut3 (opt1)
aggagagucccgcagucggcguccagcggcucugcuuguucgugugugugucguugcaggccuuauucaagcuuaccaugggccagaucaucaccuucuuccaggaggugccccacgucaucgaggaggugaugaacaucgugcugaucgcccucagccugcuggccauccucaaggggaucuacaacgucgcgaccugcggccugcuggggcucguguccuuccugcugcucugcggccgcagcugcuccacgaccuacaaggggguguacgagcugcagacccuggagcucgacauggccagccugaacaugaccaugccgcuguccugcacgaagaacaacagccaccacuacaucauggucggcaacgagaccggccucgagcugacccugaccaacacguccaucaucaaccacaaguucugcaaccucagcgacgcccacaagaagaaccuguacgaccacgcccugauguccaucaucagcaccuuccaccucuccauccccaacuucaaccaguacgaggccaugagcugcgacuucaacgggggccggaucuccgugcaguacaaccugagccacuccuacgcgguggacgccgccaaccacugcgggaccaucgccaacggcguccugcagaccuucaugcgcauggcguggggcgggagcuacaucgcccucgacuccggcaaggggagcugggacugcaucaugacguccuaccaguaccugaucauccagaacaccaccugggaggaccacugccaguucagccggcccagccccaucggcuaccuggggcuccugucccagcgcacccgggacaucuacaucagccgccggcgccggggcacguucaccuggacccuguccgacagcgagggcaacgagacccccgggggcuacugccucacgcgcuggaugcugaucgaggccgagcugaagugcuucgggaacaccgccguggccaagugcaacgagaagcacgacgaggaguucugcgacaugcuccggcuguucgacuucaacaagcaggcgauccgccggcugaagaccccggcccagauguccauccagcucaucaacaaggccgugaacgcccugaucaacgaccagcugaucaugaagaaccaccuccgcgacaucaugggcauccccuacugcaacuacagcaaguacugcuaccugaaccacaccgucacggggaagaccucccugccccggugcugccucgugagcaacggcuccuaccugaacgagacccacuucagcgacgacaucgagcagcaggccgacaacaugaucaccgagcugcuccagaaggaguacaucgaccgccagggcaagacgccgcuggggcugguggaccuguucgucuucuccaccagcuucuaccucaucuccaucuuccugcaccuggugaagauccccacccaccggcacaucaccggcaagcccugccccaagccgcaccgccucaaccacauggggaucugcagcugcggccuguacaaccaccccggggugcccgucaaguggaagcggugaggacuagucccuguucccagagcccacuuuuuuuucuuuuuuugaaauaaaauagccugucuuucagaucucaaaggcucuuuucagagccaccaaaaaaaaaaaaaaaaaaaaaaaaaaaaaaaaaaaaaaaaaaaaaaaaaaaaaaaaaaaaaaaaagaauu

SEQ ID NO: 24849 - RNA, 1714 nt, Artificial Sequence
  mRNA product Design a-1 (hSL-A64-N5) comprising derived and/or modified sequence from LASV(Lassa virus/H.sapiens-wt/NGA/2016/ISTH_0017;Clade II)__AVO03567__GPCmut3 (opt1)
aggagagucccgcagucggcguccagcggcucugcuuguucgugugugugucguugcaggccuuauucaagcuuaccaugggccagaucaucaccuucuuccaggaggugccccacgucaucgaggaggugaugaacaucgugcugaucgcccucagccugcuggccauccucaaggggaucuacaacgucgcgaccugcggccuguucgggcugguguccuuccuccugcugugcggccgcagcugcuccacgaccuacaaggggguguacgagcuccagacccuggagcuggacauggccagccucaacaugaccaugccgcuguccugcacgaagaacaacagccaccacuacaucauggucggcaacgagaccggccuggagcucacccugaccaacacguccaucaucaaccacaaguucugcaaccugagcgacgcccacaagaagaaccucuacgaccacgcccugauguccaucaucagcaccuuccaccuguccauccccaacuucaaccaguacgaggccaugagcugcgacuucaacgggggcaagaucuccgugcaguacaaccucagccacaccuacgcgaucgacgccgccaaccacugcgggaccaucgccaacggcgugcugcagacguucaugcggauggcguggggcggguccuacaucgcccuggacagcggcaagggguccugggacugcaucaugaccagcuaccaguaccucaucauccagaacaccaccugggaggaccacugccaguucucccgccccagccccaucggcuaccuggggcugcucagccagcggacgcgcgacaucuacaucucccggcgccggcgcggcaccuucaccuggacccugagcgacuccgagggcaacgagacgcccgggggcuacugccugacccgguggaugcucaucgaggccgagcugaagugcuucgggaacaccgccgucgccaagugcaacgagaagcacgacgaggaguucugcgacaugcugcgccucuucgacuucaacaagcaggcgauccggcgccugaagaccccggcccagaugagcauccagcugaucaacaaggccgugaacgcccucaucaacgaccagcugaucaugaagaaccaccuccgggacaucaugggcauccccuacugcaacuacuccaaguacugcuaccugaaccacacggugaccgggaagaccagccugccccgcugcugccuggucuccaacggcagcuaccucaacgagacccacuucuccgacgacaucgagcagcaggccgacaacaugaucacggagcugcugcagaaggaguacauggaccggcagggcaagaccccgcucgggcugguggaccuguucguguucagcaccuccuucuaccugaucagcaucuuccuccaccugguccgcauccccacccaccggcacgugaucggcaagcccugccccaagccgcaccgccugaaccacauggggaucugcuccugcggccucuacaagcaccccggggugcccgucaaguggaagcggugaggacuagucccuguucccagagcccacuuuuuuuucuuuuuuugaaauaaaauagccugucuuucagaucucaaaggcucuuuucagagccaccaaaaaaaaaaaaaaaaaaaaaaaaaaaaaaaaaaaaaaaaaaaaaaaaaaaaaaaaaaaaaaaaagaauu

SEQ ID NO: 24850 - RNA, 1714 nt, Artificial Sequence
  mRNA product Design a-1 (hSL-A64-N5) comprising derived and/or modified sequence from LASV(Lassa virus/H.sapiens-wt/NGA/2018/ISTH_0959;Clade II)__AVV65099__GPCmut3 (opt1)
aggagagucccgcagucggcguccagcggcucugcuuguucgugugugugucguugcaggccuuauucaagcuuaccaugggccagaucaucaccuucuuccaggaggugccccacgucaucgaggaggugaugaacaucgugcugaucgcccucagccugcuggccauccucaaggggaucuacaacgucgugaccugcggccuguucgggcugguguccuuccuccugcugugcggccgcagcugcuccacgaccuacaagggggucuacgagcuccagacccuggagcuggacauggcgagccucaacaugaccaugccgcuguccugcacgaagaacaacagccaccacuacaucauggugggcaacgagaccggccuggagcucacccugaccaacacguccaucaucaaccacaaguucugcaaccugagcgacgcccacaagaagaaccucuacgaccacgcccugauguccaucaucagcaccuuccaccuguccauccccaacuucaaccaguacgaggccaugagcugcgacuucaacgggggcaagaucuccgugcaguacaaccucagccacgccuacgcgaucgacgccgccaaccacugcgggaccaucgccaacggcguccugcagaccuucaugcggauggcguggggcggguccuacaucgcccuggacagcggcaagggguccugggacugcaucaugacgagcuaccaguaccucaucauccagaacaccaccugggaggaccacugccaguucucccgccccagccccaucggcuaccuggggcugcucagccagcggacccgcgacaucuacaucucccggcgccggcgcggcacguucaccuggacccugagcgacuccgagggcaacgagacccccgggggcuacugccugacgcgguggaugcucaucgaggccgagcugaagugcuucgggaacaccgccguggccaagugcaacgagaagcacgacgaggaguucugcgacaugcugcgccucuucgacuucaacaagcaggcgauccggcgccugaagaccccggcccagaugagcauccagcugaucaacaaggccgugaacgcccucaucaacgaccagcugaucaugaagaaccaccuccgggacaucaugggcauccccuacugcaacuacuccaaguacugcuaccugaaccacaccgucacggggaagaccagccugccccgcugcugccugguguccaacggcagcuaccucaacgagacccacuucuccgacgacaucgagcagcaggccgacaacaugaucaccgagcugcugcagaaggaguacaucgaccggcagggcaagacgccgcucgggcugguggaccuguucgucuucagcaccuccuucuaccugaucagcaucuuccuccaccuggugaagauccccacccaccgccacgugaucggcaagcccugccccaagccgcaccggcugaaccacauggggaucugcuccugcggccucuacaagcaccccgggguccccgugaaguggaagcgcugaggacuagucccuguucccagagcccacuuuuuuuucuuuuuuugaaauaaaauagccugucuuucagaucucaaaggcucuuuucagagccaccaaaaaaaaaaaaaaaaaaaaaaaaaaaaaaaaaaaaaaaaaaaaaaaaaaaaaaaaaaaaaaaaagaauu

SEQ ID NO: 24851 - RNA, 1714 nt, Artificial Sequence
  mRNA product Design a-1 (hSL-A64-N5) comprising derived and/or modified sequence from LASV(LASV003-NIG-2008;Clade II)__AIT17580__GPCmut3 (opt1)
aggagagucccgcagucggcguccagcggcucugcuuguucgugugugugucguugcaggccuuauucaagcuuaccaugggccagaucaucaccuucuuccaggaggugccccacgucaucgaggaggugaugaacaucgugcugaucgcccucagccugcuggccauccucaaggggaucuacaacgucgcgaccugcggccuguucgggcugguguccuuccuccugcugugcggccgcagcugcuccacgaccuacaaggggguguacgagcuccagacccuggagcuggacauggccagccucaacaugaccaugccgcuguccugcacgaagaacaacagccaccacuacaucauggucggcaacgagaccggccuggagcucacccugaccaacacguccaucaucaaccacaaguucugcaaccugagcgacgcccacaagaagaaccucuacgaccacgcccugauguccaucaucagcaccuuccaccuguccauccccaacuucaaccaguacgaggccaugagcugcgacuucaacgggggcaagaucuccgugcaguacaaccucagccacaccuacgcgguggacgccgccaaccacugcgggaccaucgccaacggcguccugcagacguucaugcggauggcguggggcggguccuacaucgcccuggacagcggcaagggguccugggacugcaucaugaccagcuaccaguaccucaucauccagaacaccaccugggaggaccacugccaguucucccgccccagccccaucggcuaccuggggcugcucagccagcggacgcgcgacaucuacaucucccggcgccggcgcggcaccuucaccuggacccugagcgacuccgagagcaacgagacgccgggcggguacugccugacccgguggaugcucaucgaggccgagcugaagugcuucggcaacaccgccguggccaagugcaacgagaagcacgacgaggaguucugcgacaugcugcgccucuucgacuucaacaagcaggcgauccggcgccugaaggcccccgcccagauguccauccagcugaucaacaaggccgugaacgcccucaucaacgaccagcugaucaugaagaaccaccuccgggacaucauggggauccccuacugcaacuacagcaaguacugcuaccugaaccacaccgucacgggccgcaccucccugccccggugcugccuggugagcaacggguccuaccucaacgagacccacuucagcgacgacaucgagcagcaggcggacaacaugaucaccgagcugcugcagaaggaguacauggaccgccagggcaagacgccgcucggccugguggaccuguucgucuucuccaccagcuucuaccugaucuccaucuuccuccaccuggugaagauccccacccaccggcacgugaucgggaagcccugccccaagccgcaccgccugaaccacaugggcaucugcagcugcgggcucuacaagcaccccggcguccccgugaaguggaagcggugaggacuagucccuguucccagagcccacuuuuuuuucuuuuuuugaaauaaaauagccugucuuucagaucucaaaggcucuuuucagagccaccaaaaaaaaaaaaaaaaaaaaaaaaaaaaaaaaaaaaaaaaaaaaaaaaaaaaaaaaaaaaaaaaagaauu

SEQ ID NO: 24852 - RNA, 1714 nt, Artificial Sequence
  mRNA product Design a-1 (hSL-A64-N5) comprising derived and/or modified sequence from LASV(LASV035-NIG-2009;Clade II)__AIT17588__GPCmut3 (opt1)
aggagagucccgcagucggcguccagcggcucugcuuguucgugugugugucguugcaggccuuauucaagcuuaccaugggccagaucaucaccuucuuccaggaggugccccacgucaucgaggaggugaugaacaucgugcugaucgcccucagccugcuggccauccucaaggggaucuacaacgucgcgaccugcggccuguucgggcugguguccuuccuccugcugugcggccgcagcugcuccacgaccuacaaggggguguacgagcuccagacccuggagcuggacauggccagccucaacaugaccaugccgcuguccugcacgaagaacaacagccaccacuacaucauggucggcaacgagaccggccuggagcucacccugaccaacacguccaucaucaaccacaaguucugcaaccugagcgacgcccacaagaagaaccucuacgaccacgcccugauguccaucaucagcaccuuccaccuguccauccccaacuucaaccaguacgaggccaugagcugcgacuucaacgggggcaagaucuccgugcaguacaaccucagccacgcguacgccguggacgccgccaaccacugcgggaccaucgcgaacggcguccugcagaccuucaugcggauggccuggggcggguccuacaucgcccuggacagcggcaagggguccugggacugcaucaugacgagcuaccaguaccucaucauccagaacaccaccugggaggaccacugccaguucucccgccccagccccaucggcuaccuggggcugcucagccagcggacccgcgacaucuacaucucccggcgccggcgcggcacguucaccuggacccugagcgacuccgagggcaacgagacccccgggggcuacugccugacgcgguggaugcucaucgaggccgagcugaagugcuucgggaacaccgccguggcgaagugcaacgagaagcacgacgaggaguucugcgacaugcugcgccucuucgacuucaacaagcaggccauccggcgccugaaggccccggcccagaugagcauccagcugaucaacaaggccgugaacgcgcucaucaacgaccagcugaucaugaagaaccaccuccgggacaucaugggcauccccuacugcaacuacuccaaguacugcuaccugaaccacaccgucaccgggaagacgagccugccccgcugcugccugguguccaacggcagcuaccucaacgagacccacuucuccgacgacaucgagcagcaggccgacaacaugaucaccgagcugcugcagaaggaguacaucgaccggcagggcaagaccccgcucgggcugguggaccuguucgucuucagcacguccuucuaccugaucagcaucuuccuccaccuggugaagauccccacccaccgccacgugaucggcaagcccugccccaagccgcaccggcugaaccacauggggaucugcuccugcggccucuacaagcaccccgggguccccgugaaguggaagcgcugaggacuagucccuguucccagagcccacuuuuuuuucuuuuuuugaaauaaaauagccugucuuucagaucucaaaggcucuuuucagagccaccaaaaaaaaaaaaaaaaaaaaaaaaaaaaaaaaaaaaaaaaaaaaaaaaaaaaaaaaaaaaaaaaagaauu

SEQ ID NO: 24853 - RNA, 1714 nt, Artificial Sequence
  mRNA product Design a-1 (hSL-A64-N5) comprising derived and/or modified sequence from LASV(LASV1000-NIG-2009;Clade II)__AIT17782__GPCmut3 (opt1)
aggagagucccgcagucggcguccagcggcucugcuuguucgugugugugucguugcaggccuuauucaagcuuaccaugggccagaucaucaccuucuuccaggaggugccccacgucaucgaggaggugaugaacaucgugcugaucgcccucagccugcuggccauccucaaggggaucuacaacgucgcgaccugcggccuguucgggcugguguccuuccuccugcugugcggccgcagcugcuccacgaccuacaaggggguguacgagcuccagacccuggagcuggacauggccagccucaacaugaccaugccgcuguccugcacgaagaacaacagccaccacuacaucauggucggcaacgagaccggccuggagcucacccugaccaacacguccaucaucaaccacaaguucugcaaccugagcgacgcccacaagaagaaccucuacgaccacgcccugauguccaucaucagcaccuuccaccuguccauccccaacuucaaccaguacgaggccaugagcugcgacuucaacgggggcaagaucuccgugcaguacaaccucagccacaccuacgcgguggacgccgccaaccacugcgggaccaucgccaacggcguccugcagacguucaugcggauggcguggggcggguccuacaucgcccuggacagcggcaagggguccugggacugcaucaugaccagcuaccaguaccucaucauccagaacaccaccugggaggaccacugccaguucucccgccccagccccaucggcuaccuggggcugcucagccagcggacgcgcgacaucuacaucucccggcgccggcgcggcaccuucaccuggacccugagcgacuccgagggcaacgagacgcccgggggcuacugccugacccgguggaugcucaucgaggccgagcugaagugcuucgggaacaccgccguggccaagugcaacgagaagcacgacgaggaguucugcgacaugcugcgccucuucgacuucaacaagcaggcgaucaagcggcugaagaccccggcccagaugagcauccagcugaucaacaaggccgugaacgcccucaucaacgaccagcugaucaugaagaaccaccuccgcgacaucaugggcauccccuacugcaacuacuccaaguacugcuaccugaaccacacggucaccgggaagaccagccugccccggugcugccugguguccaacggcagcuaccucaacgagacccacuucuccgacgacaucgagcagcaggccgacaacaugaucacggagcugcugcagaaggaguacaucgaccgccagggcaagaccccgcucgggcugguggaccuguucgucuucagcaccuccuucuaccugaucagcaucuuccuccaccuggugaagauccccacccaccggcacguggucggcaagcccugccccaagccgcaccgccugaaccacauggggaucugcuccugcggccucuacaagcaccccggggugcccgugaaguggaagcggugaggacuagucccuguucccagagcccacuuuuuuuucuuuuuuugaaauaaaauagccugucuuucagaucucaaaggcucuuuucagagccaccaaaaaaaaaaaaaaaaaaaaaaaaaaaaaaaaaaaaaaaaaaaaaaaaaaaaaaaaaaaaaaaaagaauu

SEQ ID NO: 24854 - RNA, 1714 nt, Artificial Sequence
  mRNA product Design a-1 (hSL-A64-N5) comprising derived and/or modified sequence from LASV(LASV221-NIG-2010;Clade II)__AIT17624__GPCmut3 (opt1)
aggagagucccgcagucggcguccagcggcucugcuuguucgugugugugucguugcaggccuuauucaagcuuaccaugggccagaucaucaccuucuuccaggaggugccccacgucaucgaggaggugaugaacaucgugcugaucgcccucagccugcuggccauccucaaggggaucuacaacgucgcgaccugcggccuguucgggcugguguccuuccuccugcugugcggccgcagcugcuccacgaccuacaaggggguguacgagcuccagacccuggagcuggacauggccagccucaacaugaccaugccgcuguccugcacgaagaacaacagccaccacuacaucauggucggcaacgagaccggccuggagcucacccugaccaacacguccaucaucaaccacaaguucugcaaccugagcgacgcccacaagaagaaccucuacgaccacgcccugauguccaucaucagcaccuuccaccuguccauccccaacuucaaccaguacgaggccaugagcugcgacuucaacgggggcaagaucuccgugcaguacaaccucagccacaccuacgcgaucgacgccgccaaccacugcgggaccaucgccaacggcgugcugcagacguucaugcggauggcguggggcggguccuacaucgcccuggacagcggcaagggguccugggacugcaucaugaccagcuaccaguaccucaucauccagaacaccaccugggaggaccacugccaguucucccgccccagccccaucggcuaccuggggcugcucagccagcggacgcgcgacaucuacaucucccggcgccggcgcggcaccuucaccuggacccugagcgacuccgagggcaacgagacgcccgggggcuacugccugacccgguggaugcucaucgaggccgagcugaagugcuucgggaacaccgccgucgccaagugcaacgagaagcacgacgaggaguucugcgacaugcugcgccucuucgacuucaacaagcaggcgauccggcgccugaagaccccggcccagaugagcauccagcugaucaacaaggccgugaacgcccucaucaacgaccagcugaucaugaagaaccaccuccgggacaucaugggcauccccuacugcaacuacuccaaguacugcuaccugaaccacacggugaccgggaagaccagccugccccgcugcugccuggucuccaacggcagcuaccucaacgagacccacuucuccgacgacaucgagcagcaggccgacaacaugaucacggagaugcugcagaaggaguacauggaccggcagggcaagaccccgcuggggcucguggaccuguucguguucagcaccuccuucuaccugaucagcaucuuccugcaccucgucaagauccccacccaccgccacgugaucggcaagcccugccccaagccgcaccggcugaaccacauggggaucugcuccugcggccuguacaagcaccccggggugcccgucaaguggaagcgcugaggacuagucccuguucccagagcccacuuuuuuuucuuuuuuugaaauaaaauagccugucuuucagaucucaaaggcucuuuucagagccaccaaaaaaaaaaaaaaaaaaaaaaaaaaaaaaaaaaaaaaaaaaaaaaaaaaaaaaaaaaaaaaaaagaauu

SEQ ID NO: 24855 - RNA, 1714 nt, Artificial Sequence
  mRNA product Design a-1 (hSL-A64-N5) comprising derived and/or modified sequence from LASV(LASV237-NIG-2010;Clade II)__AIT17638__GPCmut3 (opt1)
aggagagucccgcagucggcguccagcggcucugcuuguucgugugugugucguugcaggccuuauucaagcuuaccaugggccagaucaucaccuucuuccaggaggugccccacgucaucgaggaggugaugaacaucgugcugaucgcccucagccugcuggccauccucaaggggaucuacaacgucgcgaccugcggccuguucgggcugguguccuuccuccugcugugcggccgcagcugcuccacgaccuacaaggggguguacgagcuccagacccuggagcuggacauggccagccucaacaugaccaugccgcuguccugcacgaagaacaacagccaccacuacaucauggucggcaacgagaccggccuggagcucacccugaccaacacguccaucaucaaccacaaguucugcaaccugagcgacgcccacaagaaggaccucuacgaccacgcccugauguccaucaucagcaccuuccaccuguccauccccaacuucaaccaguacgaggccaugagcugcgacuucaacgggggcaagaucuccgugcaguacaaccucagccacaccuacgcgguggacgccgccaaccacugcgggaccaucgccaacggcguccugcagacguucaugcggauggcguggggcggguccuacaucgcccuggacagcggcaagggguccugggacugcaucaugaccagcuaccaguaccucaucauccagaacaccaccugggaggaccacugccaguucucccgccccagccccaucggcuaccuggggcugcucagccagcggacgcgcgacaucuacaucucccggcgccggcgcggcaccuucaccuggacccugagcgacuccgagggcaacgagacgcccgggggcuacugccugacccgguggaugcucaucgaggccgagcugaagugcuucgggaacaccgccguggccaagugcaacgagaagcacgacgaggaguucugcgacaugcugcgccucuucgacuucaacaagcaggcgauccggcgccugaagaccccggcccagaugagcauccagcugaucaacaaggccgugaacgcccucaucaacgaccagcugaucaugaagaaccaccuccgggacaucaugggcauccccuacugcaacuacuccaaguacugcuaccugaaccacacggucaccgggaagaccagccugccccgcugcugccugguguccaacggcagcuaccucaacgagacccacuucuccgacgacaucgagcagcaggccgacaacaugaucacggagcugcugcagaaggaguacauggaccggcagggcaagaccccgcucgggcugguggaccuguucgucuucagcaccuccuucuaccugaucagcaucuuccuccaccugaucaagauccccacccaccgccacaucacgggcaagcccugccccaagccgcaccggcugaaccacauggggaucugcuccugcggccucuacaagcaccccggggugcccgugaaguggaagcgcugaggacuagucccuguucccagagcccacuuuuuuuucuuuuuuugaaauaaaauagccugucuuucagaucucaaaggcucuuuucagagccaccaaaaaaaaaaaaaaaaaaaaaaaaaaaaaaaaaaaaaaaaaaaaaaaaaaaaaaaaaaaaaaaaagaauu

SEQ ID NO: 24856 - RNA, 1714 nt, Artificial Sequence
  mRNA product Design a-1 (hSL-A64-N5) comprising derived and/or modified sequence from LASV(LASV253-NIG-2011;Clade II)__AIT17670__GPCmut3 (opt1)
aggagagucccgcagucggcguccagcggcucugcuuguucgugugugugucguugcaggccuuauucaagcuuaccaugggccagaucaucaccuucuuccaggaggugccccacgucaucgaggaggugaugaacaucgugcugaucgcccucagccugcuggccauccucaaggggaucuacaacgucgcgaccugcggccuguucgggcugguguccuuccuccugcugugcggccgcagcugcuccacgaccuacaaggggguguacgagcuccagacccuggagcuggacauggccagccucaacaugaccaugccgcuguccugcacgaagaacaacagccaccacuacaucauggucggcaacgagaccggccuggagcucacccugaccaacacguccaucaucaaccacaaguucugcaaccugagcgacgcccacaagaagaaccucuacgaccacgcccugauguccaucaucagcaccuuccaccuguccauccccaacuucaaccaguacgaggccaugagcugcgacuucaacgggggcaagaucuccgugcaguacaaccucagccacaccuacgcgguggacgccgccaaccacugcgggaccaucgccaacggcguccugcagacguucaugcggauggcguggggcggguccuacaucgcccuggacagcggcaagggguccugggacugcaucaugaccagcuaccaguaccucaucauccagaacaccaccugggaggaccacugccaguucucccgccccagccccaucggcuaccuggggcugcucagccagcggacgcgcgacaucuacaucucccggcgccggcgcggcaccuucaccuggacccugagcgacuccgagggcaacgagacgcccgggggcuacugccugacccgguggaugcucaucgaggccgagcugaagugcuucgggaacaccgccguggccaagugcaacgagaagcacgacgaggaguucugcgacaugcugcgccucuucgacuucaacaagcaggcgauccggcgccugaaggccccggcccagaugagcauccagcugaucaacaaggccgugaacgcccucaucaacgaccagcugaucaugaagaaccaccuccgggacaucaugggcauccccuacugcaacuacuccaaguacugcuaccugaaccacaccgucacggggcgcaccagccugccccggugcugccugguguccaacggcagcuaccucaacgagacccacuucuccgacgacaucgagcagcaggcggacaacaugaucaccgagcugcugcagaaggaguacaucgaccgccagggcaagacgccgcucgggcugguggaccuguucgucuucagcaccuccuucuaccugaucagcaucuuccuccaccuggugaagauccccacccaccggcacaucaucggcaagcccugccccaagccgcaccgccugaaccacauggggaucugcuccugcggccucuacaagcaccccggggugcccgucaaguggaagcggugaggacuagucccuguucccagagcccacuuuuuuuucuuuuuuugaaauaaaauagccugucuuucagaucucaaaggcucuuuucagagccaccaaaaaaaaaaaaaaaaaaaaaaaaaaaaaaaaaaaaaaaaaaaaaaaaaaaaaaaaaaaaaaaaagaauu

SEQ ID NO: 24857 - RNA, 1714 nt, Artificial Sequence
  mRNA product Design a-1 (hSL-A64-N5) comprising derived and/or modified sequence from LASV(LASV254-NIG-2011;Clade II)__AIT17674__GPCmut3 (opt1)
aggagagucccgcagucggcguccagcggcucugcuuguucgugugugugucguugcaggccuuauucaagcuuaccaugggccagaucaucaccuucuuccaggaggugccccacgucaucgaggaggugaugaacaucgugcugaucgcccucagccugcuggccauccucaaggggaucuacaacgucgcgaccugcggccuguucgggcugguguccuuccuccugcugugcggccgcagcugcuccacgaccuacaaggggguguacgagcuccagacccuggagcuggacaugaccaaccucaacaugacgaugccgcugagcugcaccaagaacaacucccaccacuacaucauggucggcaacgagaccggccuggagcucacccugacgaacaccagcaucaucaaccacaaguucugcaaccuguccgacgcccacaagaagaaccucuacaaccacgcccugaugagcaucaucuccaccuuccaccugagcauccccaacuucaaccaguacgaggccauguccugcgacuucaacgggggcaagaucagcgugcaguacaaccucucccacagcuacgccguggacgcggccaaccacugcgggaccaucgccaacggcguccugcagacguucaugcggauggccuggggcggguccuacaucgcgcuggacagcggcaaggggaacugggacugcaucaugaccuccuaccaguaccucaucauccagaacaccaccugggaggaccacugccaguucagccgccccucccccaucggcuaccuggggcugcucagccagcggacgcgcgacaucuacaucagccggcgccggcgcggcaccuucaccuggacccuguccgacagcgagggcaacgagacgcccgggggcuacugccugacccgguggaugcucaucgaggccgagcugaagugcuucgggaacaccgccguggccaagugcaacgagaagcacgacgaggaguucugcgacaugcugcgccucuucgacuucaacaagcaggccauccggcgccugaagaccccggcgcaggccaacauccagcugaucaacaaggccgugaacgcccucaucaacgaccagcugaucaugaagaaccaccuccgggacaucaugggcauccccuacugcaacuacuccaaguacugcuaccugaaccacacggucaccgggaagaccagccugccccgcugcugccugguguccaacggcagcuaccucaacgagacccacuucuccgacgacaucgagcagcaggccgacaacaugaucacggagcugcugcagaaggaguacauggaccggcagggcaagaccccgcucgggcugguggaccuguucgucuucagcaccuccuucuaccugaucagcaucuuccuccaccuggugaagauccccacccaccgccacgugaucggcaagcccugccccaagccgcaccggcugaaccacauggggaucugcuccugcggccucuacaagcaccccgggguccccgugaaguggaagcgcugaggacuagucccuguucccagagcccacuuuuuuuucuuuuuuugaaauaaaauagccugucuuucagaucucaaaggcucuuuucagagccaccaaaaaaaaaaaaaaaaaaaaaaaaaaaaaaaaaaaaaaaaaaaaaaaaaaaaaaaaaaaaaaaaagaauu

SEQ ID NO: 24858 - RNA, 1714 nt, Artificial Sequence
  mRNA product Design a-1 (hSL-A64-N5) comprising derived and/or modified sequence from LASV(Nig08-A19;Clade III)__ADU56618__GPCmut3 (opt1)
aggagagucccgcagucggcguccagcggcucugcuuguucgugugugugucguugcaggccuuauucaagcuuaccaugggccagaucgugaccuucuuccaggaggucccccacgugaucgaggaggugaugaacaucguccugaucgcccucagcauccuggccauccugaaggggcucuacaacaucgcgaccugcggccugaucgggcuggugacguuccuccugcuguccggccgcagcugcuccaugaccuacaaggggguguacgagcuccagacccuggagcugaacaugaacacccucaacaugacgaugccgcugagcugcaccaagaacaacucccaccacuacaucauggucggcaacgagaccggccuggagcucacccugacgaacaccagccugcuccaccacaaguucugcaaccuguccgacgcccacaagaagaaccuguacgaccacacccucaugagcaucaucuccaccuuccaccugagcauccccaacuucaaccaguacgaggccauguccugcgacuucaacgggggcaagaucacggugcaguacaaccugagccacuccuacgccaucgacgccgcgaaccacugcgggaccguggccaacggcguccuccagaccuucaugcggauggccuggggcgggagcuacaucgcccuggacuccggccgcgggaagugggacugcaucaugaccagcuaccaguaccugaucauccagaacacgaccugggaggaccacugccaguucucccggcccagccccaucggcuaccucgggcugcugucccagcgcacccgggacaucuacaucagccgccggcgccggggcaccuucacguggacccucagcgacuccgagggcaacgagacccccgggggcuacugccugacccgcuggaugcugaucgaggcggagcucaagugcuucgggaacacggccguggccaagugcaacgagaagcacgacgaggaguucugcgacaugcugcggcuguucgacuucaacaagcaggccauccgccggcucaaggccccggcgcagaugagcauccagcugaucaacaaggccgugaacgcccugaucaacgaccagcucaucaugaagaaccaccuccgcgacaucaugggcauccccuacugcaacuacuccaaguacugcuaccugaaccacaccagcaccgggcggaccucccugccccgcugcugccuggucagcaacggcuccuaccugaacgagacgcacuucagcgacgacaucgagcagcaggccgacaacaugaucaccgagaugcuccagaaggaguaccuggaccggcagggcaagaccccgcuggggcugguggaccucuucguguucuccaccagcuucuaccugaucuccaucuuccugcaccucgucaagauccccacgcaccgccacaucgugggcaagcccugccccaagccgcaccggcugaaccacauggggaucugcagcugcggccuguacaagcagcccggggugcccguccgcuggaagcggugaggacuagucccuguucccagagcccacuuuuuuuucuuuuuuugaaauaaaauagccugucuuucagaucucaaaggcucuuuucagagccaccaaaaaaaaaaaaaaaaaaaaaaaaaaaaaaaaaaaaaaaaaaaaaaaaaaaaaaaaaaaaaaaaagaauu

SEQ ID NO: 24859 - RNA, 1717 nt, Artificial Sequence
  mRNA product Design a-1 (hSL-A64-N5) comprising derived and/or modified sequence from LASV(G1180-SLE-2010;Clade IV)__AIT17168__GPCmut3 (opt1)
aggagagucccgcagucggcguccagcggcucugcuuguucgugugugugucguugcaggccuuauucaagcuuaccaugggccagaucgugaccuucuuccaggaggucccccacgugaucgaggaggugaugaacaucguccugaucgcccucagcauccuggccgugcugaaggggcucuacaacuucgcgaccugcggccugguggggcugcucacguuccugcugcucugcggccgcuccugcaccgccagccgguacaagggggucuacgagcugcagacccuggagcucaacauggagacccugaacaugacgaugccgcuguccugcaccaagaacaacagccaccacuacaucauggugggcaacgagaccggccucgagcugacccugacgaacaccuccaucaucaaccacaaguucugcaaccucagcgacgcccacaagaagaaccuguacgaccacgcccugauguccaucaucagcaccuuccaccucuccauccccaacuucaaccaguacgaggccaugagcugcgacuucaacgggggcaagaucuccgugcaguacaaccugagccacuccuacgcgggggacgccgccaaccacugcggcaccgucgccaacggggugcugcagacguucaugcgcauggcguggggcggcagcuacaucgcccucgacuccgggcacggcagcugggacugcaucaugaccuccuaccaguaccugaucauccagaacaccaccugggaggaccacugccaguucagccggcccucccccaucggguaccugggccuccugagccagcgcacgcgggacaucuacaucagccgccggcgccggggcaccuucaccuggacccuguccgacagcgaggggaaggacacgccgggcggguacugccucacccgcuggaugcugaucgaggccgagcugaagugcuucggcaacaccgccguggccaagugcaacgagaagcacgacgaggaguucugcgacaugcuccggcuguucgacuucaacaagcaggcgauccagcgccugaaggcccccgcccagauguccauccagcucaucaacaaggccgucaacgcccugaucaacgaccagcugaucaugaagaaccaccuccgggacaucauggggauccccuacugcaacuacagcaaguacugcuaccugaaccacaccacgaccggcaagaccucccugcccaagugcugccucgugagcaacggcuccuaccugaacgagacccacuucagcgacgacaucgagcagcaggcggacaacaugaucacggagaugcugcagaaggaguacauggagcgccaggggaagaccccgcucggccugguggaccuguucgucuucuccaccagcuucuaccugaucuccaucuuccuccaccuggugaagauccccacccaccggcacaucgugggcaagagcugccccaagccccaccgccugaaccacauggggaucugcuccugcgggcucuacaagcagccgggcguccccgugaaguggaagcggugaggacuagucccuguucccagagcccacuuuuuuuucuuuuuuugaaauaaaauagccugucuuucagaucucaaaggcucuuuucagagccaccaaaaaaaaaaaaaaaaaaaaaaaaaaaaaaaaaaaaaaaaaaaaaaaaaaaaaaaaaaaaaaaaagaauu

SEQ ID NO: 24860 - RNA, 1717 nt, Artificial Sequence
  mRNA product Design a-1 (hSL-A64-N5) comprising derived and/or modified sequence from LASV(G1442-SLE-2011;Clade IV)__AIT17180__GPCmut3 (opt1)
aggagagucccgcagucggcguccagcggcucugcuuguucgugugugugucguugcaggccuuauucaagcuuaccaugggccagaucgugaccuucuuccaggaggucccccacgugaucgaggaggugaugaacaucguccugaucgcccucagcauccuggccgugcugaaggggcucuacaacguggcgaccugcggccugaucgggcuggucacguuccuccugcugugcggccgcuccugcaccaccacccucuacaaggggguguacgagcugcagacgcuggagcucaacauggagacccugaacaugaccaugccgcugagcugcaccaagaacaacucccaccacuacauccgggugggcaacgagacgggccucgagcugacccugaccaacaccagcaucaucaaccacaaguucugcaaccucuccgacgcccacaagaagaaccuguacgaccacgcccugaugagcaucaucuccacguuccaccucagcauccccaacuucaaccaguacgaggccauguccugcgacuucaacgggggcaagaucagcguccaguacaaccugucccacagcuacgccggggacgcggccaaccacugcggcaccguggccaacggggugcugcagaccuucaugcgcauggccuggggcggcuccuacaucgcgcucgacagcgggcggggcaacugggacugcaucaugaccuccuaccaguaccugaucauccagaacacgaccugggacgaccacugccaguucagccgccccucccccaucggguaccugggccuccugagccagcggacccgcgacgucuacaucucccggcgccggcgcggcaccuucacguggacccugagcgacagcgaggggaaggacaccccgggcggguacugccucacccgguggaugcugaucgaggccgagcugaagugcuucggcaacacggccguggccaagugcaacgagaagcacgacgaggaguucugcgacaugcuccgccuguucgacuucaacaagcaggccauccagcggcugaaggcgcccgcccagauguccauccagcucaucaacaaggccgugaacgcccugaucaacgaccagcugaucaugaagaaccaccuccgcgacaucauggggauccccuacugcaacuacagcaaguacugcuaccugaacaacaccgccaccggcaagaccucccugcccaagugcugccucaucagcaacggcuccuaccugaacgagacgcacuucagcgacgacaucgagcaggaggcggacaacaugaucaccgagaugcugcagaaggaguacauggagcggcaggggaagaccccgcucggccuggucgaccuguucguguucuccaccagcuucuaccugaucuccaucuuccuccaccuggugaagauccccacgcaccgccacaucgucggcaagagcugccccaagccccaccggcugaaccacauggggaucugcuccugcgggcucuacaagcagccgggcgugcccgugcgcuggaagcggugaggacuagucccuguucccagagcccacuuuuuuuucuuuuuuugaaauaaaauagccugucuuucagaucucaaaggcucuuuucagagccaccaaaaaaaaaaaaaaaaaaaaaaaaaaaaaaaaaaaaaaaaaaaaaaaaaaaaaaaaaaaaaaaaagaauu

SEQ ID NO: 24861 - RNA, 1717 nt, Artificial Sequence
  mRNA product Design a-1 (hSL-A64-N5) comprising derived and/or modified sequence from LASV(G3010-SLE-2013;Clade IV)__AIT17344__GPCmut3 (opt1)
aggagagucccgcagucggcguccagcggcucugcuuguucgugugugugucguugcaggccuuauucaagcuuaccaugggccagaucgugaccuucuuccaggaggucccccacgugaucgaggaggugaugaacaucguccugaucgcccucagcauccuggccgugcugaaggggcucuacaacuucgcgaccugcggccugguggggcuggucacguuccuccugcugugcggccgcuccugcaccaccagccucuacaaggggguguacgagcugcagacccuggagcucaacauggagacgcugaacaugaccaugccgcuguccugcaccaagaacaacagccaccacuacaucauggugggcaacgagaccggccucgagcugacgcugaccaacaccuccaucaucaaccacaaguucugcaaccucagcgacgcccacaagaagaaccuguacaaccacgcccugauguccaucaucagcaccuuccaccucuccauccccaacuucaaccaguacgaggccaugagcugcgacuucaacgggggcaagaucuccguccaguacaaccugagccacuccuacgccggggacgcggccagccacugcggcacgguggccaacggggugcugcagaccuucaugcggauggccuggggcggcuccuacaucgcgcucgacagcggguacggcaagugggacugcaucaugaccuccuaccaguaccugaucauccagaacaccacgugggaggaccacugccaguucagccgccccucccccaucggguaccugggccuccugagccagcggacccgcgacaucuacaucagccggcgccggcgcggcaccuucaccuggacgcuguccgacagcgaggggaaggacaccccgggcggguacugccucacccgguggaugcugaucgaggccgagcugaagugcuucggcaacaccgccgucgccaagugcaacgagaagcacgacgaggaguucugcgacaugcuccgccuguucgacuucaacaagcaggccauccagcggcugaagacgcccgcgcagauguccauccagcucaucaacaaggccgugaacgcccugaucaacgaccagcugaucaugaagaaccaccuccgcgacaucauggggauccccuacugcaacuacagcaaguacugcuaccugaaccacaccaccaccggcaagacgucccugcccaagugcugccucgugagcaacggcuccuaccugaacgagacccacuucagcgacgacaucgagcagcaggccgacaacaugaucaccgagaugcugcagaaggaguacauggagcggcaggggaagaccccgcucggccuggucgaccuguucguguucuccacgagcuucuaccugaucuccaucuuccuccaccuggugaagauccccacccaccgccacaucgucggcaagagcugccccaagccccaccggcugaaccacauggggaucugcuccugcgggcucuacaagcagccgggcgugcccgugcgcuggaagcggugaggacuagucccuguucccagagcccacuuuuuuuucuuuuuuugaaauaaaauagccugucuuucagaucucaaaggcucuuuucagagccaccaaaaaaaaaaaaaaaaaaaaaaaaaaaaaaaaaaaaaaaaaaaaaaaaaaaaaaaaaaaaaaaaagaauu

SEQ ID NO: 24862 - RNA, 1717 nt, Artificial Sequence
  mRNA product Design a-1 (hSL-A64-N5) comprising derived and/or modified sequence from LASV(G502-SLE-2009;Clade IV)__AIT17126__GPCmut3 (opt1)
aggagagucccgcagucggcguccagcggcucugcuuguucgugugugugucguugcaggccuuauucaagcuuaccaugggccagaucgugaccuucuuccaggaggucccccacgugaucgaggaggugaugaacaucguccugaucgcccucagcauccuggccgugcugaaggggcucuacaacuucgcgaccugcggccugguggggcugcucacguuccugcugcucugcggccgcuccugcaccaccgggcuguacaagggcgucuacgagcugcagacccucgagcugaacauggagacgcugaacaugaccaugccgcucagcugcaccaagaacaacucccaccacuacaucauggugggcaacgagaccgggcuggagcugacgcucaccaacaccagcaucaucaaccacaaguucugcaaccuguccgacgcccacaagaagaaccuguacgaccacgcccucaugagcaucaucuccaccuuccaccugagcauccccaacuucaaccaguacgaggccauguccugcgacuucaacggcgggaagaucagcgugcaguacaaccugucccacagcuacgccggcgacgcggccgaccacugcgggacggucgccaacggcgugcuccagaccuucaugcggauggccuggggcggguccuacaucgcgcuggacagcggccgcgggcggugggacugcaucaugaccuccuaccaguaccugaucauccagaacaccacgugggaggaccacugccaguucagccgccccucccccaucggcuaccucggccugcugagccagcggacccgcgacaucuacaucucccggcgccggcgcgggaccuucaccuggacgcucagcgacagcgagggcaaggacacccccgggggcuacugccugacccgguggaugcugaucgaggccgagcucaagugcuucgggaacaccgccguggccaagugcaacgagaagcacgacgaggaguucugcgacaugcugcgccuguucgacuucaacaagcaggccauccagcggcucaaggcgccggcccagauguccauccagcugaucaacaaggccgucaacgcccugaucaacgaccagcucgugaugaagaaccaccuccgcgacaucaugggcauccccuacugcaacuacagccgguacugcuaccugaaccacacgaccaccggccgcaccucccugcccaagugcugccuggugagcaacggguccuaccugaacgagacgcacuucagcgacgacaucgagcagcaggccgacaacaugaucaccgagaugcuccagaaggaguacauggagcggcagggcaagaccccgcuggggcuggucgaccuguucguguucuccaccagcuucuaccucaucuccaucuuccugcaccuggugaagauccccacgcaccgccacaucgucggcaagagcugccccaagccccaccggcucaaccacauggggaucugcuccugcggccuguacaagcagccgggcgugcccgugaaguggaagcgcugaggacuagucccuguucccagagcccacuuuuuuuucuuuuuuugaaauaaaauagccugucuuucagaucucaaaggcucuuuucagagccaccaaaaaaaaaaaaaaaaaaaaaaaaaaaaaaaaaaaaaaaaaaaaaaaaaaaaaaaaaaaaaaaaagaauu

SEQ ID NO: 24863 - RNA, 1717 nt, Artificial Sequence
  mRNA product Design a-1 (hSL-A64-N5) comprising derived and/or modified sequence from LASV(G733-SLE-2010;Clade IV)__AIT17154__GPCmut3 (opt1)
aggagagucccgcagucggcguccagcggcucugcuuguucgugugugugucguugcaggccuuauucaagcuuaccaugggccagaucgugaccuucuuccaggaggucccccacgugaucgaggaggugaugaacaucguccugaucgcccucagcauccuggccgugcugaaggggcucuacaacuucgcgaccugcggcaucguggggcuggucuccuuccugcuccugugcggccgcagcugcacgaccucccuguacaaggggguguacgagcuccagacccuggagcugaacauggagacccucaacaugacgaugccgcugagcugcaccaagaacaacucccaccacuacaucauggugggcaacgagaccggccuggagcucacccugacgaacaccagcaucaucaaccacaaguucugcaaccuguccgacgcccacaagaagaaccucuacgaccacgcccugaugagcaucaucuccaccuuccaccugagcauccccaacuucaaccaguacgaggccauguccugcgacuucaacgggggcaagaucagcguccaguacaaccucucccacagcuacgccggggacgcggccaaccacugcggcaccaucgccaacggggugcugcagacguucaugcggauggccuggggcggcuccuacaucgcgcuggacagcgggcgcgaccggugggacugcaucaugaccuccuaccaguaccucaucauccagaacaccaccugggaggaccacugccaguucagccgccccucccccaucggcuaccuggggcugcucagccagcggacgcgcgacaucuacaucagccggcgccggcgcggcaccuucaccuggacccuguccgacagcgagggcaaggacacgcccgggggcuacugccugacccgguggaugcucaucgaggccgagcugaagugcuucgggaacaccgccguggccaagugcaacgagaagcacgacgaggaguucugcgacaugcugcgccucuucgacuucaacaagcaggccauccagcggcugaaggcgccggcccagauguccauccagcugaucaacaaggccgucaacgcccucaucaacgaccagcugaucaugaagaaccaccuccgcgacaucaugggcauccccuacugcaacuacagcaaguacugcuaccugaaccacaccacgaccgggaagaccucccugcccaagugcugccuggugagcaacggcuccuaccucaacgagacccacuucagcgacgacaucgagcagcaggccgacaacaugaucacggagaugcugcagaaggaguacauggagcggcagggcaagaccccgcuggggcucguggaccuguucgucuucuccaccagcuucuaccugaucuccaucuuccugcaccucgugaagauccccacccaccgccacguggucggcaagagcugccccaagccccaccggcugaaccacauggggaucugcuccugcggccuguacgggcagccgggcgugcccgugaaguggaagcgcugaggacuagucccuguucccagagcccacuuuuuuuucuuuuuuugaaauaaaauagccugucuuucagaucucaaaggcucuuuucagagccaccaaaaaaaaaaaaaaaaaaaaaaaaaaaaaaaaaaaaaaaaaaaaaaaaaaaaaaaaaaaaaaaaagaauu

SEQ ID NO: 24864 - RNA, 1717 nt, Artificial Sequence
  mRNA product Design a-1 (hSL-A64-N5) comprising derived and/or modified sequence from MOPV/LASV reassortant(IGS-1;Clade IV)__AFY05576__GPCmut3 (opt1)
aggagagucccgcagucggcguccagcggcucugcuuguucgugugugugucguugcaggccuuauucaagcuuaccaugggccagaucgugaccuucuuccaggaggucccccacgugaucgaggaggugaugaacaucguccugaucgcccucagcgugcuggccgugcugaaggggcucuacaacuucgcgaccugcggccuggucgggcuggugacguuccuccugcugugcggccgcuccugcaccaccagccucuacaaggggguguacgagcugcagacccuggagcucaacauggagacgcugaacaugaccaugccgcuguccugcaccaagaacaacagccaccacuacaucauggucggcaacgagaccggccucgagcugacgcugaccaacaccuccaucaucaaccacaaguucugcaaccucagcgacgcccacaagaagaaccuguacgaccacgcccugauguccaucaucagcaccuuccaccucuccauccccaacuucaaccaguacgaggccaugagcugcgacuucaacgggggcaagaucuccgugcaguacaaccugagccacuccuacgccggggacgcggccaaccacugcggcacgguggccaacgggguccugcagaccuucaugcggauggccuggggcggcagcuacaucgcgcucgacuccgggcgcggcaacugggacugcaucaugaccagcuaccaguaccugaucauccagaacaccacgugggaggaccacugccaguucucccggcccagccccaucggguaccugggccuccugucccagcgcacccgggacaucuacaucagccgccggcgccggggcaccuucaccuggacgcugagcgacuccgagggggaggacaccccgggcggguacugccucacccgcuggaugcugaucgaggccgagcugaagugcuucggcaacaccgccguggccaagugcaacgagaagcacgacgaggaguucugcgacaugcuccggcuguucgacuucaacaagcaggccauccagcgccugaaggcgcccgcccagaugagcauccagcucaucaacaaggccgugaacgcccugaucaacgaccagcugaucaugaagaaccaccuccgggacaucauggggauccccuacugcaacuacuccaaguacugcuaccugaaccacacgaccaccggccgcaccagccugcccaagugcugccucgucuccaacggcagcuaccugaacgagacgcacuucuccgacgacaucgagcagcaggccgacaacaugaucaccgagaugcugcagaaggaguacauggagcggcaggggaagaccccgcucggccugguggaccuguucguguucagcaccuccuucuaccugaucagcaucuuccuccaccuggucaagauccccacgcaccgccacaucguggggaaguccugccccaagccccaccggcugaaccacaugggcaucugcagcugcgggcucuacaagcagccgggcgugcccgucaaguggaagcgcugaggacuagucccuguucccagagcccacuuuuuuuucuuuuuuugaaauaaaauagccugucuuucagaucucaaaggcucuuuucagagccaccaaaaaaaaaaaaaaaaaaaaaaaaaaaaaaaaaaaaaaaaaaaaaaaaaaaaaaaaaaaaaaaaagaauu

SEQ ID NO: 24865 - RNA, 1717 nt, Artificial Sequence
  mRNA product Design a-1 (hSL-A64-N5) comprising derived and/or modified sequence from LASV(LM765-SLE-2012;Clade IV)__AIT17814__GPCmut3 (opt1)
aggagagucccgcagucggcguccagcggcucugcuuguucgugugugugucguugcaggccuuauucaagcuuaccaugggccagaucgugaccuucuuccaggaggucccccacgugaucgaggaggugaugaacaucguccugaucgcccucagcauccuggccgugcugaaggggcucuacaacuucgcgaccugcggccugguggggcuggucacguuccuccugcugugcggccgcuccugcaccaccagccucuacaaggggguguacgagcugcagacccuggagcucaacauggagacgcugaacaugaccaugccgcuguccugcaccaagaacaacagccaccacuacaucauggugggcaacgagaccggccucgagcugacgcugaccaacaccuccaucaucgaccacaaguucugcaaccucagcgacgcccaccggaagaaccuguacgaccacgcccugauguccaucaucagcaccuuccaccucuccauccccaacuucaaccaguacgaggccaugagcugcgacuucaacgggggcaagaucuccguccaguacaaccugagccacuccuacgccaaggacgcggccgaccacugcgggacgguggccaacggcgugcugcagaccuucaugcgcauggccuggggcgggagcuacaucgcgcucgacuccggccgggggcgcugggacugcaucaugaccagcuaccaguaccugaucauccagaacaccacgugggaggaccacugccaguucucccggcccagccccaucggcuaccuggggcuccugucccagcgcacccgggacaucuacaucagccgccggcgccggggcaccuucaccuggacgcugagcgacuccgagggcaaggacacccccgggggcuacugccucacccgcuggaugcugaucgaggccgagcugaagugcuucgggaacaccgccgucgccaagugcaacgagaagcacgacgaggaguucugcgacaugcuccggcuguucgacuucaacaagcaggccauccagcgccugaaggcgccggcccagaugagcauccagcucaucaacaaggccgugaacgcccugaucaacgaccagcugaucaugaagaaccaccuccgggacaucaugggcauccccuacugcaacuacuccaaguacugcuaccugaaccacacgaccaccgggaagaccagccugcccaagugcugccucguguccaacggcagcuaccugaacgagacgcacuucuccgacgacaucgagcagcaggccgacaacaugaucaccgagaugcugcagaaggaguacauggagcgccagggcaagaccccgcucgggcuggucgaccuguucguguucagcaccuccuucuaccugaucagcaucuuccuccaccuggugaagauccccacgcaccggcacaucgucggcaagcccugccccaagccgcaccgccugaaccacauggggaucugcuccugcggccucuacaagcagcccggggugcccgugaaguggaagcggugaggacuagucccuguucccagagcccacuuuuuuuucuuuuuuugaaauaaaauagccugucuuucagaucucaaaggcucuuuucagagccaccaaaaaaaaaaaaaaaaaaaaaaaaaaaaaaaaaaaaaaaaaaaaaaaaaaaaaaaaaaaaaaaaagaauu

SEQ ID NO: 24866 - RNA, 1717 nt, Artificial Sequence
  mRNA product Design a-1 (hSL-A64-N5) comprising derived and/or modified sequence from LASV(LM776-SLE-2012;Clade IV)__AIT17824__GPCmut3 (opt1)
aggagagucccgcagucggcguccagcggcucugcuuguucgugugugugucguugcaggccuuauucaagcuuaccaugggccagaucgugaccuucuuccaggaggucccccacgugaucgaggaggugaugaacaucguccugaucgcccucagcauccuggccgugcugaaggggcucuacaacuucgcgaccugcggccugguggggcuggucacguuccuccugcugugcggccgcuccugcaccaccagcguguacaaggggguguacgagcuccagacccuggagcugaacauggagacgcucaacaugaccaugccgcuguccugcaccaagaacaacagccaccacuacaucauggucggcaacgagaccggccuggagcucacgcugaccaacaccuccaucaucaaccacaaguucugcaaccugagcgacgcccacaagaagaaccucuacgaccacgcccugauguccaucaucagcaccuuccaccuguccauccccaacuucaaccaguacgaggccaugagcugcgacuucaacgggggcaagaucuccgugcaguacaaccucagccacuccuacgccggggacgcggccaaccacugcggcacgguggccaacgggguccugcagaccuucaugcggauggccuggggcggcagcuacaucgcgcuggacuccgggcacggcaagugggacugcaucaugaccagcuaccaguaccucaucauccagaacaccacgugggaggaccacugccaguucucccgccccagccccaucggguaccugggccugcucucccagcggacccgcgacaucuacaucagccggcgccggcgcggcaccuucaccuggacgcugagcgacuccgaggggaaggacaccccgggcggguacugccugacccgguggaugcucaucgaggccgagcugaagugcuucggcaacaccgccguggccaagugcaacgagaagcacgacgaggaguucugcgacaugcugcgccucuucgacuucaacaagcaggccauccagcggcugaaggcgcccgcccagaugagcauccagcugaucaacaaggccgugaacgcccucaucaacgaccagcugaucaugaagaaccaccuccgcgacaucauggggauccccuacugcaacuacuccaaguacugcuaccugaaccacacgaccaccggcaagaccagccugcccaagugcugccuggucuccaacggcagcuaccucaacgagacgcacuucuccgacgacaucgagcagcaggccgacaacaugaucaccgagaugcugcagaaggaguacauggagcggcaggggaagaccccgcugggccucguggaccuguucguguucagcaccuccuucuaccugaucagcaucuuccugcaccucgucaagauccccacgcaccgccacaucguggggaaguccugccccaagccccaccggcugaaccacaugggcaucugcagcugcgggcuguacaagcagccgggcgugcccguccgcuggaagcggugaggacuagucccuguucccagagcccacuuuuuuuucuuuuuuugaaauaaaauagccugucuuucagaucucaaaggcucuuuucagagccaccaaaaaaaaaaaaaaaaaaaaaaaaaaaaaaaaaaaaaaaaaaaaaaaaaaaaaaaaaaaaaaaaagaauu

SEQ ID NO: 24867 - RNA, 1717 nt, Artificial Sequence
  mRNA product Design a-1 (hSL-A64-N5) comprising derived and/or modified sequence from LASV(Mad39;Clade IV)__ANH09722__GPCmut3 (opt1)
aggagagucccgcagucggcguccagcggcucugcuuguucgugugugugucguugcaggccuuauucaagcuuaccaugggccagaucgugaccuucuuccaggaggucccccacgugaucgaggaggugaugaacaucguccugaucgcccucagcauccuggccgugcugaaggggcucuacaacguggcgaccugcggccugaucgggcuggucacguuccuccugcugugcggccgcuccugcaccaccacccucuacaaggggguguacgagcugcaggcccuggagcucaacauggagacgcugaacaugaccaugccgcugagcugcaccaagaacaacucccaccacuacauccgggugggcaacgagaccggccucgagcugacgcugaccaacaccagccucaucaaccacaaguucugcaaccuguccgacgcccacaagaagaaccuguacgaccacgcccucaugagcaucaucuccaccuuccaccugagcauccccaacuucaaccaguacgaggccauguccugcgacuucaacgacgggaagaucagcguccaguacaaccugucccacacguacgcgggcgacaccgccaaccacugcgggaccguggccaacggcgugcuccagaccuucaugcgcauggccuggggcgggagcuacaucgcgcuggacuccggccgcgggggcugggacugcaucaugacgagcuaccaguaccugaucauccagaacaccaccugggaggaccacugccaguucucccggcccagccccaucggguaccucggccugcugucccagcggacccgcgacaucuacaucagccggcgccggcgcggcacguucaccuggacccucuccgacagcgaggggaaggacaccccgggcggguacugccugacgcgguggaugcugaucgaggccgagcucaagugcuucggcaacaccgccgucgccaagugcaacgagaagcacgacgaggaguucugcgacaugcugcgccuguucgacuucaacaagcaggccauccagcggcucaaggcgcccgcccagaugagcauccagcugaucaacaaggccgugaacgcccugaucaacgaccagcucaucaugaagaaccaccuccgcgacaucauggggauccccuacugcaacuacuccaaguacugcuaccugaaccacaccgugaccggcaagacgagccugcccaagugcugccuggucuccaacggcagcuaccugaacgagacccacuucuccgacgacaucgagcagcaggccgacaacaugaucaccgagaugcuccagaaggaguacauggagcggcaggggaagaccccgcugggccugguggaccuguucguguucagcacguccuucuaccucaucagcaucuuccugcaccuggucaagauccccacccaccgccacgugguggggaagcccugccccaagccgcaccggcucaaccacaugggcaucugcuccugcggguucuacaagcagcccggcguccccgugcgcuggaagcggugaggacuagucccuguucccagagcccacuuuuuuuucuuuuuuugaaauaaaauagccugucuuucagaucucaaaggcucuuuucagagccaccaaaaaaaaaaaaaaaaaaaaaaaaaaaaaaaaaaaaaaaaaaaaaaaaaaaaaaaaaaaaaaaaagaauu

SEQ ID NO: 24868 - RNA, 1717 nt, Artificial Sequence
  mRNA product Design a-1 (hSL-A64-N5) comprising derived and/or modified sequence from LASV(Z0947-SLE-2011;Clade IV)__AIT17840__GPCmut3 (opt1)
aggagagucccgcagucggcguccagcggcucugcuuguucgugugugugucguugcaggccuuauucaagcuuaccaugggccagaucgugaccuucuuccaggaggucccccacgugaucgaggaggugaugaacaucguccugaucgcccucagcauccuggccgugcugaaggggcucuacaacuucgcgaccugcggccugguggggcuggucacguuccuccugcugugcggccgcuccugcaccaucagccucuacaaggggguguacgagcugcagacccuggagcucaacauggagacccugaacaugacgaugccgcuguccugcaccaagaacaacagccaccacuacaucauggugggcaacgagaccggccucgagcugacccugacgaacaccuccaucaucaaccacaaguucugcaaccucagcgacgcccacaagaagaaccuguacgaccacgcccugauguccaucaucagcaccuuccaccucuccauccccaacuucaaccaguacgaggccaugagcugcgacuucaacgggggcaagaucuccguccaguacaaccugagccacuccuacgccggggacgcggccaaccacugcggcaccguggccaacggggugcugcagacguucaugcggauggccuggggcggcagcuacaucgcgcucgacuccgggcgcgaccggugggacugcaucaugaccagcuaccaguaccugaucauccagaacaccaccugggaggaccacugccaguucucccgccccagccccaucggcuaccuggggcuccugucccagcggacgcgcgacaucuacaucagccggcgccggcgcggcaccuucaccuggacccugagcgacuccgagggcaaggacacgcccgggggcuacugccucacccgguggaugcugaucgaggccgagcugaagugcuucgggaacaccgccgucgccaagugcaacgagaagcacgacgaggaguucugcgacaugcuccgccuguucgacuucaacaagcaggccauccagcggcugaaggcgccggcccagaugagcauccagcucaucaacaaggccgugaacgcccugaucaacgaccagcugaucaugaagaaccaccuccgcgacaucaugggcauccccuacugcaacuacuccaaguacugcuaccugaaccacaccacgaccgggaagaccagccugcccaagugcugccucguguccaacggcagcuaccugaacgagacccacuucuccgacgacaucgagcagcaggccgacaacaugaucacggagaugcugcagaaggaguacauggagcggcagggcaagaccccgcucgggcuggucgaccuguucguguucagcaccuccuucuaccugaucagcaucuuccuccaccuggugaagauccccacccaccgccacaucgucggcaagcccugccccaagccgcaccggcugaaccacauggggaucugcuccugcggccucuacaagcagcccggggugcccgugaaguggaagcgcugaggacuagucccuguucccagagcccacuuuuuuuucuuuuuuugaaauaaaauagccugucuuucagaucucaaaggcucuuuucagagccaccaaaaaaaaaaaaaaaaaaaaaaaaaaaaaaaaaaaaaaaaaaaaaaaaaaaaaaaaaaaaaaaaagaauu

SEQ ID NO: 24869 - RNA, 1717 nt, Artificial Sequence
  mRNA product Design a-1 (hSL-A64-N5) comprising derived and/or modified sequence from LASV(Josiah;Clade IV)__NP_694870__GPCmut3 (opt4)
aggagagucccgcagucggcguccagcggcucugcuuguucgugugugugucguugcaggccuuauucaagcuuaccaugggccagaucgugaccuucuuccaggaggugccccacgugaucgaggaggugaugaacaucgugcugaucgcccugagcgugcuggccgugcugaagggccuguacaacuucgccaccugcggccuggugggccuggugaccuuccugcugcugugcggcagaagcugcaccaccagccuguacaagggcguguacgagcugcagacccuggagcugaacauggagacccugaacaugaccaugccccugagcugcaccaagaacaacagccaccacuacaucauggugggcaacgagaccggccuggagcugacccugaccaacaccagcaucaucaaccacaaguucugcaaccugagcgacgcccacaagaagaaccuguacgaccacgcccugaugagcaucaucagcaccuuccaccugagcauccccaacuucaaccaguacgaggccaugagcugcgacuucaacggcggcaagaucagcgugcaguacaaccugagccacagcuacgccggcgacgccgccaaccacugcggcaccguggccaacggcgugcugcagaccuucaugagaauggccuggggcggcagcuacaucgcccuggacagcggcagaggcaacugggacugcaucaugaccagcuaccaguaccugaucauccagaacaccaccugggaggaccacugccaguucagcagacccagccccaucggcuaccugggccugcugagccagagaaccagagacaucuacaucagcagaagaagaagaggcaccuucaccuggacccugagcgacagcgagggcaaggacacccccggcggcuacugccugaccagauggaugcugaucgaggccgagcugaagugcuucggcaacaccgccguggccaagugcaacgagaagcacgacgaggaguucugcgacaugcugagacuguucgacuucaacaagcaggccauccagagacugaaggcccccgcccagaugagcauccagcugaucaacaaggccgugaacgcccugaucaacgaccagcugaucaugaagaaccaccugagagacaucaugggcauccccuacugcaacuacagcaaguacugcuaccugaaccacaccaccaccggcagaaccagccugcccaagugcugccuggugagcaacggcagcuaccugaacgagacccacuucagcgacgacaucgagcagcaggccgacaacaugaucaccgagaugcugcagaaggaguacauggagagacagggcaagaccccccugggccugguggaccuguucguguucagcaccagcuucuaccugaucagcaucuuccugcaccuggugaagauccccacccacagacacaucgugggcaagagcugccccaagccccacagacugaaccacaugggcaucugcagcugcggccuguacaagcagcccggcgugcccgugaaguggaagagaugaggacuagucccuguucccagagcccacuuuuuuuucuuuuuuugaaauaaaauagccugucuuucagaucucaaaggcucuuuucagagccaccaaaaaaaaaaaaaaaaaaaaaaaaaaaaaaaaaaaaaaaaaaaaaaaaaaaaaaaaaaaaaaaaagaauu

SEQ ID NO: 24870 - RNA, 1714 nt, Artificial Sequence
  mRNA product Design a-1 (hSL-A64-N5) comprising derived and/or modified sequence from LASV(LP;Clade I)__AAF86701__GPCmut3 (opt4)
aggagagucccgcagucggcguccagcggcucugcuuguucgugugugugucguugcaggccuuauucaagcuuaccaugggccagaucaucaccuucuuccaggaggugccccacgugaucgaggaggugaugaacaucgugcugaucgcccugagccugcuggccauccugaagggccuguacaacaucgccaccugcggcaucaucggccugguggccuuccuguuccugugcggcaagagcugcagccugacccugaagggcggcuacgagcugcagacccuggagcugaacauggagacccugaacaugaccaugccccugagcugcaccaagaacagcagccaccacuacaucagagugggcaacgagaccggccuggagcugacccugaccaacaccagcaucaucaaccacaaguucugcaaccugagcgacgcccacaagaagaaccuguacgaccacgcccugaugagcaucaucagcaccuuccaccugagcauccccaacuucaaccaguacgaggccaugagcugcgacuucaacggcggcaagaucagcgugcaguacaaccugagccacagcuacgccggcgacgccgccgagcacugcggcaccguggccaacggcgugcugcagaccuucaugagaauggccuggggcggcagauacaucgcccuggacagcggcaagggcaacugggacugcaucaugaccagcuaccaguaccugaucauccagaacaccaccugggaggaccacugccaguucagcagacccagccccaucggcuaccugggccugcugagccagagaaccagagacaucuacaucagcagaagaagaagaggcaccuucaccuggacccugagcgacagcgagggcaacgagacccccggcggcuacugccugaccagauggaugcugaucgaggccgagcugaagugcuucggcaacaccgccguggccaagugcaacgagaagcacgacgaggaguucugcgacaugcugagacuguucgacuucaacaagcaggccaucagaagacugaaggcccccgcccagaugagcauccagcugaucaacaaggccgugaacgcccugaucaacgaccagcugaucaugaagaaccaccugagagacaucaugggcauccccuacugcaacuacagcaaguacugcuaccugaaccacaccagcagcggcagaaccagccugcccaagugcugccugaucagcaacggcagcuaccugaacgagacccaguucagcgacgacaucgagcagcaggccgacaacaugaucaccgagaugcugcagaaggaguacaucgagagacagggcaagaccccccugggccugguggacaucuucaucuucagcaccagcuucuaccugaucagcaucuuccugcaccugaucaagauccccacccacagacacaucgugggcaagcccugccccaagccccacagacugaaccacaugggcgugugcagcugcggccuguacaagcaccccggcgugcccaccaaguggaagagaugaggacuagucccuguucccagagcccacuuuuuuuucuuuuuuugaaauaaaauagccugucuuucagaucucaaaggcucuuuucagagccaccaaaaaaaaaaaaaaaaaaaaaaaaaaaaaaaaaaaaaaaaaaaaaaaaaaaaaaaaaaaaaaaaagaauu

SEQ ID NO: 24871 - RNA, 1714 nt, Artificial Sequence
  mRNA product Design a-1 (hSL-A64-N5) comprising derived and/or modified sequence from LASV(803213;Clade II)__AAF86703__GPCmut3 (opt4)
aggagagucccgcagucggcguccagcggcucugcuuguucgugugugugucguugcaggccuuauucaagcuuaccaugggccagaucaucaccuucuuccaggaggugccccacgugaucgaggaggugaugaacaucgugcugaucgcccugagccugcuggccauccugaagggcaucuacaacguggccaccugcggccuguucggccugaucagcuuccugcugcugugcggcagaagcugcagcgugaccuacaagggcguguacgagcugcagacccuggagcugaacauggccaaccugaacaugaccaugccccugagcugcaccaagaacaacagccaccacuacaucauggugggcaacgagaccggccuggagcugacccugaccaacaccagcaucaucaaccacaaguucugcaaccugagcgacgcccacaagaagaaccuguacgaccacgcccugaugagcaucaucagcaccuuccaccugagcauccccaacuucaaccaguacgaggccaugagcugcgacuucaacggcggcaagaucagcgugcaguacaaccugagccacagcuucgccguggacgccgccaaccacugcggcaccaucgccaacggcgugcugcagaccuucaugagaauggccuggggcggcagcuacaucgcccuggacagcggcaagggcaacugggacugcaucaugaccagcuaccaguaccugaucauccagaacaccaccugggaggaccacugccaguucagcagacccagccccaucggcuaccugggccugcugagccagagaaccagagacaucuacaucagcagaagaagaagaggcaccuucaccuggacccugagcgacagcgagggcaacgaggcccccggcggcuacugccugaccagauggaugcugaucgaggccgagcugaagugcuucggcaacaccgccguggccaagugcaacgagaagcacgacgaggaguucugcgacaugcugagacuguucgacuucaacaagcaggccaucaagagacugaagacccccgcccagaugagcauccagcugaucaacaaggccgugaacgcccugaucaacgaccagcugaucaugaagaaccaccugagagacaucaugggcauccccuacugcaacuacagcagauacugcuaccugaaccacaccgugaccggcaagaccagccugcccagaugcugccuggugagcaacggcagcuaccugaacgagacccacuucagcgacgacaucgagcagcaggccgacaacaugaucaccgagaugcugcagaaggaguacauggacagacagggcaagaccccccugggccugguggaccuguucguguucagcaccagcuucuaccugaucagcaucuuccugcaccuggugaagauccccacccacagacacaucgugggcaagcccugccccaagccccacagacugaaccacaugggcaucugcagcugcggccuguacaagcaccccggcgugcccgugaaguggaagagaugaggacuagucccuguucccagagcccacuuuuuuuucuuuuuuugaaauaaaauagccugucuuucagaucucaaaggcucuuuucagagccaccaaaaaaaaaaaaaaaaaaaaaaaaaaaaaaaaaaaaaaaaaaaaaaaaaaaaaaaaaaaaaaaaagaauu

SEQ ID NO: 24872 - RNA, 1714 nt, Artificial Sequence
  mRNA product Design a-1 (hSL-A64-N5) comprising derived and/or modified sequence from LASV(GA391;Clade III)__CAA36645__GPCmut3 (opt4)
aggagagucccgcagucggcguccagcggcucugcuuguucgugugugugucguugcaggccuuauucaagcuuaccaugggccagaucgugaccuucuuccaggaggugccccacgugaucgaggaggugaugaacaucgugcugaucgcccugagcauccuggccauccugaagggccuguacaacguggccaccugcggccugaucggccuggugaccuuccugcugcugagcggcagaagcugcagccugaucuacaagggcaccuacgagcugcagacccuggagcugaacauggagacccugaacaugaccaugccccugagcugcaccaagaacaacagccaccacuacaucagagugggcaacgagaccggccuggagcugacccugaccaacaccagcauccugaaccacaaguucugcaaccugagcgacgcccacaagagaaaccuguacgaccacagccugaugagcaucaucagcaccuuccaccugagcauccccaacuucaaccaguacgaggccaugagcugcgacuucaacggcggcaagaucaccgugcaguacaaccugagccacagcuucgccguggacgccgccggccacugcggcacccuggccaacggcgugcugcagaccuucaugagaauggccuggggcggcagcuacaucgcccuggacagcggcagaggcaacugggacugcaucaugaccagcuaccaguaccugaucauccagaacaccaccugggacgaccacugccaguucagcagacccagccccaucggcuaccugggccugcugagccagagaaccagagacaucuacaucagcagaagaagaagaggcaccuucaccuggacccugagcgacagcgagggcaacgagacccccggcggcuacugccugaccagauggaugcugaucgaggccgagcugaagugcuucggcaacaccgccguggccaagugcaacgagaagcacgacgaggaguucugcgacaugcugagacuguucgacuucaacaagcaggccaucagaagacugaagacccccgcccagaugagcauccagcugaucaacaaggccgugaacgcccugaucaacgaccagcugaucaugaagaaccaccugagagacaucaugggcauccccuacugcaacuacagcagauacugcuaccugaaccacaccagcaccggcaagaccagccugcccagaugcugccugaucagcaacggcagcuaccugaacgagaccaaguucagcgacgacaucgagcagcaggccgacaacaugaucaccgagaugcugcagaaggaguacaucgacagacagggcaagaccccccugggccugguggaccuguucguguucagcaccagcuucuaccugaucagcaucuuccugcaccuggugaagauccccacccacagacacaucgugggcaagcccugccccaagccccacagacugaaccacaugggcaucugcagcugcggccuguacaagcagcccggcgugcccgugagauggaagagaugaggacuagucccuguucccagagcccacuuuuuuuucuuuuuuugaaauaaaauagccugucuuucagaucucaaaggcucuuuucagagccaccaaaaaaaaaaaaaaaaaaaaaaaaaaaaaaaaaaaaaaaaaaaaaaaaaaaaaaaaaaaaaaaaagaauu

SEQ ID NO: 24873 - RNA, 1717 nt, Artificial Sequence
  mRNA product Design a-1 (hSL-A64-N5) comprising derived and/or modified sequence from LASV(AV;Clade V)__CCA30314__GPCmut3 (opt4)
aggagagucccgcagucggcguccagcggcucugcuuguucgugugugugucguugcaggccuuauucaagcuuaccaugggccagaucgugaccuucuuccaggaggugccccacgugaucgaggaggugaugaacaucgugcugaucgcccugagcauccuggccgugcugaagggccuguacaacaucgccaccugcggccugaucggccugaucaccuuccugcugcugugcggcagaagcugcagcagcaaccuguacaagggcguguacgagcugcagagccuggaccugaacauggagacccugaacaugaccaugccccugagcugcaccaagaacaacagccaccacuacaucagagugggcaacgacaccggccuggagcugacccugaccaacaccagcauccugaaccacaaguucugcaaccugagcgacgcccacaagaaggaccuguacgaccacgcccugaugagcaucaucagcaccuuccaccugagcauccccaacuucaaccaguacgaggccaugagcugcgacuucaacggcggcaagaucagcgugcaguacaaccugagccacagcuacgccaucgacgccgccaaccacugcggcaccguggccaacggcauccugcagaccuucaugagaauggccuggggcggcagcuacaucgcccuggacagcggcagaggcaacugggacugcaucaugaccagcuaccaguaccugaucauccagaacaccaccugggagaaccacugccaguucagcagacccagccccaucggcuaccugggccugcugagccagagaaccagagacaucuacaucagcagaagaagaagaggcaccuucaccuggacccugagcgacagcgagggcaacgccacccccggcggcuacugccugaccagauggaugcugaucgaggccgagcugaagugcuucggcaacaccgccguggccaagugcaacgagaagcacgacgaggaguucugcgacaugcugagacuguucgacuucaacaagcaggccaucagcagacugaagagccccgcccagaugagcauccagcugaucaacaaggccgugaacgcccugaucaacgaccagcugaucaugaagaaccaccugagagacaucaugggcauccccuacugcaacuacagcaaguacugcuaccugaaccacaccaucaccggcaagaccagccugcccaagugcugccuggugagcaacggcagcuaccugaacgagacccacuucagcgacgacaucgagcagcaggccgacaacaugaucaccgagaugcugcagaaggaguacauggagagacagggcaagaccccccugggccugguggaccuguucguguucagcaccagcuucuaccugaucagcaucuuccugagacuggugaagauccccacccacagacacaucgugggcaagcccugccccaagccccacagacugaaccacaugggcaucugcagcugcggccuguacaagcagcccggcgugcccgugagauggaagagaugaggacuagucccuguucccagagcccacuuuuuuuucuuuuuuugaaauaaaauagccugucuuucagaucucaaaggcucuuuucagagccaccaaaaaaaaaaaaaaaaaaaaaaaaaaaaaaaaaaaaaaaaaaaaaaaaaaaaaaaaaaaaaaaaagaauu

SEQ ID NO: 24874 - RNA, 1714 nt, Artificial Sequence
  mRNA product Design a-1 (hSL-A64-N5) comprising derived and/or modified sequence from LASV(Togo/2016/7082;Clade VI)__AMR44577__GPCmut3 (opt4)
aggagagucccgcagucggcguccagcggcucugcuuguucgugugugugucguugcaggccuuauucaagcuuaccaugggccagaucaucaccuucuuccaggaggugccccacgugaucgaggaggugaugaacaucgugcugaucgcccugagccugcuggccauccugaagggcguguacaacguggccaccugcggcaucaucggccuggugaccuuccuguuccugugcggcagaagcugcagccugaucuacaagggcagcuacgagcugcagacccuggagcugaacauggagacccugaacaugaccaugccccugagcugcaccaagaacagcagccaccacuacaucagagugggcaacgagaccggccuggagcugacccugaccaacaccagcaucaucaaccacaaguucugcaaccugagcgacgcccacaagagaaaccuguacgaccacgcccugaugagcauccugagcaccuuccaccugagcauccccaacuucaaccaguacgaggccaugagcugcgacuucaacggcggcaagaucagcgugcaguacaaccugagccacgccuacgccguggacgccgccgagcacugcggcaccguggccaacggcgugcugcagaccuucaugagaauggccuggggcggcagcuacaucgcccuggacagcggcagaggcaacugggacugcaucaugaccagcuaccaguaccugaucauccagaacaccaccugggaggaccacugccaguucagcagacccagccccaucggcuaccugggccugcugagccagagaaccagagacaucuacaucagcagaagaagaagaggcaccuucaccuggacccugagcgacagcgagggcaacgagacccccggcggcuacugccugaccagauggaugcugaucgaggccgagcugaagugcuucggcaacaccgccguggccaagugcaacgagaagcacgacgaggaguucugcgacaugcugagacuguucgacuucaacaagcaggccauccagagacugaagagccccgcccagaugagcauccagcugaucaacaaggccgugaacgcccugaucaacgaccagcugaucaugaagaaccaccugagagacaugaugggcauccccuacugcaacuacagcaaguacugcuaccugaaccacaccagcagcggcagaaccagccugcccaagugcugccuggugagcaacggcagcuaccugaacgagacccacuucagcgacgacaucgagcagcaggccgacaacaugaucaccgagaugcugcagaaggaguacaucgacagacagggcaagaccccccugggccugguggaccuguucguguucagcaccagcuucuaccugaucagcaucuuccugcaccugaucaagauccccacccacagacacaucgugggcaagcccugccccaagccccacagacugaaccacaugggcaucugcagcugcggccuguacaagcagcccggcgugcccaccagauggaagagaugaggacuagucccuguucccagagcccacuuuuuuuucuuuuuuugaaauaaaauagccugucuuucagaucucaaaggcucuuuucagagccaccaaaaaaaaaaaaaaaaaaaaaaaaaaaaaaaaaaaaaaaaaaaaaaaaaaaaaaaaaaaaaaaaagaauu

SEQ ID NO: 24875 - RNA, 1714 nt, Artificial Sequence
  mRNA product Design a-1 (hSL-A64-N5) comprising derived and/or modified sequence from LASV(KAK-428;Clade n.d. (VII))__ANH09740__GPCmut3 (opt4)
aggagagucccgcagucggcguccagcggcucugcuuguucgugugugugucguugcaggccuuauucaagcuuaccaugggccagaucgugaccuucuuccaggaggugccccacgugaucgaggaggugaugaacaucgugcugaucgcccugagccugcuggccauccugaagggccuguacaacuucgccaccugcggcgugaucggccugaucaccuuccugcugcugugcggcagaagcugcagcgccaccuacaagggccaguacgagcugcagacccuggagcugaacauggagagccugaacaugaccaugccccugagcugcaccaagaacaacagccaccacuacaucagagccggcaacaacaccggccuggagcugacccugaccaacaccagcaucaucagccacaaguucugcaaccugagcgacgcccacaagaagaaccuguacgaccacacccugaugagcaucaucaccaccuuccaccugagcauccccaacuucaaccaguacgaggccaugagcugcgacuucaacggcggcaagaucagcauccaguacaaccugagccacagcuacgccggcgacgccgcccagcacugcggcaccguggccaacggcgugcugcagaccuucaugagaauggccuggggcggcagcuaccuggcccuggacagcggcagaagaggcugggacugcaucaucagcagcuaccaguaccugaucauccagaacaccaccugggacgaccacugccaguucagcagacccagccccaucggcuaccugggcuucgugagccagaagaccagagacaucuacaucagcagaagaagaagaggcaccuucaccuggacccugagcgacagcgagggccacgacaugcccggcggcuacugccugaccagauggaugcugaucgaggccgaccugaagugcuucggcaacaccgccguggccaagugcaacgagaagcacgacgaggaguucugcgacauguggagacuguucgacuucaacaagcaggccauccagagacugaaggcccccgcccagaugaacauccagcugaucaacaaggccgugaacgcccugaucaacgaccagcugaugaugaagaaccaccugagagacaucaugggcauccccuacugcaacuacagcaaguucugcuaccugaacaacaccaccaccggcagaaccagccugcccagaugcugccugaucagcaacggcagcuaccugaacgagacccacuucagcgacgacaucgagcagcaggccgacaacaugaucaccgagaugcugcagaaggaguacauggacagacagggcaagaccccccugggccugguggaccuguucguguucagcaccagcuucuaccugaucaccaucuuccugcaccuggugaagauccccacccacagacacaucgugggcaagcccugccccaagccccacagacugaaccacaugggcaucugcagcugcggccuguacaagcagcccggcgugcccgugagauggaagagaugaggacuagucccuguucccagagcccacuuuuuuuucuuuuuuugaaauaaaauagccugucuuucagaucucaaaggcucuuuucagagccaccaaaaaaaaaaaaaaaaaaaaaaaaaaaaaaaaaaaaaaaaaaaaaaaaaaaaaaaaaaaaaaaaagaauu

SEQ ID NO: 24876 - RNA, 1714 nt, Artificial Sequence; identical to SEQ ID NO: 24870
  mRNA product Design a-1 (hSL-A64-N5) comprising derived and/or modified sequence from LASV(Pinneo-NIG-1969;Clade I)__AIT17836__GPCmut3 (opt4)

SEQ ID NO: 24877 - RNA, 1714 nt, Artificial Sequence
  mRNA product Design a-1 (hSL-A64-N5) comprising derived and/or modified sequence from LASV(ISTH0009-NIG-2011;Clade II)__AIT17404__GPCmut3 (opt4)
aggagagucccgcagucggcguccagcggcucugcuuguucgugugugugucguugcaggccuuauucaagcuuaccaugggccagaucaucaccuucuuccaggaggugccccacgugaucgaggaggugaugaacaucgugcugaucgcccugagccugcuggccauccugaagggcaucuacaacguggccaccugcggccuguucggccuggugagcuuccugcugcugugcggcagaagcugcagcaccaccuacaagggcguguacgagcugcagacccuggagcuggacauggccagccugaacaugaccaugccccugagcugcaccaagaacaacagccaccacuacaucauggugggcaacgagaccggccuggagcugacccugaccaacaccagcaucaucaaccacaaguucugcaaccugagcgacgcccacaagaagaaccuguacgaccacgcccugaugagcaucaucagcaccuuccaccugagcauccccaacuucaaccaguacgaggccaugagcugcgacuucaacggcggcaagaucagcgugcaguacaaccugagccacgccuacgccguggacgccgccaaccacugcggcaccaucgccaacggcgugcugcagaccuucaugagaauggccuggggcggcagcuacaucgcccuggacagcggcaagggcagcugggacugcaucaugaccagcuaccaguaccugaucauccagaacaccaccugggaggaccacugccaguucagcagacccagccccaucggcuaccugggccugcugagccagagaaccagagacaucuacaucagcagaagaagaagaggcaccuucaccuggacccugagcgacagcgagggcaacgagacccccggcggcuacugccugaccagauggaugcugaucgaggccgagcugaagugcuucggcaacaccgccguggccaagugcaacgagaagcacgacgaggaguucugcgacaugcugagacuguucgacuucaacaagcaggccaucagaagacugaagacccccgcccagaugagcauccagcugaucaacaaggccgugaacgcccugaucaacgaccagcugaucaugaagaaccaccugagagacaucaugggcauccccuacugcaacuacagcaaguacugcuaccugaaccacaccgugaccggcaagaccagccugcccagaugcugccuggugagcaacggcagcuaccugaacgagacccacuucagcgacgacaucgagcagcaggccgacaacaugaucaccgagcugcugcagaaggaguacauggacagacagggcaagaccccccugggccugguggaccuguucguguucagcaccagcuucuaccugaucagcaucuuccugcaccugaucaagauccccacccacagacacaucaccggcaagcccugccccaagccccacagacugaaccacaugggcaucugcagcugcggccuguacaagcaccccggcgugcccgugaaguggaagagaugaggacuagucccuguucccagagcccacuuuuuuuucuuuuuuugaaauaaaauagccugucuuucagaucucaaaggcucuuuucagagccaccaaaaaaaaaaaaaaaaaaaaaaaaaaaaaaaaaaaaaaaaaaaaaaaaaaaaaaaaaaaaaaaaagaauu

SEQ ID NO: 24878 - RNA, 1714 nt, Artificial Sequence
  mRNA product Design a-1 (hSL-A64-N5) comprising derived and/or modified sequence from LASV(ISTH2010-NIG-2012;Clade II)__AIT17482__GPCmut3 (opt4)
aggagagucccgcagucggcguccagcggcucugcuuguucgugugugugucguugcaggccuuauucaagcuuaccaugggccagaucaucaccuucuuccaggaggugccccacgugaucgaggaggugaugaacaucgugcugaucgcccugagccugcuggccauccugaagggcaucuacaacguggccaccugcggccuguucggccuggugagcuuccugcugcugugcggcagaagcugcagcaccaccuacaagggcguguacgagcugcagacccuggagcuggacauggccagccugaacaugaccaugccccugagcugcaccaagaacaacagccaccacuacaucauggugggcaacgagaccggccuggagcugacccugaccaacaccagcaucaucaaccacaaguucugcaaccugagcgacgcccacaagaagaaccuguacgaccacgcccugaugagcaucaucagcaccuuccaccugagcauccccaacuucaaccaguacgaggccaugagcugcgacuucaacggcggcaagaucagcgugcaguacaaccugagccacgccuacgccguggacgccgccaaccacugcggcaccaucgccaacggcgugcugcagaccuucaugagaauggccuggggcggcagcuacaucgcccuggacagcggcaagggcagcugggacugcaucaugaccagcuaccaguaccugaucauccagaacaucaccugggaggaccacugccaguucagcagacccagccccaucggcuaccugggccugcugagccagagaaccagagacaucuacaucagcagaagaagaagaggcaccuucaccuggacccugagcgacagcgagggcaacgagacccccggcggcuacugccugaccagauggaugcugaucgaggccgagcugaagugcuucggcaacaccgccguggccaagugcaacgagaagcacgacgaggaguucugcgacaugcugagacuguucgacuucaacaagcaggccaucagaagacugaagacccccgcccagaugagcauccagcugaucaacaaggccgugaacgcccugaucaacgaccagcugaucaugaagaaccaccugagagacaucaugggcauccccuacugcaacuacagcaaguacugcuaccugaaccacaccgugaccggcaagaccagccugcccagaugcugccuggugagcaacggcagcuaccugaacgagacccacuucagcgacgacaucgagcagcaggccgacaacaugaucaccgagcugcugcagaaggaguacaucgacagacagggcaagaccccccugggccugguggaccuguucguguucagcaccagcuucuaccugaucagcaucuuccugcaccuggugaagauccccacccacagacacguggugggcaagcccugccccaagccccacagacugaaccacaugggcaucugcagcugcggccuguacaagcaccccggcgugcccgugaaguggaagagaugaggacuagucccuguucccagagcccacuuuuuuuucuuuuuuugaaauaaaauagccugucuuucagaucucaaaggcucuuuucagagccaccaaaaaaaaaaaaaaaaaaaaaaaaaaaaaaaaaaaaaaaaaaaaaaaaaaaaaaaaaaaaaaaaagaauu

SEQ ID NO: 24879 - RNA, 1714 nt, Artificial Sequence
  mRNA product Design a-1 (hSL-A64-N5) comprising derived and/or modified sequence from LASV(Lassa virus/H.sapiens-wt/NGA/2015/ISTH_0543;Clade II)__AVO03639__GPCmut3 (opt4)
aggagagucccgcagucggcguccagcggcucugcuuguucgugugugugucguugcaggccuuauucaagcuuaccaugggccagaucaucaccuucuuccaggaggugccccacgugaucgaggaggugaugaacaucgugcugaucgcccugagccugcuggccauccugaagggcaucuacaacguggccaccugcggccuguucggccuggugagcuuccugcugcugugcggcagaagcugcagcaccaccuacaagggcguguacgagcugcagacccuggagcuggacauggccaaccugaacaugaccaugccccugagcugcaccaagaacaacagccaccacuacaucauggugggcaacgagaccggccuggagcugacccugaccaacaccagcaucaucaaccacaaguucugcaaccugagcgacgcccacaagaagaaccuguacgaccacgcccugaugagcaucaucagcaccuuccaccugagcauccccaacuucaaccaguacgaggccaugagcugcgacuucaacggcggcaagaucagcgugcaguacaaccugagccacaccuacgccguggacgccgccaaccacugcggcaccaucgccaacggcgugcugcagaccuucaugagaauggccuggggcggcagcuacaucgcccuggacagcggcaagggcagcugggacugcaucaugaccagcuaccaguaccuggugauccagaacaccaccugggaggaccacugccaguucagcagacccagccccaucggcuaccugggccugcugagccagagaaccagagacaucuacaucagcagaagaagaagaggcaccuucaccuggacccugagcgacagcgagggcaacgagacccccggcggcuacugccugaccagauggaugcugaucgaggccgagcugaagugcuucggcaacaccgccguggccaagugcaacgagaagcacgacgaggaguucugcgacaugcugagacuguucgacuucaacaagcaggccaucagaagacugaagacccccgcccagaugagcauccagcugaucaacaaggccgugaacgcccugaucaacgaccagcugaucaugaagaaccaccugagagacaucaugggcauccccuacugcaacuacagcaaguacugcuaccugaaccacaccgugaccggcaagaccagccugcccagaugcugccuggugagcaacggcagcuaccugaacgagacccacuucagcgacgacaucgagcagcaggccgacaacaugaucaccgagcugcugcagaaggaguacaucgacagacagggcaagaccccccugggccugguggaccuguucguguucagcaccagcuucuaccugaucagcaucuuccugcaccuggugaagauccccacccacagacacaucaccggcaagcccugccccaagccccacagacugaaccacaugggcaucugcagcugcggccuguacaagcaccccggcgugcccgugaaguggaagagaugaggacuagucccuguucccagagcccacuuuuuuuucuuuuuuugaaauaaaauagccugucuuucagaucucaaaggcucuuuucagagccaccaaaaaaaaaaaaaaaaaaaaaaaaaaaaaaaaaaaaaaaaaaaaaaaaaaaaaaaaaaaaaaaaagaauu
